United States Patent Application Publication US 2022/0290142 A1 - sequence listing, part 10

SEQ ID NO: 12854 - DNA, 6914 bp, Homo sapiens
atacgtgcttaatcctggtgcagggggcgagcatggccgctccgcgaggtgagccattggctggggtgtcggcgagtgtgttcgtggagcgcgtcctggggacgactcccggcattatcggccaggttgagtccgctcctggcattccgcggaaagatgggtgggtgccgggcagaggtgtggccacctgcgatggggattgacctccgaggggagggggcccttctagacgtcgtgccgtgggataggtaccttctgctccctccccgccaccctgcctcagatcagcacaaggtccttactgctgcccatctgacagttgggaacatcgaggcctgcagcggaggggggtctcatccaacagcctacaaaacccttatttgactctgtccccagtgagcacccccagctcttgcctggtttcccgggacactagggtggggcctgaggagtggagtggcagctgaccctgtctgtgcccctagtattcccactttcctgtgcggtgcagcagtatgcctgggggaagatgggttccaacagcgaagtggcgcggctgttggccagcagtgatccactggcccagatcgcagaggacaagccttatgcagaggtgagccccgggctgtatttcagcccactttacccgcaggtcaggagaaagggcctgaggcaagtcataagaatcagctgggaagggtgaggcagcaaggagggaggagacccacttggctcttcaggctaatggactagatagtgttatcaaaaagaagagaggttttgtcataataggctgggatttccagcactctccttcccccaaccactcttagcacttagtgaattttaattcagccctctttgacaattaagtttttttactttgactatttttttgcatttttattaacctaaaatatttctcctgcctatttagtggagaaaaagccaaagcataggaaggctttcgcctctgcttctgaaactggaagatgtatgttaacccctgaaagaatcatttaagagtcatagtttttctgctaccttgacagtgcagatgtcattctcctctttggacagacaaagaagatacatctaaagaagggaaataactagtccaagtcttcatagatggctagaggccgagtctggacaagggcctgggtctactgcctccctgtatgtccatgatggcatgaacatttgtatccagacctgggaggcctttcccaggactcagttgccctgtggggagcacagcataacggattgggacaggccaactcagggtggcaggtttcttcccccttcccctcccaagtttcctgtctttccagttgtggatggggactcacccccgaggggatgccaagatccttgacaaccgcatctcacagaagaccctaagccagtggattgctgagaaccaggacagcttgggctcaaaggtcaaggacacctttaatggcaacctgcccttcctcttcaaagtgctctcagttgaaacacccctgtccatccaggcacaccctaacaaggtaaaggacagagtgcggtgcagaggtcagggtacagaagggcttatgctaaggccctcccgtgacttttactgccacttttaccccacccatgccaggctcctgcccaaggccaaatccaggctgacaactcccaatttagctctgcaaagccagatggtagtgacacatgcagcaactaagtctaagcaaacagctcaccggcctgtgccaggggagtttctctaagctcattccaaggggcttgttcctggtcttccctcatccaacccatgtctattcatatctgccatttactcatctgctttcaggaagagttcaacttgcaaggcagggcaggtaccctcagccccacccccatggagtctccctacacaagccggagtcccatcctaagcaactgtggatcaaaactcctttttttttttttctgagacttgagtcttgctctgtcgcccaggctggagtgcagtggcgcgatctcggctcactgcaacctcctcctcccaattcaagcaattcttctgcttcagcctcgcaaatagctgggactacaggcacgcgccaccacacccagctaatttttgtatttttagtagagatggggtttcaccatgttggccaggctggtcttgaactcctgccctcgtaatccgctcgcctcagcctcccaaagtgctgggattacaggcgtgagccaccatgcccagccaaaactccttatttctagatacacaaagtaagacccagagaagggagggatttaccaaagccacacagcttgttagtgtcagagcttggtctggtatttgggtttcctgattcacaggccaagcctcttaaagtctgccccagcttttccctgatttgccccggggttgcccctgatttgcccctgccctgggttggctgagccccaagtttctgcaacatgctttgactgggctccttgccagaggtaggtagtcactgccatcctgcaactggggagggtggacagcaggggctaggtggcactggtgtacctgctaggtaatggctgtaccctcaccatcctcctcttcccctggccaccccacaggagctggcagagaagctgcacctccaggctccgcagcactaccccgatgccaaccacaagccagagatggccattgccctcacccccttccagggcttgtgtggcttccggccagttgaggagattgtaacctttctaaagagtaagttgggcagaatgctgaaggcatgcgtactgggccagggatacctggggaaccaagatgataggaacagtggctgagaacgggtcacatgtcacaggaactgaagggcctcatgaagcagtttttggagccagtgagccaggccagtgagaccaggctcaggtgtggtagtcaagggctggtggtgagtgattggtttccactgcaaagtttacttagcattgccggctctttggttagggctgggatggaaaggtgtcctccaactccccacttgtgtgggttccatcttaccattcctgatatgggccctgggccttgccttcctgtagaggtgcctgagtttcagttcctgattggagatgaggcagcaacacacctgaagcagaccatgagccatgactcccaggctgtggcctcctctctgcagagctgtttctcccacctgatgaagagtgagaagaaggtggtggtggaacagctcaacctgttggtgaagcggatctcccagcaaggtggacacagttatattcctggttgggtgcaatgctctggcctgggcttcccagcagacaccagactctggggacagttctcaacccccttgcccaagtggaacactaaaaggggccccacttagatgacctgttggcaacttagcattgcttgcctagtctttgtggagcagggcccttcttagttgagtgctgcttcccaactggtcatcttctccagatggttggaggcagactggcatagaggactcttaggatgccttccacctaggcattctgagattttccctagccctgcagctgccctccatggatggacttgtatctcggggctaaagaggcaggaaggggacacgagcatcctccctctcctggaaaggactgatgcctccagcactcagtcatttgatctttcctttaccttctgtgtgcccaaccttgtgctaagaagagttcaggaaatgactgtgatgggtgtggtcactgtcaccctaaaggtggggagtcaacacaagcagtaagaaacccaaaacagaacagactcccagcaatgagcttatgtggtgcaggcgatgaggtctcagcttcttagcctggcagccacaaccccttctctaggtggcccagagctctctttttattttacctctacaggtttcccattacctttgagccttagggcattatttatttgacccaagcatatttttttctgttcagtgtgtgtgtgtgtgtgtgtgtgtgtgtgtgtgtgtgtgtgtgtgtgtgtgtgtgtgtgtgtgtgtgtggtctctttctgttgccccaggctggagtgcagtggtgcgatcttggctcactgcagcctctgcctcccgggttcaagcaattctcctgcttcagcctcctgagtagctgggattacaggcatgtgccaccacatctggttaagtttttatattttagtagagacggagtttcaccatgttgcctaggcgggtctcgaactcctgagctcaggcaattcacctgcctcagcctcccaaagtgctaggattacaggtgtgagccaccacgccaggccccttgcctcactttaaagaagcctggctgggcacggtggctcacacctgtaatcctaacactttgggaggttgaggcggccgtatcacttgaggtcaggaattcaagaccagcctggccaacatggtggaaccccatctctactaaagatacaaaaattagccaggcgaggcagaggttgtggtgagcctagatcatgccactgcacttcagccggggcaatagagtgagactctgtctcaaaaaaaaaaaaaaaatgctgggcatggtggtgtgtgcctgtaatcccagctactcaggaggctgaggcgcaagaatcacttgaacccaggaggtggaggttgcagtgagtctagattgcaccactgcacttcagcctgggagacagagcaagactccgattcggaaaaaaaaaaaagaaaaagaaaaagaaaaaaaatttaaaaattaaagaagtccacccttgccactctacccaggctgagctcattttcccttgtcgtttccaggacacattttggccctcagcgcattctgcctcatgctctctggagcagaccgagagagattctctgagacatagaactttcttttttttttttgagacggagtctcgctgtgtcacccaggctggagtgcagtggtgcaatctcgatcactgcaacctccgcctcccgggttcaagcgattctcctgtctcagcctcccgagtagctgggattacaggcacgtgccaccacacctggctttttttttttttttttttgtatttttagtagagatggggtttcaccatgttggtcaaactggtctcgaactcctgacctcgtgatccgcctgccttggcctcccaaagtcctgagatgacaggtgtgagccaccgcgcccagctgagacacagaactttcagtgctaaaaactagaaagtcgccgggtgcggtggctcacacctgtattcccagcactttgggaggcctaggtgggaggatcccttgagttcaggagttcgagaccagcctgggcaatatagcgaccccctctctctgcaaataataaaaaacttagccgggcatggtggcatgcacgtgtggttctcgctactcaggaggctgaggtaggaggattgcttggtcctggacagttgaggctgcagtgaggtatgatcgtgccactgcactccagcctgggtgacagcgagaccccgtctcaaaaaaaaaaaagggaaagctcgggcatgttggttacccttcatgaaactcttttgcgttatctccctagattttgagctccaagggcagtggttctcatacaggggacatttggctgttgtctggagccattttttgattgtcaaaacccagataggggttgctagtggcatcttgtgggtggaggccagggaagctgctacacatccatcagtacacaggacagcccccacaataaagaattacctagcccaaatgtcagtagcgccaaggctgagaaatcccatcctgaaaggaccatactctagctcttttagtggctagtatagtcctgggcatatgaatagtcaagatatgatgaaagatggtatttgtatggactggagtatcaagcaaggctcgacccccaaagggctggaggcgtggccagaaggacagggccactttggcttctggattcctgtggcagggaccttttcctaggactccctggccaatgtggggctatgaacagcactgagtatccccctaagtgaccttggggtgctctgtgaccctcagcggctgccggaaacaacatggaggacatctttggggagcttttgctacagctgcaccagcagtacccaggtgatatcggctgctttgccatctacttcctgaacctgcttaccctgaagcctggggaggccatgtttctggaggccaacgtaccccatgcctacctgaaaggaggtgagccacatttcagcagtgagccccactgccatccctgctgggccctgtttccctatctggacaaaggaaggagaagggtggtcaaggagacccccaaggaccttgcagctctgacctctgagggttcctgggctcagcaagcaacagctggtagggatgatgaatgcatttagcattgaacacgccttgaatcctgacaccaaccctgtgatgccatgctactctgattttaagtcctgccagtcagtgtgggaaccacaatttgaacgcaggctatattggatcaaagctgttgttctgtcacagcctttgtatgtctgtcctacctaccagggatttttacactaaaatatgcatgttgccatggaaggatgccacctttcgactgttggctgcttatccacacatgcctcatgcacaggattctggggtagaagtgggagactacagagttggggctccccaacccccaggggttaacatgactcccctctgacaataatgggtgacctgtcacctgtttttggtatttgatatcttaaccccattctcccagagaatacaattcatggaaatttttacctaacttggcatggggttcatggagctcaggttaggaggcccaga

SEQ ID NO: 12855 - DNA, 1195 bp, Homo sapiens
atacgtgcttaatcctggtgcagggggcgagcatggccgctccgcgagttgtggatggggactcacccccgaggggatgccaagatccttgacaaccgcatctcacagaagaccctaagccagtggattgctgagaaccaggacagcttgggctcaaaggtcaaggacacctttaatggcaacctgcccttcctcttcaaagtgctctcagttgaaacacccctgtccatccaggcacaccctaacaaggagctggcagagaagctgcacctccaggctccgcagcactaccccgatgccaaccacaagccagagatggccattgccctcacccccttccagggcttgtgtggcttccggccagttgaggagattgtaacctttctaaagacggctgccggaaacaacatggaggacatctttggggagcttttgctacagctgcaccagcagtacccaggtgatatcggctgctttgccatctacttcctgaacctgcttaccctgaagcctggggaggccatgtttctggaggccaacgtaccccatgcctacctgaaaggaggtgagccacatttcagcagtgagccccactgccatccctgctgggccctgtttccctatctggacaaaggaaggagaagggtggtcaaggagacccccaaggaccttgcagctctgacctctgagggttcctgggctcagcaagcaacagctggtagggatgatgaatgcatttagcattgaacacgccttgaatcctgacaccaaccctgtgatgccatgctactctgattttaagtcctgccagtcagtgtgggaaccacaatttgaacgcaggctatattggatcaaagctgttgttctgtcacagcctttgtatgtctgtcctacctaccagggatttttacactaaaatatgcatgttgccatggaaggatgccacctttcgactgttggctgcttatccacacatgcctcatgcacaggattctggggtagaagtgggagactacagagttggggctccccaacccccaggggttaacatgactcccctctgacaataatgggtgacctgtcacctgtttttggtatttgatatcttaaccccattctcccagagaatacaattcatggaaatttttacctaacttggcatggggttcatggagctcaggttaggaggcccaga

SEQ ID NO: 12856 - DNA, 3189 bp, Homo sapiens
atacgtgcttaatcctggtgcagggggcgagcatggccgctccgcgaggtgagccattggctggggtgtcggcgagtgtgttcgtggagcgcgtcctggggacgactcccggcattatcggccaggttgagtccgctcctggcattccgcggaaagatgggtgggtgccgggcagaggtgtggccacctgcgatggggattgacctccgaggggagggggcccttctagacgtcgtgccgtgggataggtaccttctgctccctccccgccaccctgcctcagatcagcacaaggtccttactgctgcccatctgacagttgggaacatcgaggcctgcagcggaggggggtctcatccaacagcctacaaaacccttatttgactctgtccccagtgagcacccccagctcttgcctggtttcccgggacactagggtggggcctgaggagtggagtggcagctgaccctgtctgtgcccctagtattcccactttcctgtgcggtgcagcagtatgcctgggggaagatgggttccaacagcgaagtggcgcggctgttggccagcagtgatccactggcccagatcgcagaggacaagccttatgcagaggtgagccccgggctgtatttcagcccactttacccgcaggtcaggagaaagggcctgaggcaagtcataagaatcagctgggaagggtgaggcagcaaggagggaggagacccacttggctcttcaggctaatggactagatagtgttatcaaaaagaagagaggttttgtcataataggctgggatttccagcactctccttcccccaaccactcttagcacttagtgaattttaattcagccctctttgacaattaagtttttttactttgactatttttttgcatttttattaacctaaaatatttctcctgcctatttagtggagaaaaagccaaagcataggaaggctttcgcctctgcttctgaaactggaagatgtatgttaacccctgaaagaatcatttaagagtcatagtttttctgctaccttgacagtgcagatgtcattctcctctttggacagacaaagaagatacatctaaagaagggaaataactagtccaagtcttcatagatggctagaggccgagtctggacaagggcctgggtctactgcctccctgtatgtccatgatggcatgaacatttgtatccagacctgggaggcctttcccaggactcagttgccctgtggggagcacagcataacggattgggacaggccaactcagggtggcaggtttcttcccccttcccctcccaagtttcctgtctttccagttgtggatggggactcacccccgaggggatgccaagatccttgacaaccgcatctcacagaagaccctaagccagtggattgctgagaaccaggacagcttgggctcaaaggtcaaggacacctttaatggcaacctgcccttcctcttcaaagtgctctcagttgaaacacccctgtccatccaggcacaccctaacaaggtaaaggacagagtgcggtgcagaggtcagggtacagaagggcttatgctaaggccctcccgtgacttttactgccacttttaccccacccatgccaggctcctgcccaaggccaaatccaggctgacaactcccaatttagctctgcaaagccagatggtagtgacacatgcagcaactaagtctaagcaaacagctcaccggcctgtgccaggggagtttctctaagctcattccaaggggcttgttcctggtcttccctcatccaacccatgtctattcatatctgccatttactcatctgctttcaggaagagttcaacttgcaaggcagggcaggtaccctcagccccacccccatggagtctccctacacaagccggagtcccatcctaagcaactgtggatcaaaactcctttttttttttttctgagacttgagtcttgctctgtcgcccaggctggagtgcagtggcgcgatctcggctcactgcaacctcctcctcccaattcaagcaattcttctgcttcagcctcgcaaatagctgggactacaggcacgcgccaccacacccagctaatttttgtatttttagtagagatggggtttcaccatgttggccaggctggtcttgaactcctgccctcgtaatccgctcgcctcagcctcccaaagtgctgggattacaggcgtgagccaccatgcccagccaaaactccttatttctagatacacaaagtaagacccagagaagggagggatttaccaaagccacacagcttgttagtgtcagagcttggtctggtatttgggtttcctgattcacaggccaagcctcttaaagtctgccccagcttttccctgatttgccccggggttgcccctgatttgcccctgccctgggttggctgagccccaagtttctgcaacatgctttgactgggctccttgccagaggtaggtagtcactgccatcctgcaactggggagggtggacagcaggggctaggtggcactggtgtacctgctaggtaatggctgtaccctcaccatcctcctcttcccctggccaccccacaggagctggcagagaagctgcacctccaggctccgcagcactaccccgatgccaaccacaagccagagatggccattgccctcacccccttccagggcttgtgtggcttccggccagttgaggagattgtaacctttctaaagagtaagttgggcagaatgctgaaggcatgcgtactgggccagggatacctggggaaccaagatgataggaacagtggctgagaacgggtcacatgtcacaggaactgaagggcctcatgaagcagtttttggagccagtgagccaggccagtgagaccaggctcaggtgtggtagtcaagggctggtggtgagtgattggtttccactgcaaagtttacttagcattgccggctctttggttagggctgggatggaaaggtgtcctccaactccccacttgtgtgggttccatcttaccattcctgatatgggccctgggccttgccttcctgtagaggtgcctgagtttcagttcctgattggagatgaggcagcaacacacctgaagcagaccatgagccatgactcccaggctgtggcctcctctc

SEQ ID NO: 12857 - DNA, 583 bp, Homo sapiens
atacgtgcttaatcctggtgcagggggcgagcatggccgctccgcgagtatgcctgggggaagatgggttccaacagcgaagtggcgcggctgttggccagcagtgatccactggcccagatcgcagaggacaagccttatgcagagttgtggatggggactcacccccgaggggatgccaagatccttgacaaccgcatctcacagaagaccctaagccagtggattgctgagaaccaggacagcttgggctcaaaggtcaaggacacctttaatggcaacctgcccttcctcttcaaagtgctctcagttgaaacacccctgtccatccaggcacaccctaacaaggagctggcagagaagctgcacctccaggctccgcagcactaccccgatgccaaccacaagccagagatggccattgccctcacccccttccagggcttgtgtggcttccggccagttgaggagattgtaacctttctaaagaaggtgcctgagtttcagttcctgattggagatgaggcagcaacacacctgaagcagaccatgagccatgactcccaggctgtggcctcctctc

SEQ ID NO: 12858 - DNA, 698 bp, Homo sapiens
tagtgtgattgcatttattcttataaatgtacagagctgtagaagtgcaagccaagagttctatagagtagtacataaacaccatatggtaccactcctgctgggaggtaagcctggatacacccctctcctcaggaaactgtcacctgcagaacacacagcactcagaattaaggcagtttggccctgggcacattggtggtattttggtatgtggccactggccctaaacaactgaccatttctaccctgcctcactgcactgtcccaccaggtccctccagctttttctacaaggtaacaccctcctacatggggtcagccagctcagaaacctcttcttcagggacagttgcagctgaatatgccagagctgattattacaacaacgatgcagagggccttggttttggggtcctgccaccctcacccctagaagctgctaaacacccaggccattctgccctgaccacctccccaacagagatgtaggtctatacttaccttccacagccacctcccagcacacactgggtccctctacctgtgttgctgtctttctttacactgtgctacatttgatccctttccacatgtgcacttcacctctgcagacacaagaaaggcctggacatggtctctgcagatggggaaggggttctggatggagatgttcttgagctctacaagcatttgca

SEQ ID NO: 12859 - DNA, 415 bp, Homo sapiens
tagtgtgattgcatttattcttataaatgtacagagctgtagaagtgcaagccaagagttctatagagtagtacataaacaccatatggtaccactcctgctgggaggtaagcctggatacacccctctcctcaggaaactgtcacctgcagaacacacagcactcagaattaaggcagtttggccctgggcacattggtggtattttggtctatacttaccttccacagccacctcccagcacacactgggtccctctacctgtgttgctgtctttctttacactgtgctacatttgatccctttccacatgtgcacttcacctctgcagacacaagaaaggcctggacatggtctctgcagatggggaaggggttctggatggagatgttcttgagctctacaagcatttgca

SEQ ID NO: 12860 - DNA, 3725 bp, Homo sapiens
cagggggcgagcatggccgctccgcgaggtgagccattggctggggtgtcggcgagtgtgttcgtggagcgcgtcctggggacgactcccggcattatcggccaggttgagtccgctcctggcattccgcggaaagatgggtgggtgccgggcagaggtgtggccacctgcgatggggattgacctccgaggggagggggcccttctagacgtcgtgccgtgggataggtaccttctgctccctccccgccaccctgcctcagatcagcacaaggtccttactgctgcccatctgacagttgggaacatcgaggcctgcagcggaggggggtctcatccaacagcctacaaaacccttatttgactctgtccccagtgagcacccccagctcttgcctggtttcccgggacactagggtggggcctgaggagtggagtggcagctgaccctgtctgtgcccctagtattcccactttcctgtgcggtgcagcagtatgcctgggggaagatgggttccaacagcgaagtggcgcggctgttggccagcagtgatccactggcccagatcgcagaggacaagccttatgcagaggtgagccccgggctgtatttcagcccactttacccgcaggtcaggagaaagggcctgaggcaagtcataagaatcagctgggaagggtgaggcagcaaggagggaggagacccacttggctcttcaggctaatggactagatagtgttatcaaaaagaagagaggttttgtcataataggctgggatttccagcactctccttcccccaaccactcttagcacttagtgaattttaattcagccctctttgacaattaagtttttttactttgactatttttttgcatttttattaacctaaaatatttctcctgcctatttagtggagaaaaagccaaagcataggaaggctttcgcctctgcttctgaaactggaagatgtatgttaacccctgaaagaatcatttaagagtcatagtttttctgctaccttgacagtgcagatgtcattctcctctttggacagacaaagaagatacatctaaagaagggaaataactagtccaagtcttcatagatggctagaggccgagtctggacaagggcctgggtctactgcctccctgtatgtccatgatggcatgaacatttgtatccagacctgggaggcctttcccaggactcagttgccctgtggggagcacagcataacggattgggacaggccaactcagggtggcaggtttcttcccccttcccctcccaagtttcctgtctttccagttgtggatggggactcacccccgaggggatgccaagatccttgacaaccgcatctcacagaagaccctaagccagtggattgctgagaaccaggacagcttgggctcaaaggtcaaggacacctttaatggcaacctgcccttcctcttcaaagtgctctcagttgaaacacccctgtccatccaggcacaccctaacaaggtaaaggacagagtgcggtgcagaggtcagggtacagaagggcttatgctaaggccctcccgtgacttttactgccacttttaccccacccatgccaggctcctgcccaaggccaaatccaggctgacaactcccaatttagctctgcaaagccagatggtagtgacacatgcagcaactaagtctaagcaaacagctcaccggcctgtgccaggggagtttctctaagctcattccaaggggcttgttcctggtcttccctcatccaacccatgtctattcatatctgccatttactcatctgctttcaggaagagttcaacttgcaaggcagggcaggtaccctcagccccacccccatggagtctccctacacaagccggagtcccatcctaagcaactgtggatcaaaactcctttttttttttttctgagacttgagtcttgctctgtcgcccaggctggagtgcagtggcgcgatctcggctcactgcaacctcctcctcccaattcaagcaattcttctgcttcagcctcgcaaatagctgggactacaggcacgcgccaccacacccagctaatttttgtatttttagtagagatggggtttcaccatgttggccaggctggtcttgaactcctgccctcgtaatccgctcgcctcagcctcccaaagtgctgggattacaggcgtgagccaccatgcccagccaaaactccttatttctagatacacaaagtaagacccagagaagggagggatttaccaaagccacacagcttgttagtgtcagagcttggtctggtatttgggtttcctgattcacaggccaagcctcttaaagtctgccccagcttttccctgatttgccccggggttgcccctgatttgcccctgccctgggttggctgagccccaagtttctgcaacatgctttgactgggctccttgccagaggtaggtagtcactgccatcctgcaactggggagggtggacagcaggggctaggtggcactggtgtacctgctaggtaatggctgtaccctcaccatcctcctcttcccctggccaccccacaggagctggcagagaagctgcacctccaggctccgcagcactaccccgatgccaaccacaagccagagatggccattgccctcacccccttccagggcttgtgtggcttccggccagttgaggagattgtaacctttctaaagagtaagttgggcagaatgctgaaggcatgcgtactgggccagggatacctggggaaccaagatgataggaacagtggctgagaacgggtcacatgtcacaggaactgaagggcctcatgaagcagtttttggagccagtgagccaggccagtgagaccaggctcaggtgtggtagtcaagggctggtggtgagtgattggtttccactgcaaagtttacttagcattgccggctctttggttagggctgggatggaaaggtgtcctccaactccccacttgtgtgggttccatcttaccattcctgatatgggccctgggccttgccttcctgtagaggtgcctgagtttcagttcctgattggagatgaggcagcaacacacctgaagcagaccatgagccatgactcccaggctgtggcctcctctctgcagagctgtttctcccacctgatgaagagtgagaagaaggtggtggtggaacagctcaacctgttggtgaagcggatctcccagcaaggtggacacagttatattcctggttgggtgcaatgctctggcctgggcttcccagcagacaccagactctggggacagttctcaacccccttgcccaagtggaacactaaaaggggccccacttagatgacctgttggcaacttagcattgcttgcctagtctttgtggagcagggcccttcttagttgagtgctgcttcccaactggtcatcttctccagatggttggaggcagactggcatagaggactcttaggatgccttccacctaggcattctgagattttccctagccctgcagctgccctccatggatggacttgtatctcggggctaaagaggcaggaaggggacacgagcatcctccctctcctggaaaggactgatgcctccagcactcagtcatttgatctttcctttaccttctgtgtgcccaaccttgtgctaagaagagttcaggaaatgac

SEQ ID NO: 12861 - DNA, 1148 bp, Homo sapiens
cagggggcgagcatggccgctccgcgagtattcccactttcctgtgcggtgcagcagtatgcctgggggaagatgggttccaacagcgaagtggcgcggctgttggccagcagtgatccactggcccagatcgcagaggacaagccttatgcagagttgtggatggggactcacccccgaggggatgccaagatccttgacaaccgcatctcacagaagaccctaagccagtggattgctgagaaccaggacagcttgggctcaaaggtcaaggacacctttaatggcaacctgcccttcctcttcaaagtgctctcagttgaaacacccctgtccatccaggcacaccctaacaaggagctggcagagaagctgcacctccaggctccgcagcactaccccgatgccaaccacaagccagagatggccattgccctcacccccttccagggcttgtgtggcttccggccagttgaggagattgtaacctttctaaagaaggtgcctgagtttcagttcctgattggagatgaggcagcaacacacctgaagcagaccatgagccatgactcccaggctgtggcctcctctctgcagagctgtttctcccacctgatgaagagtgagaagaaggtggtggtggaacagctcaacctgttggtgaagcggatctcccagcaaggtggacacagttatattcctggttgggtgcaatgctctggcctgggcttcccagcagacaccagactctggggacagttctcaacccccttgcccaagtggaacactaaaaggggccccacttagatgacctgttggcaacttagcattgcttgcctagtctttgtggagcagggcccttcttagttgagtgctgcttcccaactggtcatcttctccagatggttggaggcagactggcatagaggactcttaggatgccttccacctaggcattctgagattttccctagccctgcagctgccctccatggatggacttgtatctcggggctaaagaggcaggaaggggacacgagcatcctccctctcctggaaaggactgatgcctccagcactcagtcatttgatctttcctttaccttctgtgtgcccaaccttgtgctaagaagagttcaggaaatgac

SEQ ID NO: 12862 - DNA, 9403 bp, Homo sapiens
ggcatacgtgcttaatcctggtgcagggggcgagcatggccgctccgcgaggtgagccattggctggggtgtcggcgagtgtgttcgtggagcgcgtcctggggacgactcccggcattatcggccaggttgagtccgctcctggcattccgcggaaagatgggtgggtgccgggcagaggtgtggccacctgcgatggggattgacctccgaggggagggggcccttctagacgtcgtgccgtgggataggtaccttctgctccctccccgccaccctgcctcagatcagcacaaggtccttactgctgcccatctgacagttgggaacatcgaggcctgcagcggaggggggtctcatccaacagcctacaaaacccttatttgactctgtccccagtgagcacccccagctcttgcctggtttcccgggacactagggtggggcctgaggagtggagtggcagctgaccctgtctgtgcccctagtattcccactttcctgtgcggtgcagcagtatgcctgggggaagatgggttccaacagcgaagtggcgcggctgttggccagcagtgatccactggcccagatcgcagaggacaagccttatgcagaggtgagccccgggctgtatttcagcccactttacccgcaggtcaggagaaagggcctgaggcaagtcataagaatcagctgggaagggtgaggcagcaaggagggaggagacccacttggctcttcaggctaatggactagatagtgttatcaaaaagaagagaggttttgtcataataggctgggatttccagcactctccttcccccaaccactcttagcacttagtgaattttaattcagccctctttgacaattaagtttttttactttgactatttttttgcatttttattaacctaaaatatttctcctgcctatttagtggagaaaaagccaaagcataggaaggctttcgcctctgcttctgaaactggaagatgtatgttaacccctgaaagaatcatttaagagtcatagtttttctgctaccttgacagtgcagatgtcattctcctctttggacagacaaagaagatacatctaaagaagggaaataactagtccaagtcttcatagatggctagaggccgagtctggacaagggcctgggtctactgcctccctgtatgtccatgatggcatgaacatttgtatccagacctgggaggcctttcccaggactcagttgccctgtggggagcacagcataacggattgggacaggccaactcagggtggcaggtttcttcccccttcccctcccaagtttcctgtctttccagttgtggatggggactcacccccgaggggatgccaagatccttgacaaccgcatctcacagaagaccctaagccagtggattgctgagaaccaggacagcttgggctcaaaggtcaaggacacctttaatggcaacctgcccttcctcttcaaagtgctctcagttgaaacacccctgtccatccaggcacaccctaacaaggtaaaggacagagtgcggtgcagaggtcagggtacagaagggcttatgctaaggccctcccgtgacttttactgccacttttaccccacccatgccaggctcctgcccaaggccaaatccaggctgacaactcccaatttagctctgcaaagccagatggtagtgacacatgcagcaactaagtctaagcaaacagctcaccggcctgtgccaggggagtttctctaagctcattccaaggggcttgttcctggtcttccctcatccaacccatgtctattcatatctgccatttactcatctgctttcaggaagagttcaacttgcaaggcagggcaggtaccctcagccccacccccatggagtctccctacacaagccggagtcccatcctaagcaactgtggatcaaaactcctttttttttttttctgagacttgagtcttgctctgtcgcccaggctggagtgcagtggcgcgatctcggctcactgcaacctcctcctcccaattcaagcaattcttctgcttcagcctcgcaaatagctgggactacaggcacgcgccaccacacccagctaatttttgtatttttagtagagatggggtttcaccatgttggccaggctggtcttgaactcctgccctcgtaatccgctcgcctcagcctcccaaagtgctgggattacaggcgtgagccaccatgcccagccaaaactccttatttctagatacacaaagtaagacccagagaagggagggatttaccaaagccacacagcttgttagtgtcagagcttggtctggtatttgggtttcctgattcacaggccaagcctcttaaagtctgccccagcttttccctgatttgccccggggttgcccctgatttgcccctgccctgggttggctgagccccaagtttctgcaacatgctttgactgggctccttgccagaggtaggtagtcactgccatcctgcaactggggagggtggacagcaggggctaggtggcactggtgtacctgctaggtaatggctgtaccctcaccatcctcctcttcccctggccaccccacaggagctggcagagaagctgcacctccaggctccgcagcactaccccgatgccaaccacaagccagagatggccattgccctcacccccttccagggcttgtgtggcttccggccagttgaggagattgtaacctttctaaagagtaagttgggcagaatgctgaaggcatgcgtactgggccagggatacctggggaaccaagatgataggaacagtggctgagaacgggtcacatgtcacaggaactgaagggcctcatgaagcagtttttggagccagtgagccaggccagtgagaccaggctcaggtgtggtagtcaagggctggtggtgagtgattggtttccactgcaaagtttacttagcattgccggctctttggttagggctgggatggaaaggtgtcctccaactccccacttgtgtgggttccatcttaccattcctgatatgggccctgggccttgccttcctgtagaggtgcctgagtttcagttcctgattggagatgaggcagcaacacacctgaagcagaccatgagccatgactcccaggctgtggcctcctctctgcagagctgtttctcccacctgatgaagagtgagaagaaggtggtggtggaacagctcaacctgttggtgaagcggatctcccagcaaggtggacacagttatattcctggttgggtgcaatgctctggcctgggcttcccagcagacaccagactctggggacagttctcaacccccttgcccaagtggaacactaaaaggggccccacttagatgacctgttggcaacttagcattgcttgcctagtctttgtggagcagggcccttcttagttgagtgctgcttcccaactggtcatcttctccagatggttggaggcagactggcatagaggactcttaggatgccttccacctaggcattctgagattttccctagccctgcagctgccctccatggatggacttgtatctcggggctaaagaggcaggaaggggacacgagcatcctccctctcctggaaaggactgatgcctccagcactcagtcatttgatctttcctttaccttctgtgtgcccaaccttgtgctaagaagagttcaggaaatgactgtgatgggtgtggtcactgtcaccctaaaggtggggagtcaacacaagcagtaagaaacccaaaacagaacagactcccagcaatgagcttatgtggtgcaggcgatgaggtctcagcttcttagcctggcagccacaaccccttctctaggtggcccagagctctctttttattttacctctacaggtttcccattacctttgagccttagggcattatttatttgacccaagcatatttttttctgttcagtgtgtgtgtgtgtgtgtgtgtgtgtgtgtgtgtgtgtgtgtgtgtgtgtgtgtgtgtgtgtgtgtgtggtctctttctgttgccccaggctggagtgcagtggtgcgatcttggctcactgcagcctctgcctcccgggttcaagcaattctcctgcttcagcctcctgagtagctgggattacaggcatgtgccaccacatctggttaagtttttatattttagtagagacggagtttcaccatgttgcctaggcgggtctcgaactcctgagctcaggcaattcacctgcctcagcctcccaaagtgctaggattacaggtgtgagccaccacgccaggccccttgcctcactttaaagaagcctggctgggcacggtggctcacacctgtaatcctaacactttgggaggttgaggcggccgtatcacttgaggtcaggaattcaagaccagcctggccaacatggtggaaccccatctctactaaagatacaaaaattagccaggcgaggcagaggttgtggtgagcctagatcatgccactgcacttcagccggggcaatagagtgagactctgtctcaaaaaaaaaaaaaaaatgctgggcatggtggtgtgtgcctgtaatcccagctactcaggaggctgaggcgcaagaatcacttgaacccaggaggtggaggttgcagtgagtctagattgcaccactgcacttcagcctgggagacagagcaagactccgattcggaaaaaaaaaaaagaaaaagaaaaagaaaaaaaatttaaaaattaaagaagtccacccttgccactctacccaggctgagctcattttcccttgtcgtttccaggacacattttggccctcagcgcattctgcctcatgctctctggagcagaccgagagagattctctgagacatagaactttcttttttttttttgagacggagtctcgctgtgtcacccaggctggagtgcagtggtgcaatctcgatcactgcaacctccgcctcccgggttcaagcgattctcctgtctcagcctcccgagtagctgggattacaggcacgtgccaccacacctggctttttttttttttttttttgtatttttagtagagatggggtttcaccatgttggtcaaactggtctcgaactcctgacctcgtgatccgcctgccttggcctcccaaagtcctgagatgacaggtgtgagccaccgcgcccagctgagacacagaactttcagtgctaaaaactagaaagtcgccgggtgcggtggctcacacctgtattcccagcactttgggaggcctaggtgggaggatcccttgagttcaggagttcgagaccagcctgggcaatatagcgaccccctctctctgcaaataataaaaaacttagccgggcatggtggcatgcacgtgtggttctcgctactcaggaggctgaggtaggaggattgcttggtcctggacagttgaggctgcagtgaggtatgatcgtgccactgcactccagcctgggtgacagcgagaccccgtctcaaaaaaaaaaaagggaaagctcgggcatgttggttacccttcatgaaactcttttgcgttatctccctagattttgagctccaagggcagtggttctcatacaggggacatttggctgttgtctggagccattttttgattgtcaaaacccagataggggttgctagtggcatcttgtgggtggaggccagggaagctgctacacatccatcagtacacaggacagcccccacaataaagaattacctagcccaaatgtcagtagcgccaaggctgagaaatcccatcctgaaaggaccatactctagctcttttagtggctagtatagtcctgggcatatgaatagtcaagatatgatgaaagatggtatttgtatggactggagtatcaagcaaggctcgacccccaaagggctggaggcgtggccagaaggacagggccactttggcttctggattcctgtggcagggaccttttcctaggactccctggccaatgtggggctatgaacagcactgagtatccccctaagtgaccttggggtgctctgtgaccctcagcggctgccggaaacaacatggaggacatctttggggagcttttgctacagctgcaccagcagtacccaggtgatatcggctgctttgccatctacttcctgaacctgcttaccctgaagcctggggaggccatgtttctggaggccaacgtaccccatgcctacctgaaaggaggtgagccacatttcagcagtgagccccactgccatccctgctgggccctgtttccctatctggacaaaggaaggagaagggtggtcaaggagacccccaaggaccttgcagctctgacctctgagggttcctgggctcagcaagcaacagctggtagggatgatgaatgcatttagcattgaacacgccttgaatcctgacaccaaccctgtgatgccatgctactctgattttaagtcctgccagtcagtgtgggaaccacaatttgaacgcaggctatattggatcaaagctgttgttctgtcacagcctttgtatgtctgtcctacctaccagggatttttacactaaaatatgcatgttgccatggaaggatgccacctttcgactgttggctgcttatccacacatgcctcatgcacaggattctggggtagaagtgggagactacagagttggggctccccaacccccaggggttaacatgactcccctctgacaataatgggtgacctgtcacctgtttttggtatttgatatcttaaccccattctcccagagaatacaattcatggaaatttttacctaacttggcatggggttcatggagctcaggttaggaggcccagaactggagagctaaggcatacttcatcagcttagcacatgacgactgtctctccagactgcgtggagtgcatggcgtgttcagacaacacagttcgtgctggcctgacacccaagttcattgatgtgccaaccctgtgtgaaatgctcagctatacccctagctccagcaaggacaggctctttctcccaacacggagtcaggaagacccctacctctcaatctatgacccccctgtaccagacttcaccattatgaagacggaggtgagtgaggggctatgatgggtgtccttcgtgtgccatgaaaatctctggcaagggtcacgatgtggaggacacctggggctgggtttcctgtcaagcccacttggcggagggtggccccagggcctgcccattccttcctgtaccagggaccaggcctctatgctgactgagcctgggttgtgcgagaaggtggcagagctctccctcgtgccctggggactgtcctgggcccatgagctgatgagagcagagtctgagctgcactgccttatcatttcttcctgcccaggtccctggctctgtcactgaatacaaggtcttggcactggactctgccagcatcctcctgatggtacaggggacagtaatagccagcacacccacaacccagacaccaatccctctgcaacgtggtggcgtgctcttcattggggccaatgagagtgtctcactgaagcttactgagccgaaggacctgctgatattccgtgcctgctgtctgctgtaaaggctgcagcctccccagctctcctctgccagccaccctaaattccagccaacctcacctcctcgggcccagctcaagcccccttccttgctctggaccccttaggtataccctggaagagctggggtgggggaggagggagcgtgaaggtagtgactcctgaacacacccaggtggaaccatctttggggaggagaggcccgtgtgaggggtctgatactccctttgtcttccctctctactcctcgctacacctgagccaggctcttgccaactctgttccagcctatggctttaggctagctgttaaatatgtgacccagcattagctcagcatctgtcagagcaagagaccaggtaatttctaagaacagggttctagcgatgggactgcccatttcctcagctgcagaggaggaaagggaaagggtaggcctgtagactaacgctgtttacacccttgttctgtcaaagcaattaaagatcacttgtgttgaggctgtggggtaatgagcactcagcctttggggtacctgttcctaaagtgggccaaaagagccctccctacatgatgccccagtttttgctttattcctatttcatacagcttctcgggggagtgagcaggctacactccagaacaccggtatgggaaggagtgggagaggaagccagctttggcctcacaggcacagcttgcaagcaggccttgggtctgcccagaggcacagcttgcaagcagccctacagagaaggtgactcaaaggatacaccagtcaccagtgcaagactcttcgctcctgtttttctcttttttttttttttgagacggagtctcggtctgtagcccaggctggagtgcagtggcacgatctcggctcattgcaagctccgcctcccgggttcacgccactcttctgcctcagcctcccaagtagctgggaccacaggcgcccaccaccacgcccagccaatttttttggtatttttagtagagatggggtttcactgtgttagccaggatggtctcgatcttctgacctcgtgatccgcccacctcagcctcccaaagtgctgggattacaggcgtgagccaccacgcctggcccggctcctgtttttcaactggccctagaggaggggtccgcaaaccaggctggcaggccagttctggccatacctgttcatttccatactgtctggctgctttcaagccacagtggcaaagttgaagagttgcactagactgtacggcctgcaaaactgaaaccattgactgtcaaccacttctctacaacatactcaactgttgcagattacagggactcaggaaccgaattagacaattttcatggcgaggagaagcccagttagctttcctaaacgggcaggaagtgtgaaggagggaatctcctgatgccctgctccaggggtggcacacacctgcaagaggctgtcggctgtctgctgctgctgaggtttctgacctgcaatcgtagatcctgtcaccacagactaatcacttagtccactggctccttcctgtgggataaaggtttaaattcatgcaaaagaatctttctgggcttctgcccacactagagtccctatacaatggagttccaggaaaccaccttcaaaaatctcctgggttttcttgcctccaaattttcttcagctaaaaaacaataaagatgagctggaaagaaaa

SEQ ID NO: 12863 - DNA, 2809 bp, Homo sapiens
ggcatacgtgcttaatcctggtgcagggggcgagcatggccgctccgcgagtattcccactttcctgtgcggtgcagcagtatgcctgggggaagatgggttccaacagcgaagtggcgcggctgttggccagcagtgatccactggcccagatcgcagaggacaagccttatgcagagttgtggatggggactcacccccgaggggatgccaagatccttgacaaccgcatctcacagaagaccctaagccagtggattgctgagaaccaggacagcttgggctcaaaggtcaaggacacctttaatggcaacctgcccttcctcttcaaagtgctctcagttgaaacacccctgtccatccaggcacaccctaacaaggagctggcagagaagctgcacctccaggctccgcagcactaccccgatgccaaccacaagccagagatggccattgccctcacccccttccagggcttgtgtggcttccggccagttgaggagattgtaacctttctaaagaaggtgcctgagtttcagttcctgattggagatgaggcagcaacacacctgaagcagaccatgagccatgactcccaggctgtggcctcctctctgcagagctgtttctcccacctgatgaagagtgagaagaaggtggtggtggaacagctcaacctgttggtgaagcggatctcccagcaagcggctgccggaaacaacatggaggacatctttggggagcttttgctacagctgcaccagcagtacccaggtgatatcggctgctttgccatctacttcctgaacctgcttaccctgaagcctggggaggccatgtttctggaggccaacgtaccccatgcctacctgaaaggaggtccctggctctgtcactgaatacaaggtcttggcactggactctgccagcatcctcctgatggtacaggggacagtaatagccagcacacccacaacccagacaccaatccctctgcaacgtggtggcgtgctcttcattggggccaatgagagtgtctcactgaagcttactgagccgaaggacctgctgatattccgtgcctgctgtctgctgtaaaggctgcagcctccccagctctcctctgccagccaccctaaattccagccaacctcacctcctcgggcccagctcaagcccccttccttgctctggaccccttaggtataccctggaagagctggggtgggggaggagggagcgtgaaggtagtgactcctgaacacacccaggtggaaccatctttggggaggagaggcccgtgtgaggggtctgatactccctttgtcttccctctctactcctcgctacacctgagccaggctcttgccaactctgttccagcctatggctttaggctagctgttaaatatgtgacccagcattagctcagcatctgtcagagcaagagaccaggtaatttctaagaacagggttctagcgatgggactgcccatttcctcagctgcagaggaggaaagggaaagggtaggcctgtagactaacgctgtttacacccttgttctgtcaaagcaattaaagatcacttgtgttgaggctgtggggtaatgagcactcagcctttggggtacctgttcctaaagtgggccaaaagagccctccctacatgatgccccagtttttgctttattcctatttcatacagcttctcgggggagtgagcaggctacactccagaacaccggtatgggaaggagtgggagaggaagccagctttggcctcacaggcacagcttgcaagcaggccttgggtctgcccagaggcacagcttgcaagcagccctacagagaaggtgactcaaaggatacaccagtcaccagtgcaagactcttcgctcctgtttttctcttttttttttttttgagacggagtctcggtctgtagcccaggctggagtgcagtggcacgatctcggctcattgcaagctccgcctcccgggttcacgccactcttctgcctcagcctcccaagtagctgggaccacaggcgcccaccaccacgcccagccaatttttttggtatttttagtagagatggggtttcactgtgttagccaggatggtctcgatcttctgacctcgtgatccgcccacctcagcctcccaaagtgctgggattacaggcgtgagccaccacgcctggcccggctcctgtttttcaactggccctagaggaggggtccgcaaaccaggctggcaggccagttctggccatacctgttcatttccatactgtctggctgctttcaagccacagtggcaaagttgaagagttgcactagactgtacggcctgcaaaactgaaaccattgactgtcaaccacttctctacaacatactcaactgttgcagattacagggactcaggaaccgaattagacaattttcatggcgaggagaagcccagttagctttcctaaacgggcaggaagtgtgaaggagggaatctcctgatgccctgctccaggggtggcacacacctgcaagaggctgtcggctgtctgctgctgctgaggtttctgacctgcaatcgtagatcctgtcaccacagactaatcacttagtccactggctccttcctgtgggataaaggtttaaattcatgcaaaagaatctttctgggcttctgcccacactagagtccctatacaatggagttccaggaaaccaccttcaaaaatctcctgggttttcttgcctccaaattttcttcagctaaaaaacaataaagatgagctggaaagaaaa

SEQ ID NO: 12864 - DNA, 2795 bp, Homo sapiens
aataaaaaacttagccgggcatggtggcatgcacgtgtggttctcgctactcaggaggctgaggtaggaggattgcttggtcctggacagttgaggctgcagtgaggtatgatcgtgccactgcactccagcctgggtgacagcgagaccccgtctcaaaaaaaaaaaagggaaagctcgggcatgttggttacccttcatgaaactcttttgcgttatctccctagattttgagctccaagggcagtggttctcatacaggggacatttggctgttgtctggagccattttttgattgtcaaaacccagataggggttgctagtggcatcttgtgggtggaggccagggaagctgctacacatccatcagtacacaggacagcccccacaataaagaattacctagcccaaatgtcagtagcgccaaggctgagaaatcccatcctgaaaggaccatactctagctcttttagtggctagtatagtcctgggcatatgaatagtcaagatatgatgaaagatggtatttgtatggactggagtatcaagcaaggctcgacccccaaagggctggaggcgtggccagaaggacagggccactttggcttctggattcctgtggcagggaccttttcctaggactccctggccaatgtggggctatgaacagcactgagtatccccctaagtgaccttggggtgctctgtgaccctcagcggctgccggaaacaacatggaggacatctttggggagcttttgctacagctgcaccagcagtacccaggtgatatcggctgctttgccatctacttcctgaacctgcttaccctgaagcctggggaggccatgtttctggaggccaacgtaccccatgcctacctgaaaggaggtgagccacatttcagcagtgagccccactgccatccctgctgggccctgtttccctatctggacaaaggaaggagaagggtggtcaaggagacccccaaggaccttgcagctctgacctctgagggttcctgggctcagcaagcaacagctggtagggatgatgaatgcatttagcattgaacacgccttgaatcctgacaccaaccctgtgatgccatgctactctgattttaagtcctgccagtcagtgtgggaaccacaatttgaacgcaggctatattggatcaaagctgttgttctgtcacagcctttgtatgtctgtcctacctaccagggatttttacactaaaatatgcatgttgccatggaaggatgccacctttcgactgttggctgcttatccacacatgcctcatgcacaggattctggggtagaagtgggagactacagagttggggctccccaacccccaggggttaacatgactcccctctgacaataatgggtgacctgtcacctgtttttggtatttgatatcttaaccccattctcccagagaatacaattcatggaaatttttacctaacttggcatggggttcatggagctcaggttaggaggcccagaactggagagctaaggcatacttcatcagcttagcacatgacgactgtctctccagactgcgtggagtgcatggcgtgttcagacaacacagttcgtgctggcctgacacccaagttcattgatgtgccaaccctgtgtgaaatgctcagctatacccctagctccagcaaggacaggctctttctcccaacacggagtcaggaagacccctacctctcaatctatgacccccctgtaccagacttcaccattatgaagacggaggtgagtgaggggctatgatgggtgtccttcgtgtgccatgaaaatctctggcaagggtcacgatgtggaggacacctggggctgggtttcctgtcaagcccacttggcggagggtggccccagggcctgcccattccttcctgtaccagggaccaggcctctatgctgactgagcctgggttgtgcgagaaggtggcagagctctccctcgtgccctggggactgtcctgggcccatgagctgatgagagcagagtctgagctgcactgccttatcatttcttcctgcccaggtccctggctctgtcactgaatacaaggtcttggcactggactctgccagcatcctcctgatggtacaggggacagtaatagccagcacacccacaacccagacaccaatccctctgcaacgtggtggcgtgctcttcattggggccaatgagagtgtctcactgaagcttactgagccgaaggacctgctgatattccgtgcctgctgtctgctgtaaaggctgcagcctccccagctctcctctgccagccaccctaaattccagccaacctcacctcctcgggcccagctcaagcccccttccttgctctggaccccttaggtataccctggaagagctggggtgggggaggagggagcgtgaaggtagtgactcctgaacacacccaggtggaaccatctttggggaggagaggcccgtgtgaggggtctgatactccctttgtcttccctctctactcctcgctacacctgagccaggctcttgccaactctgttccagcctatggctttaggctagctgttaaatatgtgacccagcattagctcagcatctgtcagagcaagagaccaggtaatttctaagaacagggttctagcgatgggactgcccatttcctcagctgcagaggaggaaagggaaagggtaggcctgtagactaacgctgtttacacccttgttctgtcaaagcaattaaagatcacttgtgttgag

SEQ ID NO: 12865 - DNA, 2795 bp, Homo sapiens; identical to SEQ ID NO: 12864

SEQ ID NO: 12866 - DNA, 2828 bp, Homo sapiens
tacgtgcttaatcctggtgcagggggcgagcatggccgctccgcgaggtgagccattggctggggtgtcggcgagtgtgttcgtggagcgcgtcctggggacgactcccggcattatcggccaggttgagtccgctcctggcattccgcggaaagatgggtgggtgccgggcagaggtgtggccacctgcgatggggattgacctccgaggggagggggcccttctagacgtcgtgccgtgggataggtaccttctgctccctccccgccaccctgcctcagatcagcacaaggtccttactgctgcccatctgacagttgggaacatcgaggcctgcagcggaggggggtctcatccaacagcctacaaaacccttatttgactctgtccccagtgagcacccccagctcttgcctggtttcccgggacactagggtggggcctgaggagtggagtggcagctgaccctgtctgtgcccctagtattcccactttcctgtgcggtgcagcagtatgcctgggggaagatgggttccaacagcgaagtggcgcggctgttggccagcagtgatccactggcccagatcgcagaggacaagccttatgcagaggtgagccccgggctgtatttcagcccactttacccgcaggtcaggagaaagggcctgaggcaagtcataagaatcagctgggaagggtgaggcagcaaggagggaggagacccacttggctcttcaggctaatggactagatagtgttatcaaaaagaagagaggttttgtcataataggctgggatttccagcactctccttcccccaaccactcttagcacttagtgaattttaattcagccctctttgacaattaagtttttttactttgactatttttttgcatttttattaacctaaaatatttctcctgcctatttagtggagaaaaagccaaagcataggaaggctttcgcctctgcttctgaaactggaagatgtatgttaacccctgaaagaatcatttaagagtcatagtttttctgctaccttgacagtgcagatgtcattctcctctttggacagacaaagaagatacatctaaagaagggaaataactagtccaagtcttcatagatggctagaggccgagtctggacaagggcctgggtctactgcctccctgtatgtccatgatggcatgaacatttgtatccagacctgggaggcctttcccaggactcagttgccctgtggggagcacagcataacggattgggacaggccaactcagggtggcaggtttcttcccccttcccctcccaagtttcctgtctttccagttgtggatggggactcacccccgaggggatgccaagatccttgacaaccgcatctcacagaagaccctaagccagtggattgctgagaaccaggacagcttgggctcaaaggtcaaggacacctttaatggcaacctgcccttcctcttcaaagtgctctcagttgaaacacccctgtccatccaggcacaccctaacaaggtaaaggacagagtgcggtgcagaggtcagggtacagaagggcttatgctaaggccctcccgtgacttttactgccacttttaccccacccatgccaggctcctgcccaaggccaaatccaggctgacaactcccaatttagctctgcaaagccagatggtagtgacacatgcagcaactaagtctaagcaaacagctcaccggcctgtgccaggggagtttctctaagctcattccaaggggcttgttcctggtcttccctcatccaacccatgtctattcatatctgccatttactcatctgctttcaggaagagttcaacttgcaaggcagggcaggtaccctcagccccacccccatggagtctccctacacaagccggagtcccatcctaagcaactgtggatcaaaactcctttttttttttttctgagacttgagtcttgctctgtcgcccaggctggagtgcagtggcgcgatctcggctcactgcaacctcctcctcccaattcaagcaattcttctgcttcagcctcgcaaatagctgggactacaggcacgcgccaccacacccagctaatttttgtatttttagtagagatggggtttcaccatgttggccaggctggtcttgaactcctgccctcgtaatccgctcgcctcagcctcccaaagtgctgggattacaggcgtgagccaccatgcccagccaaaactccttatttctagatacacaaagtaagacccagagaagggagggatttaccaaagccacacagcttgttagtgtcagagcttggtctggtatttgggtttcctgattcacaggccaagcctcttaaagtctgccccagcttttccctgatttgccccggggttgcccctgatttgcccctgccctgggttggctgagccccaagtttctgcaacatgctttgactgggctccttgccagaggtaggtagtcactgccatcctgcaactggggagggtggacagcaggggctaggtggcactggtgtacctgctaggtaatggctgtaccctcaccatcctcctcttcccctggccaccccacaggagctggcagagaagctgcacctccaggctccgcagcactaccccgatgccaaccacaagccagagatggccattgccctcacccccttccagggcttgtgtggcttccggccagttgaggagattgtaacctttctaaagagtaagttgggcagaatgctgaaggcatgcgtactgggccagggatacctggggaaccaagatgatagg

SEQ ID NO: 12867 - DNA, 586 bp, Homo sapiens
tacgtgcttaatcctggtgcagggggcgagcatggccgctccgcgagtattcccactttcctgtgcggtgcagcagtatgcctgggggaagatgggttccaacagcgaagtggcgcggctgttggccagcagtgatccactggcccagatcgcagaggacaagccttatgcagagttgtggatggggactcacccccgaggggatgccaagatccttgacaaccgcatctcacagaagaccctaagccagtggattgctgagaaccaggacagcttgggctcaaaggtcaaggacacctttaatggcaacctgcccttcctcttcaaagtgctctcagttgaaacacccctgtccatccaggcacaccctaacaaggagctggcagagaagctgcacctccaggctccgcagcactaccccgatgccaaccacaagccagagatggccattgccctcacccccttccagggcttgtgtggcttccggccagttgaggagattgtaacctttctaaagagtaagttgggcagaatgctgaaggcatgcgtactgggccagggatacctggggaaccaagatgatagg

SEQ ID NO: 12868 - DNA, 3178 bp, Homo sapiens
atacgtgcttaatcctggtgcagggggcgagcatggccgctccgcgaggtgagccattggctggggtgtcggcgagtgtgttcgtggagcgcgtcctggggacgactcccggcattatcggccaggttgagtccgctcctggcattccgcggaaagatgggtgggtgccgggcagaggtgtggccacctgcgatggggattgacctccgaggggagggggcccttctagacgtcgtgccgtgggataggtaccttctgctccctccccgccaccctgcctcagatcagcacaaggtccttactgctgcccatctgacagttgggaacatcgaggcctgcagcggaggggggtctcatccaacagcctacaaaacccttatttgactctgtccccagtgagcacccccagctcttgcctggtttcccgggacactagggtggggcctgaggagtggagtggcagctgaccctgtctgtgcccctagtattcccactttcctgtgcggtgcagcagtatgcctgggggaagatgggttccaacagcgaagtggcgcggctgttggccagcagtgatccactggcccagatcgcagaggacaagccttatgcagaggtgagccccgggctgtatttcagcccactttacccgcaggtcaggagaaagggcctgaggcaagtcataagaatcagctgggaagggtgaggcagcaaggagggaggagacccacttggctcttcaggctaatggactagatagtgttatcaaaaagaagagaggttttgtcataataggctgggatttccagcactctccttcccccaaccactcttagcacttagtgaattttaattcagccctctttgacaattaagtttttttactttgactatttttttgcatttttattaacctaaaatatttctcctgcctatttagtggagaaaaagccaaagcataggaaggctttcgcctctgcttctgaaactggaagatgtatgttaacccctgaaagaatcatttaagagtcatagtttttctgctaccttgacagtgcagatgtcattctcctctttggacagacaaagaagatacatctaaagaagggaaataactagtccaagtcttcatagatggctagaggccgagtctggacaagggcctgggtctactgcctccctgtatgtccatgatggcatgaacatttgtatccagacctgggaggcctttcccaggactcagttgccctgtggggagcacagcataacggattgggacaggccaactcagggtggcaggtttcttcccccttcccctcccaagtttcctgtctttccagttgtggatggggactcacccccgaggggatgccaagatccttgacaaccgcatctcacagaagaccctaagccagtggattgctgagaaccaggacagcttgggctcaaaggtcaaggacacctttaatggcaacctgcccttcctcttcaaagtgctctcagttgaaacacccctgtccatccaggcacaccctaacaaggtaaaggacagagtgcggtgcagaggtcagggtacagaagggcttatgctaaggccctcccgtgacttttactgccacttttaccccacccatgccaggctcctgcccaaggccaaatccaggctgacaactcccaatttagctctgcaaagccagatggtagtgacacatgcagcaactaagtctaagcaaacagctcaccggcctgtgccaggggagtttctctaagctcattccaaggggcttgttcctggtcttccctcatccaacccatgtctattcatatctgccatttactcatctgctttcaggaagagttcaacttgcaaggcagggcaggtaccctcagccccacccccatggagtctccctacacaagccggagtcccatcctaagcaactgtggatcaaaactcctttttttttttttctgagacttgagtcttgctctgtcgcccaggctggagtgcagtggcgcgatctcggctcactgcaacctcctcctcccaattcaagcaattcttctgcttcagcctcgcaaatagctgggactacaggcacgcgccaccacacccagctaatttttgtatttttagtagagatggggtttcaccatgttggccaggctggtcttgaactcctgccctcgtaatccgctcgcctcagcctcccaaagtgctgggattacaggcgtgagccaccatgcccagccaaaactccttatttctagatacacaaagtaagacccagagaagggagggatttaccaaagccacacagcttgttagtgtcagagcttggtctggtatttgggtttcctgattcacaggccaagcctcttaaagtctgccccagcttttccctgatttgccccggggttgcccctgatttgcccctgccctgggttggctgagccccaagtttctgcaacatgctttgactgggctccttgccagaggtaggtagtcactgccatcctgcaactggggagggtggacagcaggggctaggtggcactggtgtacctgctaggtaatggctgtaccctcaccatcctcctcttcccctggccaccccacaggagctggcagagaagctgcacctccaggctccgcagcactaccccgatgccaaccacaagccagagatggccattgccctcacccccttccagggcttgtgtggcttccggccagttgaggagattgtaacctttctaaagagtaagttgggcagaatgctgaaggcatgcgtactgggccagggatacctggggaaccaagatgataggaacagtggctgagaacgggtcacatgtcacaggaactgaagggcctcatgaagcagtttttggagccagtgagccaggccagtgagaccaggctcaggtgtggtagtcaagggctggtggtgagtgattggtttccactgcaaagtttacttagcattgccggctctttggttagggctgggatggaaaggtgtcctccaactccccacttgtgtgggttccatcttaccattcctgatatgggccctgggccttgccttcctgtagaggtgcctgagtttcagttcctgattggagatgaggcagcaacacacctgaagcagaccatgagccatgactcccaggctgt

SEQ ID NO: 12869 - DNA, 559 bp, Homo sapiens
atacgtgcttaatcctggtgcagggggcgagcatggccgctccgcgagtattcccactttcctgtgcggtgcagcagtatgcctgggggaagatgggttccaacagcgaagtggcgcggctgttggccagcagtgatccactggcccagatcgcagaggacaagccttatgcagagttgtggatggggactcacccccgaggggatgccaagatccttgacaaccgcatctcacagaagaccctaagccagtggattgctgagaaccaggacagcttgggctcaaaggtcaaggacacctttaatggcaacctgcccttcctcttcaaagtgctctcagttgaaacacccctgtccatccaggctccgcagcactaccccgatgccaaccacaagccagagatggccattgccctcacccccttccagggcttgtgtggcttccggccagttgaggagattgtaacctttctaaagaaggtgcctgagtttcagttcctgattggagatgaggcagcaacacacctgaagcagaccatgagccatgactcccaggctgt

SEQ ID NO: 12870 - DNA, 7408 bp, Homo sapiens
cagcagtatgcctgggggaagatgggttccaacagcgaagtggcgcggctgttggccagcagtgatccactggcccagatcgcagaggacaagccttatgcagaggtgagccccgggctgtatttcagcccactttacccgcaggtcaggagaaagggcctgaggcaagtcataagaatcagctgggaagggtgaggcagcaaggagggaggagacccacttggctcttcaggctaatggactagatagtgttatcaaaaagaagagaggttttgtcataataggctgggatttccagcactctccttcccccaaccactcttagcacttagtgaattttaattcagccctctttgacaattaagtttttttactttgactatttttttgcatttttattaacctaaaatatttctcctgcctatttagtggagaaaaagccaaagcataggaaggctttcgcctctgcttctgaaactggaagatgtatgttaacccctgaaagaatcatttaagagtcatagtttttctgctaccttgacagtgcagatgtcattctcctctttggacagacaaagaagatacatctaaagaagggaaataactagtccaagtcttcatagatggctagaggccgagtctggacaagggcctgggtctactgcctccctgtatgtccatgatggcatgaacatttgtatccagacctgggaggcctttcccaggactcagttgccctgtggggagcacagcataacggattgggacaggccaactcagggtggcaggtttcttcccccttcccctcccaagtttcctgtctttccagttgtggatggggactcacccccgaggggatgccaagatccttgacaaccgcatctcacagaagaccctaagccagtggattgctgagaaccaggacagcttgggctcaaaggtcaaggacacctttaatggcaacctgcccttcctcttcaaagtgctctcagttgaaacacccctgtccatccaggcacaccctaacaaggtaaaggacagagtgcggtgcagaggtcagggtacagaagggcttatgctaaggccctcccgtgacttttactgccacttttaccccacccatgccaggctcctgcccaaggccaaatccaggctgacaactcccaatttagctctgcaaagccagatggtagtgacacatgcagcaactaagtctaagcaaacagctcaccggcctgtgccaggggagtttctctaagctcattccaaggggcttgttcctggtcttccctcatccaacccatgtctattcatatctgccatttactcatctgctttcaggaagagttcaacttgcaaggcagggcaggtaccctcagccccacccccatggagtctccctacacaagccggagtcccatcctaagcaactgtggatcaaaactcctttttttttttttctgagacttgagtcttgctctgtcgcccaggctggagtgcagtggcgcgatctcggctcactgcaacctcctcctcccaattcaagcaattcttctgcttcagcctcgcaaatagctgggactacaggcacgcgccaccacacccagctaatttttgtatttttagtagagatggggtttcaccatgttggccaggctggtcttgaactcctgccctcgtaatccgctcgcctcagcctcccaaagtgctgggattacaggcgtgagccaccatgcccagccaaaactccttatttctagatacacaaagtaagacccagagaagggagggatttaccaaagccacacagcttgttagtgtcagagcttggtctggtatttgggtttcctgattcacaggccaagcctcttaaagtctgccccagcttttccctgatttgccccggggttgcccctgatttgcccctgccctgggttggctgagccccaagtttctgcaacatgctttgactgggctccttgccagaggtaggtagtcactgccatcctgcaactggggagggtggacagcaggggctaggtggcactggtgtacctgctaggtaatggctgtaccctcaccatcctcctcttcccctggccaccccacaggagctggcagagaagctgcacctccaggctccgcagcactaccccgatgccaaccacaagccagagatggccattgccctcacccccttccagggcttgtgtggcttccggccagttgaggagattgtaacctttctaaagagtaagttgggcagaatgctgaaggcatgcgtactgggccagggatacctggggaaccaagatgataggaacagtggctgagaacgggtcacatgtcacaggaactgaagggcctcatgaagcagtttttggagccagtgagccaggccagtgagaccaggctcaggtgtggtagtcaagggctggtggtgagtgattggtttccactgcaaagtttacttagcattgccggctctttggttagggctgggatggaaaggtgtcctccaactccccacttgtgtgggttccatcttaccattcctgatatgggccctgggccttgccttcctgtagaggtgcctgagtttcagttcctgattggagatgaggcagcaacacacctgaagcagaccatgagccatgactcccaggctgtggcctcctctctgcagagctgtttctcccacctgatgaagagtgagaagaaggtggtggtggaacagctcaacctgttggtgaagcggatctcccagcaaggtggacacagttatattcctggttgggtgcaatgctctggcctgggcttcccagcagacaccagactctggggacagttctcaacccccttgcccaagtggaacactaaaaggggccccacttagatgacctgttggcaacttagcattgcttgcctagtctttgtggagcagggcccttcttagttgagtgctgcttcccaactggtcatcttctccagatggttggaggcagactggcatagaggactcttaggatgccttccacctaggcattctgagattttccctagccctgcagctgccctccatggatggacttgtatctcggggctaaagaggcaggaaggggacacgagcatcctccctctcctggaaaggactgatgcctccagcactcagtcatttgatctttcctttaccttctgtgtgcccaaccttgtgctaagaagagttcaggaaatgactgtgatgggtgtggtcactgtcaccctaaaggtggggagtcaacacaagcagtaagaaacccaaaacagaacagactcccagcaatgagcttatgtggtgcaggcgatgaggtctcagcttcttagcctggcagccacaaccccttctctaggtggcccagagctctctttttattttacctctacaggtttcccattacctttgagccttagggcattatttatttgacccaagcatatttttttctgttcagtgtgtgtgtgtgtgtgtgtgtgtgtgtgtgtgtgtgtgtgtgtgtgtgtgtgtgtgtgtgtgtgtgtggtctctttctgttgccccaggctggagtgcagtggtgcgatcttggctcactgcagcctctgcctcccgggttcaagcaattctcctgcttcagcctcctgagtagctgggattacaggcatgtgccaccacatctggttaagtttttatattttagtagagacggagtttcaccatgttgcctaggcgggtctcgaactcctgagctcaggcaattcacctgcctcagcctcccaaagtgctaggattacaggtgtgagccaccacgccaggccccttgcctcactttaaagaagcctggctgggcacggtggctcacacctgtaatcctaacactttgggaggttgaggcggccgtatcacttgaggtcaggaattcaagaccagcctggccaacatggtggaaccccatctctactaaagatacaaaaattagccaggcgaggcagaggttgtggtgagcctagatcatgccactgcacttcagccggggcaatagagtgagactctgtctcaaaaaaaaaaaaaaaatgctgggcatggtggtgtgtgcctgtaatcccagctactcaggaggctgaggcgcaagaatcacttgaacccaggaggtggaggttgcagtgagtctagattgcaccactgcacttcagcctgggagacagagcaagactccgattcggaaaaaaaaaaaagaaaaagaaaaagaaaaaaaatttaaaaattaaagaagtccacccttgccactctacccaggctgagctcattttcccttgtcgtttccaggacacattttggccctcagcgcattctgcctcatgctctctggagcagaccgagagagattctctgagacatagaactttcttttttttttttgagacggagtctcgctgtgtcacccaggctggagtgcagtggtgcaatctcgatcactgcaacctccgcctcccgggttcaagcgattctcctgtctcagcctcccgagtagctgggattacaggcacgtgccaccacacctggctttttttttttttttttttgtatttttagtagagatggggtttcaccatgttggtcaaactggtctcgaactcctgacctcgtgatccgcctgccttggcctcccaaagtcctgagatgacaggtgtgagccaccgcgcccagctgagacacagaactttcagtgctaaaaactagaaagtcgccgggtgcggtggctcacacctgtattcccagcactttgggaggcctaggtgggaggatcccttgagttcaggagttcgagaccagcctgggcaatatagcgaccccctctctctgcaaataataaaaaacttagccgggcatggtggcatgcacgtgtggttctcgctactcaggaggctgaggtaggaggattgcttggtcctggacagttgaggctgcagtgaggtatgatcgtgccactgcactccagcctgggtgacagcgagaccccgtctcaaaaaaaaaaaagggaaagctcgggcatgttggttacccttcatgaaactcttttgcgttatctccctagattttgagctccaagggcagtggttctcatacaggggacatttggctgttgtctggagccattttttgattgtcaaaacccagataggggttgctagtggcatcttgtgggtggaggccagggaagctgctacacatccatcagtacacaggacagcccccacaataaagaattacctagcccaaatgtcagtagcgccaaggctgagaaatcccatcctgaaaggaccatactctagctcttttagtggctagtatagtcctgggcatatgaatagtcaagatatgatgaaagatggtatttgtatggactggagtatcaagcaaggctcgacccccaaagggctggaggcgtggccagaaggacagggccactttggcttctggattcctgtggcagggaccttttcctaggactccctggccaatgtggggctatgaacagcactgagtatccccctaagtgaccttggggtgctctgtgaccctcagcggctgccggaaacaacatggaggacatctttggggagcttttgctacagctgcaccagcagtacccaggtgatatcggctgctttgccatctacttcctgaacctgcttaccctgaagcctggggaggccatgtttctggaggccaacgtaccccatgcctacctgaaaggaggtgagccacatttcagcagtgagccccactgccatccctgctgggccctgtttccctatctggacaaaggaaggagaagggtggtcaaggagacccccaaggaccttgcagctctgacctctgagggttcctgggctcagcaagcaacagctggtagggatgatgaatgcatttagcattgaacacgccttgaatcctgacaccaaccctgtgatgccatgctactctgattttaagtcctgccagtcagtgtgggaaccacaatttgaacgcaggctatattggatcaaagctgttgttctgtcacagcctttgtatgtctgtcctacctaccagggatttttacactaaaatatgcatgttgccatggaaggatgccacctttcgactgttggctgcttatccacacatgcctcatgcacaggattctggggtagaagtgggagactacagagttggggctccccaacccccaggggttaacatgactcccctctgacaataatgggtgacctgtcacctgtttttggtatttgatatcttaaccccattctcccagagaatacaattcatggaaatttttacctaacttggcatggggttcatggagctcaggttaggaggcccagaactggagagctaaggcatacttcatcagcttagcacatgacgactgtctctccagactgcgtggagtgcatggcgtgttcagacaacacagttcgtgctggcctgacacccaagttcattgatgtgccaaccctgtgtgaaatgctcagctatacccctagctccagcaaggacaggctctttctcccaacacggagtcaggaagacccctacctctcaatctatgacccccctgtaccagacttcaccattatgaagacggaggtgagtgaggggctatgatgggtgtccttcgtgtgccatgaaaatctctggcaagggtcacgatgtggaggacacctggggctgggtttcctgtcaagcccacttggcggagggtggccccagggcctgcccattccttcctgtaccagggaccaggcctctatgctgactgagcctgggttgtgcgagaaggtggcagagctctccctcgtgccctggggactgtcctgggcccatgagctgatgagagcagagtctgagctgcactgccttatcatttcttcctgcccaggtccctggctctgtcactgaatacaaggtcttggcactggactctgccagcatcctcctgatggtacaggggacagtaatagccagcacacccacaacccagacaccaatccctctgcaacgtggtggcgtgctcttcattggggccaatgagagtgtctcactgaagcttactgagccgaaggacctgctgatattccgtgcctgctgtctgctgtaaaggctgcagcctccccagctctcctctgccagccaccctaaattccagccaacctcacctcctcgggcccagctcaagcccccttccttgctctggaccccttaggtataccctggaagagctggggtgggggaggagggagcgtgaaggtagtgactcctgaacacacccaggtggaaccatctttggggaggagaggcccgtgtgaggggtctgatactcccttt

SEQ ID NO: 12871 - DNA, 1068 bp, Homo sapiens
cagcagtatgcctgggggaagatgggttccaacagcgaagtggcgcggctgttggccagcagtgatccactggcccagatcgcagaggacaagccttatgcagagttgtggatggggactcacccccgaggggatgccaagatccttgacaaccgcatctcacagaagaccctaagccagtggattgctgagaaccaggacagcttgggctcaaaggtcaaggacacctttaatggcaacctgcccttcctcttcaaagtgctctcagttgaaacacccctgtccatccaggcacaccctaacaaggagctggcagagaagctgcacctccaggctccgcagcactaccccgatgccaaccacaagccagagatggccattgccctcacccccttccagggcttgtgtggcttccggccagttgaggagattgtaacctttctaaagacggctgccggaaacaacatggaggacatctttggggagcttttgctacagctgcaccagcagtacccaggtgatatcggctgctttgccatctacttcctgaacctgcttaccctgaagcctggggaggccatgtttctggaggccaacgtaccccatgcctacctgaaaggaggtccctggctctgtcactgaatacaaggtcttggcactggactctgccagcatcctcctgatggtacaggggacagtaatagccagcacacccacaacccagacaccaatccctctgcaacgtggtggcgtgctcttcattggggccaatgagagtgtctcactgaagcttactgagccgaaggacctgctgatattccgtgcctgctgtctgctgtaaaggctgcagcctccccagctctcctctgccagccaccctaaattccagccaacctcacctcctcgggcccagctcaagcccccttccttgctctggaccccttaggtataccctggaagagctggggtgggggaggagggagcgtgaaggtagtgactcctgaacacacccaggtggaaccatctttggggaggagaggcccgtgtgaggggtctgatactcccttt

SEQ ID NO: 12872 - DNA, 2662 bp, Homo sapiens
gcatggccgctccgcgaggtgagccattggctggggtgtcggcgagtgtgttcgtggagcgcgtcctggggacgactcccggcattatcggccaggttgagtccgctcctggcattccgcggaaagatgggtgggtgccgggcagaggtgtggccacctgcgatggggattgacctccgaggggagggggcccttctagacgtcgtgccgtgggataggtaccttctgctccctccccgccaccctgcctcagatcagcacaaggtccttactgctgcccatctgacagttgggaacatcgaggcctgcagcggaggggggtctcatccaacagcctacaaaacccttatttgactctgtccccagtgagcacccccagctcttgcctggtttcccgggacactagggtggggcctgaggagtggagtggcagctgaccctgtctgtgcccctagtattcccactttcctgtgcggtgcagcagtatgcctgggggaagatgggttccaacagcgaagtggcgcggctgttggccagcagtgatccactggcccagatcgcagaggacaagccttatgcagaggtgagccccgggctgtatttcagcccactttacccgcaggtcaggagaaagggcctgaggcaagtcataagaatcagctgggaagggtgaggcagcaaggagggaggagacccacttggctcttcaggctaatggactagatagtgttatcaaaaagaagagaggttttgtcataataggctgggatttccagcactctccttcccccaaccactcttagcacttagtgaattttaattcagccctctttgacaattaagtttttttactttgactatttttttgcatttttattaacctaaaatatttctcctgcctatttagtggagaaaaagccaaagcataggaaggctttcgcctctgcttctgaaactggaagatgtatgttaacccctgaaagaatcatttaagagtcatagtttttctgctaccttgacagtgcagatgtcattctcctctttggacagacaaagaagatacatctaaagaagggaaataactagtccaagtcttcatagatggctagaggccgagtctggacaagggcctgggtctactgcctccctgtatgtccatgatggcatgaacatttgtatccagacctgggaggcctttcccaggactcagttgccctgtggggagcacagcataacggattgggacaggccaactcagggtggcaggtttcttcccccttcccctcccaagtttcctgtctttccagttgtggatggggactcacccccgaggggatgccaagatccttgacaaccgcatctcacagaagaccctaagccagtggattgctgagaaccaggacagcttgggctcaaaggtcaaggacacctttaatggcaacctgcccttcctcttcaaagtgctctcagttgaaacacccctgtccatccaggcacaccctaacaaggtaaaggacagagtgcggtgcagaggtcagggtacagaagggcttatgctaaggccctcccgtgacttttactgccacttttaccccacccatgccaggctcctgcccaaggccaaatccaggctgacaactcccaatttagctctgcaaagccagatggtagtgacacatgcagcaactaagtctaagcaaacagctcaccggcctgtgccaggggagtttctctaagctcattccaaggggcttgttcctggtcttccctcatccaacccatgtctattcatatctgccatttactcatctgctttcaggaagagttcaacttgcaaggcagggcaggtaccctcagccccacccccatggagtctccctacacaagccggagtcccatcctaagcaactgtggatcaaaactcctttttttttttttctgagacttgagtcttgctctgtcgcccaggctggagtgcagtggcgcgatctcggctcactgcaacctcctcctcccaattcaagcaattcttctgcttcagcctcgcaaatagctgggactacaggcacgcgccaccacacccagctaatttttgtatttttagtagagatggggtttcaccatgttggccaggctggtcttgaactcctgccctcgtaatccgctcgcctcagcctcccaaagtgctgggattacaggcgtgagccaccatgcccagccaaaactccttatttctagatacacaaagtaagacccagagaagggagggatttaccaaagccacacagcttgttagtgtcagagcttggtctggtatttgggtttcctgattcacaggccaagcctcttaaagtctgccccagcttttccctgatttgccccggggttgcccctgatttgcccctgccctgggttggctgagccccaagtttctgcaacatgctttgactgggctccttgccagaggtaggtagtcactgccatcctgcaactggggagggtggacagcaggggctaggtggcactggtgtacctgctaggtaatggctgtaccctcaccatcctcctcttcccctggccaccccacaggagctggcagagaagctgcacctccaggctccgcagcactaccccgatgccaaccacaagccagagatggcca

SEQ ID NO: 12873 - DNA, 857 bp, Homo sapiens
gcatggccgctccgcgaggtgagccattggctggggtgtcggcgagtgtgttcgtggagcgcgtcctggggacgactcccggcattatcggccaggttgagtccgctcctggcattccgcggaaagatgggtgggtgccgggcagaggtgtggccacctgcgatggggattgacctccgaggggagggggcccttctagacgtcgtgccgtgggataggtaccttctgctccctccccgccaccctgcctcagatcagcacaaggtccttactgctgcccatctgacagttgggaacatcgaggcctgcagcggaggggggtctcatccaacagcctacaaaacccttatttgactctgtccccagtgagcacccccagctcttgcctggtttcccgggacactagggtggggcctgaggagtggagtggcagctgaccctgtctgtgcccctagtattcccactttcctgtgcggtgcagcagtatgcctgggggaagatgggttccaacagcgaagtggcgcggctgttggccagcagtgatccactggcccagatcgcagaggacaagccttatgcagagttgtggatggggactcacccccgaggggatgccaagatccttgacaaccgcatctcacagaagaccctaagccagtggattgctgagaaccaggacagcttgggctcaaaggtcaaggacacctttaatggcaacctgcccttcctcttcaaagtgctctcagttgaaacacccctgtccatccaggcacaccctaacaaggagctggcagagaagctgcacctccaggctccgcagcactaccccgatgccaaccacaagccagagatggcca

SEQ ID NO: 12874 - DNA, 928 bp, Homo sapiens
gtgcttaatcctggtgcagggggcgagcatggccgctccgcgaggtgagccattggctggggtgtcggcgagtgtgttcgtggagcgcgtcctggggacgactcccggcattatcggccaggttgagtccgctcctggcattccgcggaaagatgggtgggtgccgggcagaggtgtggccacctgcgatggggattgacctccgaggggagggggcccttctagacgtcgtgccgtgggataggtaccttctgctccctccccgccaccctgcctcagatcagcacaaggtccttactgctgcccatctgacagttgggaacatcgaggcctgcagcggaggggggtctcatccaacagcctacaaaacccttatttgactctgtccccagtgagcacccccagctcttgcctggtttcccgggacactagggtggggcctgaggagtggagtggcagctgaccctgtctgtgcccctagtattcccactttcctgtgcggtgcagcagtatgcctgggggaagatgggttccaacagcgaagtggcgcggctgttggccagcagtgatccactggcccagatcgcagaggacaagccttatgcagaggtgagccccgggctgtatttcagcccactttacccgcaggtcaggagaaagggcctgaggcaagtcataagaatcagctgggaagggtgaggcagcaaggagggaggagacccacttggctcttcaggctaatggactagatagtgttatcaaaaagaagagaggttttgtcataataggctgggatttccagcactctccttcccccaaccactcttagcacttagtgaattttaattcagccctctttgacaattaagtttttttactttgactatttttttgcatttttattaacctaaaatatttctcctgccta

SEQ ID NO: 12875 - DNA, 580 bp, Homo sapiens
gtgcttaatcctggtgcagggggcgagcatggccgctccgcgagtgagcacccccagctcttgcctggtttcccgggacactagggtggggcctgaggagtggagtggcagctgaccctgtctgtgcccctagtattcccactttcctgtgcggtgcagcagtatgcctgggggaagatgggttccaacagcgaagtggcgcggctgttggccagcagtgatccactggcccagatcgcagaggacaagccttatgcagaggtgagccccgggctgtatttcagcccactttacccgcaggtcaggagaaagggcctgaggcaagtcataagaatcagctgggaagggtgaggcagcaaggagggaggagacccacttggctcttcaggctaatggactagatagtgttatcaaaaagaagagaggttttgtcataataggctgggatttccagcactctccttcccccaaccactcttagcacttagtgaattttaattcagccctctttgacaattaagtttttttactttgactatttttttgcatttttattaacctaaaatatttctcctgccta

SEQ ID NO: 12876 - DNA, 3191 bp, Homo sapiens
aatcctggtgcagggggcgagcatggccgctccgcgaggtgagccattggctggggtgtcggcgagtgtgttcgtggagcgcgtcctggggacgactcccggcattatcggccaggttgagtccgctcctggcattccgcggaaagatgggtgggtgccgggcagaggtgtggccacctgcgatggggattgacctccgaggggagggggcccttctagacgtcgtgccgtgggataggtaccttctgctccctccccgccaccctgcctcagatcagcacaaggtccttactgctgcccatctgacagttgggaacatcgaggcctgcagcggaggggggtctcatccaacagcctacaaaacccttatttgactctgtccccagtgagcacccccagctcttgcctggtttcccgggacactagggtggggcctgaggagtggagtggcagctgaccctgtctgtgcccctagtattcccactttcctgtgcggtgcagcagtatgcctgggggaagatgggttccaacagcgaagtggcgcggctgttggccagcagtgatccactggcccagatcgcagaggacaagccttatgcagaggtgagccccgggctgtatttcagcccactttacccgcaggtcaggagaaagggcctgaggcaagtcataagaatcagctgggaagggtgaggcagcaaggagggaggagacccacttggctcttcaggctaatggactagatagtgttatcaaaaagaagagaggttttgtcataataggctgggatttccagcactctccttcccccaaccactcttagcacttagtgaattttaattcagccctctttgacaattaagtttttttactttgactatttttttgcatttttattaacctaaaatatttctcctgcctatttagtggagaaaaagccaaagcataggaaggctttcgcctctgcttctgaaactggaagatgtatgttaacccctgaaagaatcatttaagagtcatagtttttctgctaccttgacagtgcagatgtcattctcctctttggacagacaaagaagatacatctaaagaagggaaataactagtccaagtcttcatagatggctagaggccgagtctggacaagggcctgggtctactgcctccctgtatgtccatgatggcatgaacatttgtatccagacctgggaggcctttcccaggactcagttgccctgtggggagcacagcataacggattgggacaggccaactcagggtggcaggtttcttcccccttcccctcccaagtttcctgtctttccagttgtggatggggactcacccccgaggggatgccaagatccttgacaaccgcatctcacagaagaccctaagccagtggattgctgagaaccaggacagcttgggctcaaaggtcaaggacacctttaatggcaacctgcccttcctcttcaaagtgctctcagttgaaacacccctgtccatccaggcacaccctaacaaggtaaaggacagagtgcggtgcagaggtcagggtacagaagggcttatgctaaggccctcccgtgacttttactgccacttttaccccacccatgccaggctcctgcccaaggccaaatccaggctgacaactcccaatttagctctgcaaagccagatggtagtgacacatgcagcaactaagtctaagcaaacagctcaccggcctgtgccaggggagtttctctaagctcattccaaggggcttgttcctggtcttccctcatccaacccatgtctattcatatctgccatttactcatctgctttcaggaagagttcaacttgcaaggcagggcaggtaccctcagccccacccccatggagtctccctacacaagccggagtcccatcctaagcaactgtggatcaaaactcctttttttttttttctgagacttgagtcttgctctgtcgcccaggctggagtgcagtggcgcgatctcggctcactgcaacctcctcctcccaattcaagcaattcttctgcttcagcctcgcaaatagctgggactacaggcacgcgccaccacacccagctaatttttgtatttttagtagagatggggtttcaccatgttggccaggctggtcttgaactcctgccctcgtaatccgctcgcctcagcctcccaaagtgctgggattacaggcgtgagccaccatgcccagccaaaactccttatttctagatacacaaagtaagacccagagaagggagggatttaccaaagccacacagcttgttagtgtcagagcttggtctggtatttgggtttcctgattcacaggccaagcctcttaaagtctgccccagcttttccctgatttgccccggggttgcccctgatttgcccctgccctgggttggctgagccccaagtttctgcaacatgctttgactgggctccttgccagaggtaggtagtcactgccatcctgcaactggggagggtggacagcaggggctaggtggcactggtgtacctgctaggtaatggctgtaccctcaccatcctcctcttcccctggccaccccacaggagctggcagagaagctgcacctccaggctccgcagcactaccccgatgccaaccacaagccagagatggccattgccctcacccccttccagggcttgtgtggcttccggccagttgaggagattgtaacctttctaaagagtaagttgggcagaatgctgaaggcatgcgtactgggccagggatacctggggaaccaagatgataggaacagtggctgagaacgggtcacatgtcacaggaactgaagggcctcatgaagcagtttttggagccagtgagccaggccagtgagaccaggctcaggtgtggtagtcaagggctggtggtgagtgattggtttccactgcaaagtttacttagcattgccggctctttggttagggctgggatggaaaggtgtcctccaactccccacttgtgtgggttccatcttaccattcctgatatgggccctgggccttgccttcctgtagaggtgcctgagtttcagttcctgattggagatgaggcagcaacacacctgaagcagaccatgagccatgactcccaggctgtggcctcctctctgcagagctgtt

SEQ ID NO: 12877 - DNA, 578 bp, Homo sapiens
aatcctggtgcagggggcgagcatggccgctccgcgagtattcccactttcctgtgcggtgcagcagtatgcctgggggaagatgggttccaacagcgaagtggcgcggctgttggccagcagtgatccactggcccagatcgcagaggacaagccttatgcagagatccttgacaaccgcatctcacagaagaccctaagccagtggattgctgagaaccaggacagcttgggctcaaaggtcaaggacacctttaatggcaacctgcccttcctcttcaaagtgctctcagttgaaacacccctgtccatccaggcacaccctaacaaggagctggcagagaagctgcacctccaggctccgcagcactaccccgatgccaaccacaagccagagatggccattgccctcacccccttccagggcttgtgtggcttccggccagttgaggagattgtaacctttctaaagaaggtgcctgagtttcagttcctgattggagatgaggcagcaacacacctgaagcagaccatgagccatgactcccaggctgtggcctcctctctgcagagctgtt

SEQ ID NO: 12878 - DNA, 3012 bp, Homo sapiens
gccgctccgcgaggtgagccattggctggggtgtcggcgagtgtgttcgtggagcgcgtcctggggacgactcccggcattatcggccaggttgagtccgctcctggcattccgcggaaagatgggtgggtgccgggcagaggtgtggccacctgcgatggggattgacctccgaggggagggggcccttctagacgtcgtgccgtgggataggtaccttctgctccctccccgccaccctgcctcagatcagcacaaggtccttactgctgcccatctgacagttgggaacatcgaggcctgcagcggaggggggtctcatccaacagcctacaaaacccttatttgactctgtccccagtgagcacccccagctcttgcctggtttcccgggacactagggtggggcctgaggagtggagtggcagctgaccctgtctgtgcccctagtattcccactttcctgtgcggtgcagcagtatgcctgggggaagatgggttccaacagcgaagtggcgcggctgttggccagcagtgatccactggcccagatcgcagaggacaagccttatgcagaggtgagccccgggctgtatttcagcccactttacccgcaggtcaggagaaagggcctgaggcaagtcataagaatcagctgggaagggtgaggcagcaaggagggaggagacccacttggctcttcaggctaatggactagatagtgttatcaaaaagaagagaggttttgtcataataggctgggatttccagcactctccttcccccaaccactcttagcacttagtgaattttaattcagccctctttgacaattaagtttttttactttgactatttttttgcatttttattaacctaaaatatttctcctgcctatttagtggagaaaaagccaaagcataggaaggctttcgcctctgcttctgaaactggaagatgtatgttaacccctgaaagaatcatttaagagtcatagtttttctgctaccttgacagtgcagatgtcattctcctctttggacagacaaagaagatacatctaaagaagggaaataactagtccaagtcttcatagatggctagaggccgagtctggacaagggcctgggtctactgcctccctgtatgtccatgatggcatgaacatttgtatccagacctgggaggcctttcccaggactcagttgccctgtggggagcacagcataacggattgggacaggccaactcagggtggcaggtttcttcccccttcccctcccaagtttcctgtctttccagttgtggatggggactcacccccgaggggatgccaagatccttgacaaccgcatctcacagaagaccctaagccagtggattgctgagaaccaggacagcttgggctcaaaggtcaaggacacctttaatggcaacctgcccttcctcttcaaagtgctctcagttgaaacacccctgtccatccaggcacaccctaacaaggtaaaggacagagtgcggtgcagaggtcagggtacagaagggcttatgctaaggccctcccgtgacttttactgccacttttaccccacccatgccaggctcctgcccaaggccaaatccaggctgacaactcccaatttagctctgcaaagccagatggtagtgacacatgcagcaactaagtctaagcaaacagctcaccggcctgtgccaggggagtttctctaagctcattccaaggggcttgttcctggtcttccctcatccaacccatgtctattcatatctgccatttactcatctgctttcaggaagagttcaacttgcaaggcagggcaggtaccctcagccccacccccatggagtctccctacacaagccggagtcccatcctaagcaactgtggatcaaaactcctttttttttttttctgagacttgagtcttgctctgtcgcccaggctggagtgcagtggcgcgatctcggctcactgcaacctcctcctcccaattcaagcaattcttctgcttcagcctcgcaaatagctgggactacaggcacgcgccaccacacccagctaatttttgtatttttagtagagatggggtttcaccatgttggccaggctggtcttgaactcctgccctcgtaatccgctcgcctcagcctcccaaagtgctgggattacaggcgtgagccaccatgcccagccaaaactccttatttctagatacacaaagtaagacccagagaagggagggatttaccaaagccacacagcttgttagtgtcagagcttggtctggtatttgggtttcctgattcacaggccaagcctcttaaagtctgccccagcttttccctgatttgccccggggttgcccctgatttgcccctgccctgggttggctgagccccaagtttctgcaacatgctttgactgggctccttgccagaggtaggtagtcactgccatcctgcaactggggagggtggacagcaggggctaggtggcactggtgtacctgctaggtaatggctgtaccctcaccatcctcctcttcccctggccaccccacaggagctggcagagaagctgcacctccaggctccgcagcactaccccgatgccaaccacaagccagagatggccattgccctcacccccttccagggcttgtgtggcttccggccagttgaggagattgtaacctttctaaagagtaagttgggcagaatgctgaaggcatgcgtactgggccagggatacctggggaaccaagatgataggaacagtggctgagaacgggtcacatgtcacaggaactgaagggcctcatgaagcagtttttggagccagtgagccaggccagtgagaccaggctcaggtgtggtagtcaagggctggtggtgagtgattggtttccactgcaaagtttacttagcattgccggctctttggttagggctgggatggaaaggtgtcctccaactccccacttgtgtggg

SEQ ID NO: 12879 - DNA, 882 bp, Homo sapiens
gccgctccgcgaggtgagccattggctggggtgtcggcgagtgtgttcgtggagcgcgtcctggggacgactcccggcattatcggccaggttgagtccgctcctggcattccgcggaaagatggtattcccactttcctgtgcggtgcagcagtatgcctgggggaagatgggttccaacagcgaagtggcgcggctgttggccagcagtgatccactggcccagatcgcagaggacaagccttatgcagagttgtggatggggactcacccccgaggggatgccaagatccttgacaaccgcatctcacagaagaccctaagccagtggattgctgagaaccaggacagcttgggctcaaaggtcaaggacacctttaatggcaacctgcccttcctcttcaaagtgctctcagttgaaacacccctgtccatccaggcacaccctaacaaggagctggcagagaagctgcacctccaggctccgcagcactaccccgatgccaaccacaagccagagatggccattgccctcacccccttccagggcttgtgtggcttccggccagttgaggagattgtaacctttctaaagagtaagttgggcagaatgctgaaggcatgcgtactgggccagggatacctggggaaccaagatgataggaacagtggctgagaacgggtcacatgtcacaggaactgaagggcctcatgaagcagtttttggagccagtgagccaggccagtgagaccaggctcaggtgtggtagtcaagggctggtggtgagtgattggtttccactgcaaagtttacttagcattgccggctctttggttagggctgggatggaaaggtgtcctccaactccccacttgtgtggg

SEQ ID NO: 12880 - DNA, 3204 bp, Homo sapiens
atacgtgcttaatcctggtgcagggggcgagcatggccgctccgcgaggtgagccattggctggggtgtcggcgagtgtgttcgtggagcgcgtcctggggacgactcccggcattatcggccaggttgagtccgctcctggcattccgcggaaagatgggtgggtgccgggcagaggtgtggccacctgcgatggggattgacctccgaggggagggggcccttctagacgtcgtgccgtgggataggtaccttctgctccctccccgccaccctgcctcagatcagcacaaggtccttactgctgcccatctgacagttgggaacatcgaggcctgcagcggaggggggtctcatccaacagcctacaaaacccttatttgactctgtccccagtgagcacccccagctcttgcctggtttcccgggacactagggtggggcctgaggagtggagtggcagctgaccctgtctgtgcccctagtattcccactttcctgtgcggtgcagcagtatgcctgggggaagatgggttccaacagcgaagtggcgcggctgttggccagcagtgatccactggcccagatcgcagaggacaagccttatgcagaggtgagccccgggctgtatttcagcccactttacccgcaggtcaggagaaagggcctgaggcaagtcataagaatcagctgggaagggtgaggcagcaaggagggaggagacccacttggctcttcaggctaatggactagatagtgttatcaaaaagaagagaggttttgtcataataggctgggatttccagcactctccttcccccaaccactcttagcacttagtgaattttaattcagccctctttgacaattaagtttttttactttgactatttttttgcatttttattaacctaaaatatttctcctgcctatttagtggagaaaaagccaaagcataggaaggctttcgcctctgcttctgaaactggaagatgtatgttaacccctgaaagaatcatttaagagtcatagtttttctgctaccttgacagtgcagatgtcattctcctctttggacagacaaagaagatacatctaaagaagggaaataactagtccaagtcttcatagatggctagaggccgagtctggacaagggcctgggtctactgcctccctgtatgtccatgatggcatgaacatttgtatccagacctgggaggcctttcccaggactcagttgccctgtggggagcacagcataacggattgggacaggccaactcagggtggcaggtttcttcccccttcccctcccaagtttcctgtctttccagttgtggatggggactcacccccgaggggatgccaagatccttgacaaccgcatctcacagaagaccctaagccagtggattgctgagaaccaggacagcttgggctcaaaggtcaaggacacctttaatggcaacctgcccttcctcttcaaagtgctctcagttgaaacacccctgtccatccaggcacaccctaacaaggtaaaggacagagtgcggtgcagaggtcagggtacagaagggcttatgctaaggccctcccgtgacttttactgccacttttaccccacccatgccaggctcctgcccaaggccaaatccaggctgacaactcccaatttagctctgcaaagccagatggtagtgacacatgcagcaactaagtctaagcaaacagctcaccggcctgtgccaggggagtttctctaagctcattccaaggggcttgttcctggtcttccctcatccaacccatgtctattcatatctgccatttactcatctgctttcaggaagagttcaacttgcaaggcagggcaggtaccctcagccccacccccatggagtctccctacacaagccggagtcccatcctaagcaactgtggatcaaaactcctttttttttttttctgagacttgagtcttgctctgtcgcccaggctggagtgcagtggcgcgatctcggctcactgcaacctcctcctcccaattcaagcaattcttctgcttcagcctcgcaaatagctgggactacaggcacgcgccaccacacccagctaatttttgtatttttagtagagatggggtttcaccatgttggccaggctggtcttgaactcctgccctcgtaatccgctcgcctcagcctcccaaagtgctgggattacaggcgtgagccaccatgcccagccaaaactccttatttctagatacacaaagtaagacccagagaagggagggatttaccaaagccacacagcttgttagtgtcagagcttggtctggtatttgggtttcctgattcacaggccaagcctcttaaagtctgccccagcttttccctgatttgccccggggttgcccctgatttgcccctgccctgggttggctgagccccaagtttctgcaacatgctttgactgggctccttgccagaggtaggtagtcactgccatcctgcaactggggagggtggacagcaggggctaggtggcactggtgtacctgctaggtaatggctgtaccctcaccatcctcctcttcccctggccaccccacaggagctggcagagaagctgcacctccaggctccgcagcactaccccgatgccaaccacaagccagagatggccattgccctcacccccttccagggcttgtgtggcttccggccagttgaggagattgtaacctttctaaagagtaagttgggcagaatgctgaaggcatgcgtactgggccagggatacctggggaaccaagatgataggaacagtggctgagaacgggtcacatgtcacaggaactgaagggcctcatgaagcagtttttggagccagtgagccaggccagtgagaccaggctcaggtgtggtagtcaagggctggtggtgagtgattggtttccactgcaaagtttacttagcattgccggctctttggttagggctgggatggaaaggtgtcctccaactccccacttgtgtgggttccatcttaccattcctgatatgggccctgggccttgccttcctgtagaggtgcctgagtttcagttcctgattggagatgaggcagcaacacacctgaagcagaccatgagccatgactcccaggctgtggcctcctctctgcagagctgtttct

SEQ ID NO: 12881 - DNA, 537 bp, Homo sapiens
atacgtgcttaatcctggtgcagggggcgagcatggccgctccgcgagtattcccactttcctgtgcggtgcagcagtatgcctgggggaagatgggttccaacagcgaagtggcgcggctgttggccagcagtgatccactggcccagatcgcagaggacaagccttatgcagagttgtggatggggactcacccccgaggggatgccaagatccttgacaaccgcatctcacagaagaccctaagccagtggattgctgagaaccaggacagcttgggctcaaaggagctggcagagaagctgcacctccaggctccgcagcactaccccgatgccaaccacaagccagagatggccattgccctcacccccttccagggcttgtgtggcttccggccagttgaggagattgtaacctttctaaagaaggtgcctgagtttcagttcctgattggagatgaggcagcaacacacctgaagcagaccatgagccatgactcccaggctgtggcctcctctctgcagagctgtttct

SEQ ID NO: 12882 - DNA, 2740 bp, Homo sapiens
atacgtgcttaatcctggtgcagggggcgagcatggccgctccgcgaggtgagccattggctggggtgtcggcgagtgtgttcgtggagcgcgtcctggggacgactcccggcattatcggccaggttgagtccgctcctggcattccgcggaaagatgggtgggtgccgggcagaggtgtggccacctgcgatggggattgacctccgaggggagggggcccttctagacgtcgtgccgtgggataggtaccttctgctccctccccgccaccctgcctcagatcagcacaaggtccttactgctgcccatctgacagttgggaacatcgaggcctgcagcggaggggggtctcatccaacagcctacaaaacccttatttgactctgtccccagtgagcacccccagctcttgcctggtttcccgggacactagggtggggcctgaggagtggagtggcagctgaccctgtctgtgcccctagtattcccactttcctgtgcggtgcagcagtatgcctgggggaagatgggttccaacagcgaagtggcgcggctgttggccagcagtgatccactggcccagatcgcagaggacaagccttatgcagaggtgagccccgggctgtatttcagcccactttacccgcaggtcaggagaaagggcctgaggcaagtcataagaatcagctgggaagggtgaggcagcaaggagggaggagacccacttggctcttcaggctaatggactagatagtgttatcaaaaagaagagaggttttgtcataataggctgggatttccagcactctccttcccccaaccactcttagcacttagtgaattttaattcagccctctttgacaattaagtttttttactttgactatttttttgcatttttattaacctaaaatatttctcctgcctatttagtggagaaaaagccaaagcataggaaggctttcgcctctgcttctgaaactggaagatgtatgttaacccctgaaagaatcatttaagagtcatagtttttctgctaccttgacagtgcagatgtcattctcctctttggacagacaaagaagatacatctaaagaagggaaataactagtccaagtcttcatagatggctagaggccgagtctggacaagggcctgggtctactgcctccctgtatgtccatgatggcatgaacatttgtatccagacctgggaggcctttcccaggactcagttgccctgtggggagcacagcataacggattgggacaggccaactcagggtggcaggtttcttcccccttcccctcccaagtttcctgtctttccagttgtggatggggactcacccccgaggggatgccaagatccttgacaaccgcatctcacagaagaccctaagccagtggattgctgagaaccaggacagcttgggctcaaaggtcaaggacacctttaatggcaacctgcccttcctcttcaaagtgctctcagttgaaacacccctgtccatccaggcacaccctaacaaggtaaaggacagagtgcggtgcagaggtcagggtacagaagggcttatgctaaggccctcccgtgacttttactgccacttttaccccacccatgccaggctcctgcccaaggccaaatccaggctgacaactcccaatttagctctgcaaagccagatggtagtgacacatgcagcaactaagtctaagcaaacagctcaccggcctgtgccaggggagtttctctaagctcattccaaggggcttgttcctggtcttccctcatccaacccatgtctattcatatctgccatttactcatctgctttcaggaagagttcaacttgcaaggcagggcaggtaccctcagccccacccccatggagtctccctacacaagccggagtcccatcctaagcaactgtggatcaaaactcctttttttttttttctgagacttgagtcttgctctgtcgcccaggctggagtgcagtggcgcgatctcggctcactgcaacctcctcctcccaattcaagcaattcttctgcttcagcctcgcaaatagctgggactacaggcacgcgccaccacacccagctaatttttgtatttttagtagagatggggtttcaccatgttggccaggctggtcttgaactcctgccctcgtaatccgctcgcctcagcctcccaaagtgctgggattacaggcgtgagccaccatgcccagccaaaactccttatttctagatacacaaagtaagacccagagaagggagggatttaccaaagccacacagcttgttagtgtcagagcttggtctggtatttgggtttcctgattcacaggccaagcctcttaaagtctgccccagcttttccctgatttgccccggggttgcccctgatttgcccctgccctgggttggctgagccccaagtttctgcaacatgctttgactgggctccttgccagaggtaggtagtcactgccatcctgcaactggggagggtggacagcaggggctaggtggcactggtgtacctgctaggtaatggctgtaccctcaccatcctcctcttcccctggccaccccacaggagctggcagagaagctgcacctccaggctccgcagcactaccccgatgccaaccacaagccagagatggccattgccctcacccccttccagggcttgtgtggcttccggccagttgagg

SEQ ID NO: 12883 - DNA, 555 bp, Homo sapiens
atacgtgcttaatcctggtgcagggggcgagcatggccgctccgcgagtattcccactttcctgtgcggtgcagcagtatgcctgggggaagatgggttccaacagcgaagtggcgcggctgttggccagcagtgatccactggcccagatcgcagaggacaagccttatgcagagtggagaaaaagccaaagcataggaaggctttcgcctctgcttctgaaactggaagatttgtggatggggactcacccccgaggggatgccaagatccttgacaaccgcatctcacagaagaccctaagccagtggattgctgagaaccaggacagcttgggctcaaaggtcaaggacacctttaatggcaacctgcccttcctcttcaaagtgctctcagttgaaacacccctgtccatccaggcacaccctaacaaggagctggcagagaagctgcacctccaggctccgcagcactaccccgatgccaaccacaagccagagatggccattgccctcacccccttccagggcttgtgtggcttccggccagttgagg

SEQ ID NO: 12884 - DNA, 7088 bp, Homo sapiens
ctgggcgcagagggccgcgggggctgccgggaaaggcatacgtgcttaatcctggtgcagggggcgagcatggccgctccgcgaggtgagccattggctggggtgtcggcgagtgtgttcgtggagcgcgtcctggggacgactcccggcattatcggccaggttgagtccgctcctggcattccgcggaaagatgggtgggtgccgggcagaggtgtggccacctgcgatggggattgacctccgaggggagggggcccttctagacgtcgtgccgtgggataggtaccttctgctccctccccgccaccctgcctcagatcagcacaaggtccttactgctgcccatctgacagttgggaacatcgaggcctgcagcggaggggggtctcatccaacagcctacaaaacccttatttgactctgtccccagtgagcacccccagctcttgcctggtttcccgggacactagggtggggcctgaggagtggagtggcagctgaccctgtctgtgcccctagtattcccactttcctgtgcggtgcagcagtatgcctgggggaagatgggttccaacagcgaagtggcgcggctgttggccagcagtgatccactggcccagatcgcagaggacaagccttatgcagaggtgagccccgggctgtatttcagcccactttacccgcaggtcaggagaaagggcctgaggcaagtcataagaatcagctgggaagggtgaggcagcaaggagggaggagacccacttggctcttcaggctaatggactagatagtgttatcaaaaagaagagaggttttgtcataataggctgggatttccagcactctccttcccccaaccactcttagcacttagtgaattttaattcagccctctttgacaattaagtttttttactttgactatttttttgcatttttattaacctaaaatatttctcctgcctatttagtggagaaaaagccaaagcataggaaggctttcgcctctgcttctgaaactggaagatgtatgttaacccctgaaagaatcatttaagagtcatagtttttctgctaccttgacagtgcagatgtcattctcctctttggacagacaaagaagatacatctaaagaagggaaataactagtccaagtcttcatagatggctagaggccgagtctggacaagggcctgggtctactgcctccctgtatgtccatgatggcatgaacatttgtatccagacctgggaggcctttcccaggactcagttgccctgtggggagcacagcataacggattgggacaggccaactcagggtggcaggtttcttcccccttcccctcccaagtttcctgtctttccagttgtggatggggactcacccccgaggggatgccaagatccttgacaaccgcatctcacagaagaccctaagccagtggattgctgagaaccaggacagcttgggctcaaaggtcaaggacacctttaatggcaacctgcccttcctcttcaaagtgctctcagttgaaacacccctgtccatccaggcacaccctaacaaggtaaaggacagagtgcggtgcagaggtcagggtacagaagggcttatgctaaggccctcccgtgacttttactgccacttttaccccacccatgccaggctcctgcccaaggccaaatccaggctgacaactcccaatttagctctgcaaagccagatggtagtgacacatgcagcaactaagtctaagcaaacagctcaccggcctgtgccaggggagtttctctaagctcattccaaggggcttgttcctggtcttccctcatccaacccatgtctattcatatctgccatttactcatctgctttcaggaagagttcaacttgcaaggcagggcaggtaccctcagccccacccccatggagtctccctacacaagccggagtcccatcctaagcaactgtggatcaaaactcctttttttttttttctgagacttgagtcttgctctgtcgcccaggctggagtgcagtggcgcgatctcggctcactgcaacctcctcctcccaattcaagcaattcttctgcttcagcctcgcaaatagctgggactacaggcacgcgccaccacacccagctaatttttgtatttttagtagagatggggtttcaccatgttggccaggctggtcttgaactcctgccctcgtaatccgctcgcctcagcctcccaaagtgctgggattacaggcgtgagccaccatgcccagccaaaactccttatttctagatacacaaagtaagacccagagaagggagggatttaccaaagccacacagcttgttagtgtcagagcttggtctggtatttgggtttcctgattcacaggccaagcctcttaaagtctgccccagcttttccctgatttgccccggggttgcccctgatttgcccctgccctgggttggctgagccccaagtttctgcaacatgctttgactgggctccttgccagaggtaggtagtcactgccatcctgcaactggggagggtggacagcaggggctaggtggcactggtgtacctgctaggtaatggctgtaccctcaccatcctcctcttcccctggccaccccacaggagctggcagagaagctgcacctccaggctccgcagcactaccccgatgccaaccacaagccagagatggccattgccctcacccccttccagggcttgtgtggcttccggccagttgaggagattgtaacctttctaaagagtaagttgggcagaatgctgaaggcatgcgtactgggccagggatacctggggaaccaagatgataggaacagtggctgagaacgggtcacatgtcacaggaactgaagggcctcatgaagcagtttttggagccagtgagccaggccagtgagaccaggctcaggtgtggtagtcaagggctggtggtgagtgattggtttccactgcaaagtttacttagcattgccggctctttggttagggctgggatggaaaggtgtcctccaactccccacttgtgtgggttccatcttaccattcctgatatgggccctgggccttgccttcctgtagaggtgcctgagtttcagttcctgattggagatgaggcagcaacacacctgaagcagaccatgagccatgactcccaggctgtggcctcctctctgcagagctgtttctcccacctgatgaagagtgagaagaaggtggtggtggaacagctcaacctgttggtgaagcggatctcccagcaaggtggacacagttatattcctggttgggtgcaatgctctggcctgggcttcccagcagacaccagactctggggacagttctcaacccccttgcccaagtggaacactaaaaggggccccacttagatgacctgttggcaacttagcattgcttgcctagtctttgtggagcagggcccttcttagttgagtgctgcttcccaactggtcatcttctccagatggttggaggcagactggcatagaggactcttaggatgccttccacctaggcattctgagattttccctagccctgcagctgccctccatggatggacttgtatctcggggctaaagaggcaggaaggggacacgagcatcctccctctcctggaaaggactgatgcctccagcactcagtcatttgatctttcctttaccttctgtgtgcccaaccttgtgctaagaagagttcaggaaatgactgtgatgggtgtggtcactgtcaccctaaaggtggggagtcaacacaagcagtaagaaacccaaaacagaacagactcccagcaatgagcttatgtggtgcaggcgatgaggtctcagcttcttagcctggcagccacaaccccttctctaggtggcccagagctctctttttattttacctctacaggtttcccattacctttgagccttagggcattatttatttgacccaagcatatttttttctgttcagtgtgtgtgtgtgtgtgtgtgtgtgtgtgtgtgtgtgtgtgtgtgtgtgtgtgtgtgtgtgtgtgtgtggtctctttctgttgccccaggctggagtgcagtggtgcgatcttggctcactgcagcctctgcctcccgggttcaagcaattctcctgcttcagcctcctgagtagctgggattacaggcatgtgccaccacatctggttaagtttttatattttagtagagacggagtttcaccatgttgcctaggcgggtctcgaactcctgagctcaggcaattcacctgcctcagcctcccaaagtgctaggattacaggtgtgagccaccacgccaggccccttgcctcactttaaagaagcctggctgggcacggtggctcacacctgtaatcctaacactttgggaggttgaggcggccgtatcacttgaggtcaggaattcaagaccagcctggccaacatggtggaaccccatctctactaaagatacaaaaattagccaggcgaggcagaggttgtggtgagcctagatcatgccactgcacttcagccggggcaatagagtgagactctgtctcaaaaaaaaaaaaaaaatgctgggcatggtggtgtgtgcctgtaatcccagctactcaggaggctgaggcgcaagaatcacttgaacccaggaggtggaggttgcagtgagtctagattgcaccactgcacttcagcctgggagacagagcaagactccgattcggaaaaaaaaaaaagaaaaagaaaaagaaaaaaaatttaaaaattaaagaagtccacccttgccactctacccaggctgagctcattttcccttgtcgtttccaggacacattttggccctcagcgcattctgcctcatgctctctggagcagaccgagagagattctctgagacatagaactttcttttttttttttgagacggagtctcgctgtgtcacccaggctggagtgcagtggtgcaatctcgatcactgcaacctccgcctcccgggttcaagcgattctcctgtctcagcctcccgagtagctgggattacaggcacgtgccaccacacctggctttttttttttttttttttgtatttttagtagagatggggtttcaccatgttggtcaaactggtctcgaactcctgacctcgtgatccgcctgccttggcctcccaaagtcctgagatgacaggtgtgagccaccgcgcccagctgagacacagaactttcagtgctaaaaactagaaagtcgccgggtgcggtggctcacacctgtattcccagcactttgggaggcctaggtgggaggatcccttgagttcaggagttcgagaccagcctgggcaatatagcgaccccctctctctgcaaataataaaaaacttagccgggcatggtggcatgcacgtgtggttctcgctactcaggaggctgaggtaggaggattgcttggtcctggacagttgaggctgcagtgaggtatgatcgtgccactgcactccagcctgggtgacagcgagaccccgtctcaaaaaaaaaaaagggaaagctcgggcatgttggttacccttcatgaaactcttttgcgttatctccctagattttgagctccaagggcagtggttctcatacaggggacatttggctgttgtctggagccattttttgattgtcaaaacccagataggggttgctagtggcatcttgtgggtggaggccagggaagctgctacacatccatcagtacacaggacagcccccacaataaagaattacctagcccaaatgtcagtagcgccaaggctgagaaatcccatcctgaaaggaccatactctagctcttttagtggctagtatagtcctgggcatatgaatagtcaagatatgatgaaagatggtatttgtatggactggagtatcaagcaaggctcgacccccaaagggctggaggcgtggccagaaggacagggccactttggcttctggattcctgtggcagggaccttttcctaggactccctggccaatgtggggctatgaacagcactgagtatccccctaagtgaccttggggtgctctgtgaccctcagcggctgccggaaacaacatggaggacatctttggggagcttttgctacagctgcaccagcagtacccaggtgatatcggctgctttgccatctacttcctgaacctgcttaccctgaagcctggggaggccatgtttctggaggccaacgtaccccatgcctacctgaaaggaggtgagccacatttcagcagtgagccccactgccatccctgctgggccctgtttccctatctggacaaaggaaggagaagggtggtcaaggagacccccaaggaccttgcagctctgacctctgagggttcctgggctcagcaagcaacagctggtagggatgatgaatgcatttagcattgaacacgccttgaatcctgacaccaaccctgtgatgccatgctactctgattttaagtcctgccagtcagtgtgggaaccacaatttgaacgcaggctatattggatcaaagctgttgttctgtcacagcctttgtatgtctgtcctacctaccagggatttttacactaaaatatgcatgttgccatggaaggatgccacctttcgactgttggctgcttatccacacatgcctcatgcacaggattctggggtagaagtgggagactacagagttggggctccccaacccccaggggttaacatgactcccctctgacaataatgggtgacctgtcacctgtttttggtatttgatatcttaaccccattctcccagagaatacaattcatggaaatttttacctaacttggcatggggttcatggagctcaggttaggaggcccagaactggagagctaaggcatacttcatcagcttagcacatgacgactgtctctccagactgcgtggagtgcatggcgtgttcagacaacacagttcgtgctggcctgacacccaagttcattgatgtgccaaccctgtg

SEQ ID NO: 12885 - DNA, 969 bp, Homo sapiens
ctgggcgcagagggccgcgggggctgccgggaaaggcatacgtgcttaatcctggtgcagggggcgagcatggccgctccgcgagcagtatgcctgggggaagatgggttccaacagcgaagtggcgcggctgttggccagcagtgatccactggcccagatcgcagaggacaagccttatgcagagttgtggatggggactcacccccgaggggatgccaagatccttgacaaccgcatctcacagaagaccctaagccagtggattgctgagaaccaggacagcttgggctcaaaggtcaaggacacctttaatggcaacctgcccttcctcttcaaagtgctctcagttgaaacacccctgtccatccaggcacaccctaacaaggagctggcagagaagctgcacctccaggctccgcagcactaccccgatgccaaccacaagccagagatggccattgccctcacccccttccagggcttgtgtggcttccggccagttgaggagattgtaacctttctaaagaaggtgcctgagtttcagttcctgattggagatgaggcagcaacacacctgaagcagaccatgagccatgactcccaggctgtggcctcctctctgcagagctgtttctcccacctgatgaagagtgagaagaaggtggtggtggaacagctcaacctgttggtgaagcggatctcccagcaagcggctgccggaaacaacatggaggacatctttggggagcttttgctacagctgcaccagcagtacccaggtgatatcggctgctttgccatctacttcctgaacctgcttaccctgaagcctggggaggccatgtttctggaggccaacgtaccccatgcctacctgaaaggagactgcgtggagtgcatggcgtgttcagacaacacagttcgtgctggcctgacacccaagttcattgatgtgccaaccctgtg

SEQ ID NO: 12886 - DNA, 4784 bp, Homo sapiens; identical to SEQ ID NO: 1218

SEQ ID NO: 12887 - DNA, 2472 bp, Homo sapiens
aatcggctaggagcagcgagcggcgcggctgaggcgcggcggccccgtggagcagcgcagtatggcgggcggggcccgggaggtgctcacactgcagttgggacattttgccggtttcgtgggcgcgcactggtggaaccagcaggatgctgcgctgggccgagcgaccgattccaaggagcccccgggagagctgtgccccgacgtcctgtatcgtacgggccggacgctgcacggccaggagacctacacgccgcgactcatcctcatggatctgaagggtagtttgagctccctaaaagaggaaggtggactctacagggacaaacagttggatgctgcaatagcatggcaggggaagctcaccacacacaaagaggaactctatcccaagaacccttatctccaagactttctgagtgcagagggagtgctgagtagtgatggtgtctggagggtcaaatccattcccaatggcaaaggttcctcaccactccccaccgctacaactccaaaaccacttatccctacagaggccagcatcagggtctggtcagacttcctcagagtccatctccatccccggagcatctgtatgattcagaagtacaaccacgatggggaagcaggtcggctggaggcttttggccaaggggaaagtgtcctaaaggaacccaagtaccaggaagagctggaggacaggctgcatttctacgtggaggaatgtgactacttgcagggcttccagatcctgtgtgacctgcacgatggcttctctggggtaggcgcgaaggcggcagagctgctacaagatgaatattcagggcggggaataataacctggggcctgctacctggtccctaccatcgtggggaggcccagagaaacatctatcgtctattaaacacagcttttggtctcgtgcacctgactgctcacagctctcttgtctgccccttgtccttgggtgggagcctgggcctgcgacccgagccacctgtcagcttcccttacctgcattatgatgccactctgcccttccactgcagtgccatcctggctacagccctggacacagtcactgttccttatcgcctgtgttcctctccagtttccatggttcatctggctgacatgctgagcttctgtgggaaaaaggtggtgacagcaggagcaatcatccctttccccttggctccaggccagtcccttcctgattccctgatgcagtttggaggagccaccccatggaccccactgtctgcatgtggggagccttctggaacacgttgctttgcccagtcagtggtgctgaggggtatagacagagcatgccacacaagccagctcaccccagggacacctccaccctctgcccttcatgcatgtaccactggggaagaaatcttggctcagtatttacaacagcagcagcctggagtcatgagttcttcccatctgctgctgactccctgcagggtggctcctccttacccccacctcttctcaagctgcagtccaccgggtatggttctggatggttcccccaagggagcagcagtggagagcatcccagtgtttggggcactgtgttcctcttcgtccctgcaccagaccctggaagccttggccagagacctcaccaaactcgacttgcggcgctgggccagcttcatggatgctggagtggagcacgatgacgtagcagagctgctgcaggagctacaaagcctggcccagtgctaccagggtggtgacagcctcgtggactaaagttcccagtgtgggagaaaggagctagtttgcaataaaaacagctggatgcaggagcccagtgtcttcatgcagaggagctcaatgtcgcgggactagctacaccaacatatgcactttttacatttagaaacactgtgattagaccacagaacaataaatatgtgccatcagaccaaaaaaaagtagagaaaggagctgaactccactctcgatgctacttacagaggacatctgtaaagtcttcataaaagaccttgaatgatgcctaggatggcagagcccctgggtcctactccatcctccagcctttgtccttgtcctggcctcctgctctccagatctgtaaactgggctcaaggactgtacaagcagagtacaactacccgcctccccggtgccagggcgcctgttgggtttggtcctgtgtagatgattcccagagtctcattcatccagctcctcttcagacagaaggtccccatggtcagacagctggtctgcattgctggtactggttgcatcatcctcatcctcagagctggcttcacaggcagtgtggaagagctgcatgagttctcgaaaatggtgggaaacctaagaaaggaggagggctgtattcactgatccttagtaacatgttaacatttatgaagcactatatattgatttgcaaaatcttttgtttattccacaca

SEQ ID NO: 12888 - DNA, 4695 bp, Homo sapiens
agcgcagtatggcgggcggggcccgggaggtgctcacactgcagttgggacattttgccggtttcgtgggcgcgcactggtggaaccagcaggtgaggtcagccggcagctgcccccgaggagcccttcgggatctacagtcccgacgttcagccggcctgcctcgtcctctctgcttccccaggatgctgcgctgggccgagcgaccgattccaaggagcccccgggagagctgtgccccgacgtcctgtatcgtacgggccggacgctgcacggccaggagacctacacgccgcgactcatcctcatggatctgaagggtgaggtggtggcagagttagccgatgccccttatttcccttccgcgtgcctagtccttgcgctgccgttatcttcaagaccctcccaccttaccgagctccaggaccggagatgaggagctgagcacaacatgccaacactcgaggggcccacgacagttgctcaagagccatttcgggaataggctgctaggccctggagacagtgaggacttgaactgcagcactcctgtcagacccctggatgtggttccccccgcgtcccacagctaatgactaagctgggaaccgaaagatggaatctagattctcctaagccaaggtttttcccccaactagtgtatatcccagaaagcttggaagagccaagtgctggagagatggtgacagcaggttgtcaggtgatcagaggaaggttagctagaggggaagggtgcccaggctttgacctaacattgtctctgttatttctgtacaggtagtttgagctccctaaaagaggaaggtggactctacagggacaaacagttggatgctgcaatagcatggtgtgtaactgatgtatggataagggtggggatcgtgtatgtacgcagaacgctggataactctgatcagagtgcagtttctttgatcaatctccaaactctttcaggcaggggaagctcaccacacacaaagaggaactctatcccaagaacccttatctccaagactttctgagtgcagaggtgagggcctctgtcctgaactttttaacccggtgccacaacccgagggtctccataggggcaggtaaacggggattttaatcattttaagtgtcttagaatgatattttgggaaaaagcactccttttcctaaggactgcgactcggtgaacagaaaggaggctatgcggtgtggccagccaactcaaggaggacgaagcaacctttgcctctaaactgcctggaactaaatgtcgatttttctgacccctcccagggagtgctgagtagtgatggtgtctggagggtcaaatccattcccaatggcaaaggtgagacttctccagatactgatggatgggggcttgggtagagcagaaacatggagaaaggtacatttcctctgcttgtcttcaggttcctcaccactccccaccgctacaactccaaaaccacttatccctacagaggccagcatcagggtctggtcagacttcctcagagtccatctccatccccggagcatctgtatgattcagaagtacaaccacgatgggtatggggaccccagaggctttgaggcaagaaacatgggtccccaccaatgcaggatgaggctcttgaggccatcttccctgcccttccccaggacaagaggctgaggagttgagggaagagatgtaagtcttggatcatgtttacttgtggcagggaagcaggtcggctggaggcttttggccaaggggaaagtgtcctaaaggaacccaagtaccaggaagagctggaggacaggctgcatttctacgtggaggaatgtgactacttgcaggtagtggcgtggcaatgtgcactccagggtggaagctcttctcatcctgctaactatcttttgtcactcacccccgtccagggcttccagatcctgtgtgacctgcacgatggcttctctggggtaggcgcgaaggcggcagagctgctacaagatgaatattcagggcggggaataataacctggggcctgctacctggtccctaccatcgtggggtgagtggaacttagagaagtaaacagtcacacagtggggagggagaaatcagaatcccagtgggagagctgcttaatacaaactactctttcttcaccaggaggcccagagaaacatctatcgtctattaaacacagcttttggtctcgtgcacctgactgctcacagctctcttgtctgccccttgtccttgggtgggagcctgggcctgcgacccgagccacctgtcagcttcccttacctgcattatgatgtaagtctcggtgctcttgttctgactgcggcaggctacagggcctcctcatgctcccagtcagccgctgtctgttactggctctgttcttgaggcccgagcttgaactcagctgtgatgtggcctctcagatcacactgtcctatgcttgtccagcctggggtcaaacatacccctgattcgtcccctgggtctctctggtgttaatattctgcctccacacattcttttccaggcctgaggccaagtgcccatcttggtgtcttcttacaggccactctgcccttccactgcagtgccatcctggctacagccctggacacagtcactgttccttatcgcctgtgttcctctccagtttccatggttcatctggctgacatgctgagcttctgtgggaaaaaggtatgaagctttgtaaggggttgggtcagtgctgagaaaatgtcctataacgtgttctcttccatctctttaggtggtgacagcaggagcaatcatccctttccccttggctccaggccagtcccttcctgattccctgatgcagtttggaggagccaccccatggaccccactgtctgcatgtggggagccttctggaacacgttgctttgcccagtcagtggtgctgaggggtatagacagagcatgccacacaaggtgagagctgttggtccttaggagtccttgtcagatttttgtctcatatccatcttcccctaatttctctggggcattctaatgatactgttccctccccaccccttaaaaaggaaaaaaaaaagggctttgaatatcttgatccagctgatggcctgagaacataagaattctgtttcttattcatgcagccacagactaatggtggttttggctttgttctggcagccagctcaccccagggacacctccaccctctgcccttcatgcatgtaccactggggaagaaatcttggctcagtatttacaacagcagcagcctggagtcatgaggtcagtgtaacggttgctcctgcccttcttgccaaccgcaaccctcccttgacttcttacgcacttaatggctgttctctgcccccacagttcttcccatctgctgctgactccctgcagggtggctcctccttacccccacctcttctcaagctgcagtccaccgggtatggttctggatggttcccccaagggagcaggtatgtaggaggtgaagaaaactgagatttcaagtatgggagagtttttactatctccattcctggattaaaagtgctgaaaaagtccacagttaaacattcctttattcaccctatggctcccaagaaaagcattcttcctctggagtactggtgtactaaggggacaatacaccaaatttgttgagtttacaatcaagtctactaaggttggacttccttatcagtttggcagagtcccagggcagaataatcatccatctacaggtctctgtttcctctccctccacagcagtggagagcatcccagtgtttggggcactgtgttcctcttcgtccctgcaccagaccctggaagccttggccagagacctcaccaaactcgacttgcggcgctgggccagcttcatggatgctggagtggagcacgatgacgtagcagagctgctgcaggagctacaaagcctggcccagtgctaccagggtggtgacagcctcgtggactaaagttcccagtgtgggagaaaggagctagtttgcaataaaaacagctggatgcaggagcccagtgtcttcatgcagaggagctcaatgtcgcgggactagctacaccaacatatgcactttttacatttagaaacactgtgattagaccacagaacaataaatatgtgccatcagaccaaaaaaaagtagagaaaggagctgaactccactctcgatgctacttacagaggacatctgtaaagtcttcataaaagaccttgaatgatgcctaggatggcagagcccctgggtcctactccatcctccagcctttgtccttgtcctggcctcctgctctccagatctgtaaactgggctcaaggactgtacaagcagagtacaactacccgcctccccggtgccagggcgcctgttgggtttggtcctgtgtagatgattcccagagtctcattcatccagctcctcttcagacagaaggtccccatggtcagacagctggtctgcattgctggtactggttgcatcatcctcatcctcagagctggcttcacaggcagtgtggaagagctgcatgagttctcgaaaatggtgggaaacctaagaaaggaggagggctgtattcactgatccttagtaacatgttaacatttatgaagcactat

SEQ ID NO: 12889 - DNA, 2245 bp, Homo sapiens
agcgcagtatggcgggcggggcccgggaggtgctcacactgcagttgggacattttgccggtttcgtgggcgcgcactggtggaaccagcaggatgctgcgctgggccgagcgaccgattccaaggagcccccgggagagctgtgccccgacgtcctgtatcgtacgggccggacgctgcacggccaggagacctacacgccgcgactcatcctcatggatctgaagggtagtttgagctccctaaaagaggaaggtggactctacagggacaaacagttggatgctgcaatagcatggcaggggaagctcaccacacacaaaggttcctcaccactccccaccgctacaactccaaaaccacttatccctacagaggccagcatcagggtctggtcagacttcctcagagtccatctccatccccggagcatctgtatgattcagaagtacaaccacgatggggaagcaggtcggctggaggcttttggccaaggggaaagtgtcctaaaggaacccaagtaccaggaagagctggaggacaggctgcatttctacgtggaggaatgtgactacttgcagggcttccagatcctgtgtgacctgcacgatggcttctctggggtaggcgcgaaggcggcagagctgctacaagatgaatattcagggcggggaataataacctggggcctgctacctggtccctaccatcgtggggaggcccagagaaacatctatcgtctattaaacacagcttttggtctcgtgcacctgactgctcacagctctcttgtctgccccttgtccttgggtgggagcctgggcctgcgacccgagccacctgtcagcttcccttacctgcattatgatgccactctgcccttccactgcagtgccatcctggctacagccctggacacagtcactgttccttatcgcctgtgttcctctccagtttccatggttcatctggctgacatgctgagcttctgtgggaaaaaggtggtgacagcaggagcaatcatccctttccccttggctccaggccagtcccttcctgattccctgatgcagtttggaggagccaccccatggaccccactgtctgcatgtggggagccttctggaacacgttgctttgcccagtcagtggtgctgaggggtatagacagagcatgccacacaagccagctcaccccagggacacctccaccctctgcccttcatgcatgtaccactggggaagaaatcttggctcagtatttacaacagcagcagcctggagtcatgagttcttcccatctgctgctgactccctgcagggtggctcctccttacccccacctcttctcaagctgcagtccaccggcagtggagagcatcccagtgtttggggcactgtgttcctcttcgtccctgcaccagaccctggaagccttggccagagacctcaccaaactcgacttgcggcgctgggccagcttcatggatgctggagtggagcacgatgacgtagcagagctgctgcaggagctacaaagcctggcccagtgctaccagggtggtgacagcctcgtggactaaagttcccagtgtgggagaaaggagctagtttgcaataaaaacagctggatgcaggagcccagtgtcttcatgcagaggagctcaatgtcgcgggactagctacaccaacatatgcactttttacatttagaaacactgtgattagaccacagaacaataaatatgtgccatcagaccaaaaaaaagtagagaaaggagctgaactccactctcgatgctacttacagaggacatctgtaaagtcttcataaaagaccttgaatgatgcctaggatggcagagcccctgggtcctactccatcctccagcctttgtccttgtcctggcctcctgctctccagatctgtaaactgggctcaaggactgtacaagcagagtacaactacccgcctccccggtgccagggcgcctgttgggtttggtcctgtgtagatgattcccagagtctcattcatccagctcctcttcagacagaaggtccccatggtcagacagctggtctgcattgctggtactggttgcatcatcctcatcctcagagctggcttcacaggcagtgtggaagagctgcatgagttctcgaaaatggtgggaaacctaagaaaggaggagggctgtattcactgatccttagtaacatgttaacatttatgaagcactat

SEQ ID NO: 12890 - DNA, 2263 bp, Homo sapiens
ctgaggcgcggcggccccgtggagcagcgcagtatggcgggcggggcccgggaggtgctcacactgcagttgggacattttgccggtttcgtgggcgcgcactggtggaaccagcaggtgaggtcagccggcagctgcccccgaggagcccttcgggatctacagtcccgacgttcagccggcctgcctcgtcctctctgcttccccaggatgctgcgctgggccgagcgaccgattccaaggagcccccgggagagctgtgccccgacgtcctgtatcgtacgggccggacgctgcacggccaggagacctacacgccgcgactcatcctcatggatctgaagggtgaggtggtggcagagttagccgatgccccttatttcccttccgcgtgcctagtccttgcgctgccgttatcttcaagaccctcccaccttaccgagctccaggaccggagatgaggagctgagcacaacatgccaacactcgaggggcccacgacagttgctcaagagccatttcgggaataggctgctaggccctggagacagtgaggacttgaactgcagcactcctgtcagacccctggatgtggttccccccgcgtcccacagctaatgactaagctgggaaccgaaagatggaatctagattctcctaagccaaggtttttcccccaactagtgtatatcccagaaagcttggaagagccaagtgctggagagatggtgacagcaggttgtcaggtgatcagaggaaggttagctagaggggaagggtgcccaggctttgacctaacattgtctctgttatttctgtacaggtagtttgagctccctaaaagaggaaggtggactctacagggacaaacagttggatgctgcaatagcatggtgtgtaactgatgtatggataagggtggggatcgtgtatgtacgcagaacgctggataactctgatcagagtgcagtttctttgatcaatctccaaactctttcaggcaggggaagctcaccacacacaaagaggaactctatcccaagaacccttatctccaagactttctgagtgcagaggtgagggcctctgtcctgaactttttaacccggtgccacaacccgagggtctccataggggcaggtaaacggggattttaatcattttaagtgtcttagaatgatattttgggaaaaagcactccttttcctaaggactgcgactcggtgaacagaaaggaggctatgcggtgtggccagccaactcaaggaggacgaagcaacctttgcctctaaactgcctggaactaaatgtcgatttttctgacccctcccagggagtgctgagtagtgatggtgtctggagggtcaaatccattcccaatggcaaaggtgagacttctccagatactgatggatgggggcttgggtagagcagaaacatggagaaaggtacatttcctctgcttgtcttcaggttcctcaccactccccaccgctacaactccaaaaccacttatccctacagaggccagcatcagggtctggtcagacttcctcagagtccatctccatccccggagcatctgtatgattcagaagtacaaccacgatgggtatggggaccccagaggctttgaggcaagaaacatgggtccccaccaatgcaggatgaggctcttgaggccatcttccctgcccttccccaggacaagaggctgaggagttgagggaagagatgtaagtcttggatcatgtttacttgtggcagggaagcaggtcggctggaggcttttggccaaggggaaagtgtcctaaaggaacccaagtaccaggaagagctggaggacaggctgcatttctacgtggaggaatgtgactacttgcaggtagtggcgtggcaatgtgcactccagggtggaagctcttctcatcctgctaactatcttttgtcactcacccccgtccagggcttccagatcctgtgtgacctgcacgatggcttctctggggtaggcgcgaaggcggcagagctgctacaagatgaatattcagggcggggaataataacctggggcctgctacctggtccctaccatcgtggggtgagtggaacttagagaagtaaacagtcacacagtggggagggagaaatcagaatcccagtgggagagctgcttaatacaaactactctttcttcaccaggaggcccagagaaacatctatcgtctattaaacacagcttttggtctcgtgcacctgactg

SEQ ID NO: 12891 - DNA, 1033 bp, Homo sapiens
ctgaggcgcggcggccccgtggagcagcgcagtatggcgggcggggcccgggaggtgctcacactgcagttgggacattttgccggtttcgtgggcgcgcactggtggaaccagcaggatgctgcgctgggccgagcgaccgattccaaggagcccccgggagagctgtgccccgacgtcctgtatcgtacgggccggacgctgcacggccaggagacctacacgccgcgactcatcctcatggatctgaagggtagtttgagctccctaaaagaggaaggtggactctacagggacaaacagttggatgctgcaatagcatggcaggggaagctcaccacacacaaagaggaactctatcccaagaacccttatctccaagactttctgagtgcagagggagtgctgagtagtgatggtgtctggagggtcaaatccattcccaatggcaaaggttcctcaccactccccaccgctacaactccaaaaccacttatccctacagaggccagcatcagggtctggtcagacttcctcagagtccatctccatccccggagcatctgtatgattcagaagtacaaccacgatgggtatggggaccccagaggctttgagggaagcaggtcggctggaggcttttggccaaggggaaagtgtcctaaaggaacccaagtaccaggaagagctggaggacaggctgcatttctacgtggaggaatgtgactacttgcagggcttccagatcctgtgtgacctgcacgatggcttctctggggtaggcgcgaaggcggcagagctgctacaagatgaatattcagggcggggaataataacctggggcctgctacctggtccctaccatcgtggggtgagtggaacttagagaagtaaacagtcacacagtggggagggagaaatcagaatcccagtgggagagctgcttaatacaaactactctttcttcaccaggaggcccagagaaacatctatcgtctattaaacacagcttttggtctcgtgcacctgactg

SEQ ID NO: 12892 - DNA, 832 bp, Homo sapiens
catgccacacaaggtgagagctgttggtccttaggagtccttgtcagatttttgtctcatatccatcttcccctaatttctctggggcattctaatgatactgttccctccccaccccttaaaaaggaaaaaaaaaagggctttgaatatcttgatccagctgatggcctgagaacataagaattctgtttcttattcatgcagccacagactaatggtggttttggctttgttctggcagccagctcaccccagggacacctccaccctctgcccttcatgcatgtaccactggggaagaaatcttggctcagtatttacaacagcagcagcctggagtcatgaggtcagtgtaacggttgctcctgcccttcttgccaaccgcaaccctcccttgacttcttacgcacttaatggctgttctctgcccccacagttcttcccatctgctgctgactccctgcagggtggctcctccttacccccacctcttctcaagctgcagtccaccgggtatggttctggatggttcccccaagggagcaggtatgtaggaggtgaagaaaactgagatttcaagtatgggagagtttttactatctccattcctggattaaaagtgctgaaaaagtccacagttaaacattcctttattcaccctatggctcccaagaaaagcattcttcctctggagtactggtgtactaaggggacaatacaccaaatttgttgagtttacaatcaagtctactaaggttggacttccttatcagtttggcagagtcccagggcagaataatcatccatctacaggtctctgtttcctctccct

SEQ ID NO: 12893 - DNA, 514 bp, Homo sapiens
catgccacacaagccagctcaccccagggacacctccaccctctgcccttcatgcatgtaccactggggaagaaatcttggctcagtatttacaacagcagcagcctggagtcatgagttcttcccatctgctgctgactccctgcagggtggctcctccttacccccacctcttctcaagctgcagtccaccgggtatggttctggatggttcccccaagggagcaggtatgtaggaggtgaagaaaactgagatttcaagtatgggagagtttttactatctccattcctggattaaaagtgctgaaaaagtccacagttaaacattcctttattcaccctatggctcccaagaaaagcattcttcctctggagtactggtgtactaaggggacaatacaccaaatttgttgagtttacaatcaagtctactaaggttggacttccttatcagtttggcagagtcccagggcagaataatcatccatctacaggtctctgtttcctctccct

SEQ ID NO: 12894 - DNA, 1998 bp, Homo sapiens
gcgcactggtggaaccagcaggtgaggtcagccggcagctgcccccgaggagcccttcgggatctacagtcccgacgttcagccggcctgcctcgtcctctctgcttccccaggatgctgcgctgggccgagcgaccgattccaaggagcccccgggagagctgtgccccgacgtcctgtatcgtacgggccggacgctgcacggccaggagacctacacgccgcgactcatcctcatggatctgaagggtgaggtggtggcagagttagccgatgccccttatttcccttccgcgtgcctagtccttgcgctgccgttatcttcaagaccctcccaccttaccgagctccaggaccggagatgaggagctgagcacaacatgccaacactcgaggggcccacgacagttgctcaagagccatttcgggaataggctgctaggccctggagacagtgaggacttgaactgcagcactcctgtcagacccctggatgtggttccccccgcgtcccacagctaatgactaagctgggaaccgaaagatggaatctagattctcctaagccaaggtttttcccccaactagtgtatatcccagaaagcttggaagagccaagtgctggagagatggtgacagcaggttgtcaggtgatcagaggaaggttagctagaggggaagggtgcccaggctttgacctaacattgtctctgttatttctgtacaggtagtttgagctccctaaaagaggaaggtggactctacagggacaaacagttggatgctgcaatagcatggtgtgtaactgatgtatggataagggtggggatcgtgtatgtacgcagaacgctggataactctgatcagagtgcagtttctttgatcaatctccaaactctttcaggcaggggaagctcaccacacacaaagaggaactctatcccaagaacccttatctccaagactttctgagtgcagaggtgagggcctctgtcctgaactttttaacccggtgccacaacccgagggtctccataggggcaggtaaacggggattttaatcattttaagtgtcttagaatgatattttgggaaaaagcactccttttcctaaggactgcgactcggtgaacagaaaggaggctatgcggtgtggccagccaactcaaggaggacgaagcaacctttgcctctaaactgcctggaactaaatgtcgatttttctgacccctcccagggagtgctgagtagtgatggtgtctggagggtcaaatccattcccaatggcaaaggtgagacttctccagatactgatggatgggggcttgggtagagcagaaacatggagaaaggtacatttcctctgcttgtcttcaggttcctcaccactccccaccgctacaactccaaaaccacttatccctacagaggccagcatcagggtctggtcagacttcctcagagtccatctccatccccggagcatctgtatgattcagaagtacaaccacgatgggtatggggaccccagaggctttgaggcaagaaacatgggtccccaccaatgcaggatgaggctcttgaggccatcttccctgcccttccccaggacaagaggctgaggagttgagggaagagatgtaagtcttggatcatgtttacttgtggcagggaagcaggtcggctggaggcttttggccaaggggaaagtgtcctaaaggaacccaagtaccaggaagagctggaggacaggctgcatttctacgtggaggaatgtgactacttgcaggtagtggcgtggcaatgtgcactccagggtggaagctcttctcatcctgctaactatcttttgtcactcacccccgtccagggcttccagatcctgtgtgacctgcacgatggcttctctggggtaggcgcgaaggcggcagagctgctacaagatgaatattcagggcggggaataataacctggggcctgctacctggtccctacca

SEQ ID NO: 12895 - DNA, 865 bp, Homo sapiens
gcgcactggtggaaccagcaggatgctgcgctgggccgagcgaccgattccaaggagcccccgggagagctgtgccccgacgtcctgtatcgtacgggccggacgctgcacggccaggagacctacacgccgcgactcatcctcatggatctgaagggtagtttgagctccctaaaagaggaaggtggactctacagggacaaacagttggatgctgcaatagcatggcaggggaagctcaccacacacaaagaggaactctatcccaagaacccttatctccaagactttctgagtgcagaggactgcgactcggtgaacagaaaggaggctatgcggtgtggccagccaactcaaggaggacgaagcaacctttgcctctaaactgcctggaactaaatgtcgatttttctgacccctcccagggagtgctgagtagtgatggtgtctggagggtcaaatccattcccaatggcaaaggttcctcaccactccccaccgctacaactccaaaaccacttatccctacagaggccagcatcagggtctggtcagacttcctcagagtccatctccatccccggagcatctgtatgattcagaagtacaaccacgatggggaagcaggtcggctggaggcttttggccaaggggaaagtgtcctaaaggaacccaagtaccaggaagagctggaggacaggctgcatttctacgtggaggaatgtgactacttgcagggcttccagatcctgtgtgacctgcacgatggcttctctggggtaggcgcgaaggcggcagagctgctacaagatgaatattcagggcggggaataataacctggggcctgctacctggtccctacca

SEQ ID NO: 12896 - DNA, 1543 bp, Homo sapiens
ctgcggcaggctacagggcctcctcatgctcccagtcagccgctgtctgttactggctctgttcttgaggcccgagcttgaactcagctgtgatgtggcctctcagatcacactgtcctatgcttgtccagcctggggtcaaacatacccctgattcgtcccctgggtctctctggtgttaatattctgcctccacacattcttttccaggcctgaggccaagtgcccatcttggtgtcttcttacaggccactctgcccttccactgcagtgccatcctggctacagccctggacacagtcactgttccttatcgcctgtgttcctctccagtttccatggttcatctggctgacatgctgagcttctgtgggaaaaaggtatgaagctttgtaaggggttgggtcagtgctgagaaaatgtcctataacgtgttctcttccatctctttaggtggtgacagcaggagcaatcatccctttccccttggctccaggccagtcccttcctgattccctgatgcagtttggaggagccaccccatggaccccactgtctgcatgtggggagccttctggaacacgttgctttgcccagtcagtggtgctgaggggtatagacagagcatgccacacaaggtgagagctgttggtccttaggagtccttgtcagatttttgtctcatatccatcttcccctaatttctctggggcattctaatgatactgttccctccccaccccttaaaaaggaaaaaaaaaagggctttgaatatcttgatccagctgatggcctgagaacataagaattctgtttcttattcatgcagccacagactaatggtggttttggctttgttctggcagccagctcaccccagggacacctccaccctctgcccttcatgcatgtaccactggggaagaaatcttggctcagtatttacaacagcagcagcctggagtcatgaggtcagtgtaacggttgctcctgcccttcttgccaaccgcaaccctcccttgacttcttacgcacttaatggctgttctctgcccccacagttcttcccatctgctgctgactccctgcagggtggctcctccttacccccacctcttctcaagctgcagtccaccgggtatggttctggatggttcccccaagggagcaggtatgtaggaggtgaagaaaactgagatttcaagtatgggagagtttttactatctccattcctggattaaaagtgctgaaaaagtccacagttaaacattcctttattcaccctatggctcccaagaaaagcattcttcctctggagtactggtgtactaaggggacaatacaccaaatttgttgagtttacaatcaagtctactaaggttggacttccttatcagtttggcagagtcccagggcagaataatcatccatctacaggtctctgtttcctctccctccacagcagtggagagcatcccagtgtttggggcactgtgttcctcttcgtccctgcaccagaccctggaagccttggccagagac

SEQ ID NO: 12897 - DNA, 860 bp, Homo sapiens
ctgcggcaggctacagggcctcctcatgctcccagtcagccgctgtctgttactggctctgttcttgaggcccgagcttgaactcagctgtgatgtggcctctcagatcacactgtcctatgcttgtccagcctggggtcaaacatacccctgattcgtcccctgggtctctctggtgttaatattctgcctccacacattcttttccaggcctgaggccaagtgcccatcttggtgtcttcttacaggccactctgcccttccactgcagtgccatcctggctacagccctggacacagtcactgttccttatcgcctgtgttcctctccagtttccatggttcatctggctgacatgctgagcttctgtgggaaaaaggtggtgacagcaggagcaatcatccctttccccttggctccaggccagtcccttcctgattccctgatgcagtttggaggagccaccccatggaccccactgtctgcatgtggggagccttctggaacacgttgctttgcccagtcagtggtgctgaggggtatagacagagcatgccacacaagccagctcaccccagggacacctccaccctctgcccttcatgcatgtaccactggggaagaaatcttggctcagtatttacaacagcagcagcctggagtcatgagttcttcccatctgctgctgactccctgcagggtggctcctccttacccccacctcttctcaagctgcagtccaccgggtatggttctggatggttcccccaagggagcagcagtggagagcatcccagtgtttggggcactgtgttcctcttcgtccctgcaccagaccctggaagccttggccagagac

SEQ ID NO: 12898 - DNA, 534 bp, Homo sapiens
aggcgcggcggccccgtggagcagcgcagtatggcgggcggggcccgggaggtgctcacactgcagttgggacattttgccggtttcgtgggcgcgcactggtggaaccagcaggtgaggtcagccggcagctgcccccgaggagcccttcgggatctacagtcccgacgttcagccggcctgcctcgtcctctctgcttccccaggatgctgcgctgggccgagcgaccgattccaaggagcccccgggagagctgtgccccgacgtcctgtatcgtacgggccggacgctgcacggccaggagacctacacgccgcgactcatcctcatggatctgaagggtgaggtggtggcagagttagccgatgccccttatttcccttccgcgtgcctagtccttgcgctgccgttatcttcaagaccctcccaccttaccgagctccaggaccggagatgaggagctgagcacaacatgccaacactcgaggggcccacgacagttgctcaagagccatttcgggaataggctgcta

SEQ ID NO: 12899 - DNA, 442 bp, Homo sapiens
aggcgcggcggccccgtggagcagcgcagtatggcgggcggggcccgggaggtgctcacactgcagttgggacattttgccggtttcgtgggcgcgcactggtggaaccagcaggatgctgcgctgggccgagcgaccgattccaaggagcccccgggagagctgtgccccgacgtcctgtatcgtacgggccggacgctgcacggccaggagacctacacgccgcgactcatcctcatggatctgaagggtgaggtggtggcagagttagccgatgccccttatttcccttccgcgtgcctagtccttgcgctgccgttatcttcaagaccctcccaccttaccgagctccaggaccggagatgaggagctgagcacaacatgccaacactcgaggggcccacgacagttgctcaagagccatttcgggaataggctgcta

SEQ ID NO: 12900 - DNA, 1934 bp, Homo sapiens
cgacgttcagccggcctgcctcgtcctctctgcttccccaggatgctgcgctgggccgagcgaccgattccaaggagcccccgggagagctgtgccccgacgtcctgtatcgtacgggccggacgctgcacggccaggagacctacacgccgcgactcatcctcatggatctgaagggtgaggtggtggcagagttagccgatgccccttatttcccttccgcgtgcctagtccttgcgctgccgttatcttcaagaccctcccaccttaccgagctccaggaccggagatgaggagctgagcacaacatgccaacactcgaggggcccacgacagttgctcaagagccatttcgggaataggctgctaggccctggagacagtgaggacttgaactgcagcactcctgtcagacccctggatgtggttccccccgcgtcccacagctaatgactaagctgggaaccgaaagatggaatctagattctcctaagccaaggtttttcccccaactagtgtatatcccagaaagcttggaagagccaagtgctggagagatggtgacagcaggttgtcaggtgatcagaggaaggttagctagaggggaagggtgcccaggctttgacctaacattgtctctgttatttctgtacaggtagtttgagctccctaaaagaggaaggtggactctacagggacaaacagttggatgctgcaatagcatggtgtgtaactgatgtatggataagggtggggatcgtgtatgtacgcagaacgctggataactctgatcagagtgcagtttctttgatcaatctccaaactctttcaggcaggggaagctcaccacacacaaagaggaactctatcccaagaacccttatctccaagactttctgagtgcagaggtgagggcctctgtcctgaactttttaacccggtgccacaacccgagggtctccataggggcaggtaaacggggattttaatcattttaagtgtcttagaatgatattttgggaaaaagcactccttttcctaaggactgcgactcggtgaacagaaaggaggctatgcggtgtggccagccaactcaaggaggacgaagcaacctttgcctctaaactgcctggaactaaatgtcgatttttctgacccctcccagggagtgctgagtagtgatggtgtctggagggtcaaatccattcccaatggcaaaggtgagacttctccagatactgatggatgggggcttgggtagagcagaaacatggagaaaggtacatttcctctgcttgtcttcaggttcctcaccactccccaccgctacaactccaaaaccacttatccctacagaggccagcatcagggtctggtcagacttcctcagagtccatctccatccccggagcatctgtatgattcagaagtacaaccacgatgggtatggggaccccagaggctttgaggcaagaaacatgggtccccaccaatgcaggatgaggctcttgaggccatcttccctgcccttccccaggacaagaggctgaggagttgagggaagagatgtaagtcttggatcatgtttacttgtggcagggaagcaggtcggctggaggcttttggccaaggggaaagtgtcctaaaggaacccaagtaccaggaagagctggaggacaggctgcatttctacgtggaggaatgtgactacttgcaggtagtggcgtggcaatgtgcactccagggtggaagctcttctcatcctgctaactatcttttgtcactcacccccgtccagggcttccagatcctgtgtgacctgcacgatggcttctctggggtaggcgcgaaggcggcagagctgctacaagatgaatattcagggcggggaataataacctggggcctgctacctggtccctaccatcgtgggg

SEQ ID NO: 12901 - DNA, 835 bp, Homo sapiens
cgacgttcagccggcctgcctcgtcctctctgcttccccaggatgctgcgctgggccgagcgaccgattccaaggagcccccgggagagctgtgccccgacgtcctgtatcgtacgggccggacgctgcacggccaggagacctacacgccgcgactcatcctcatggatctgaagggtagtttgagctccctaaaagaggaaggtggactctacagggacaaacagttggatgctgcaatagcatggcaggggaagctcaccacacacaaagaggaactctatcccaagaacccttatctccaagactttctgagtgcagaggtgagggcctctgtcctgaactttttaacccggtgccacaacccgagggtctccataggggcagggagtgctgagtagtgatggtgtctggagggtcaaatccattcccaatggcaaaggttcctcaccactccccaccgctacaactccaaaaccacttatccctacagaggccagcatcagggtctggtcagacttcctcagagtccatctccatccccggagcatctgtatgattcagaagtacaaccacgatggggaagcaggtcggctggaggcttttggccaaggggaaagtgtcctaaaggaacccaagtaccaggaagagctggaggacaggctgcatttctacgtggaggaatgtgactacttgcagggcttccagatcctgtgtgacctgcacgatggcttctctggggtaggcgcgaaggcggcagagctgctacaagatgaatattcagggcggggaataataacctggggcctgctacctggtccctaccatcgtgggg

SEQ ID NO: 12902 - DNA, 1739 bp, Homo sapiens
gtgcacctgactgctcacagctctcttgtctgccccttgtccttgggtgggagcctgggcctgcgacccgagccacctgtcagcttcccttacctgcattatgatgtaagtctcggtgctcttgttctgactgcggcaggctacagggcctcctcatgctcccagtcagccgctgtctgttactggctctgttcttgaggcccgagcttgaactcagctgtgatgtggcctctcagatcacactgtcctatgcttgtccagcctggggtcaaacatacccctgattcgtcccctgggtctctctggtgttaatattctgcctccacacattcttttccaggcctgaggccaagtgcccatcttggtgtcttcttacaggccactctgcccttccactgcagtgccatcctggctacagccctggacacagtcactgttccttatcgcctgtgttcctctccagtttccatggttcatctggctgacatgctgagcttctgtgggaaaaaggtatgaagctttgtaaggggttgggtcagtgctgagaaaatgtcctataacgtgttctcttccatctctttaggtggtgacagcaggagcaatcatccctttccccttggctccaggccagtcccttcctgattccctgatgcagtttggaggagccaccccatggaccccactgtctgcatgtggggagccttctggaacacgttgctttgcccagtcagtggtgctgaggggtatagacagagcatgccacacaaggtgagagctgttggtccttaggagtccttgtcagatttttgtctcatatccatcttcccctaatttctctggggcattctaatgatactgttccctccccaccccttaaaaaggaaaaaaaaaagggctttgaatatcttgatccagctgatggcctgagaacataagaattctgtttcttattcatgcagccacagactaatggtggttttggctttgttctggcagccagctcaccccagggacacctccaccctctgcccttcatgcatgtaccactggggaagaaatcttggctcagtatttacaacagcagcagcctggagtcatgaggtcagtgtaacggttgctcctgcccttcttgccaaccgcaaccctcccttgacttcttacgcacttaatggctgttctctgcccccacagttcttcccatctgctgctgactccctgcagggtggctcctccttacccccacctcttctcaagctgcagtccaccgggtatggttctggatggttcccccaagggagcaggtatgtaggaggtgaagaaaactgagatttcaagtatgggagagtttttactatctccattcctggattaaaagtgctgaaaaagtccacagttaaacattcctttattcaccctatggctcccaagaaaagcattcttcctctggagtactggtgtactaaggggacaatacaccaaatttgttgagtttacaatcaagtctactaaggttggacttccttatcagtttggcagagtcccagggcagaataatcatccatctacaggtctctgtttcctctccctccacagcagtggagagcatcccagtgtttggggcactgtgttcctcttcgtccctgcaccagaccctggaagccttggccagagacctcaccaaactcgacttgcggcgctgggccagcttcatggatgctggagtggagcacgatgacgta

SEQ ID NO: 12903 - DNA, 821 bp, Homo sapiens
gtgcacctgactgctcacagctctcttgtctgccccttgtccttgggtgggagcctgggcctgcgacccgagccacctgtcagcttcccttacctgcattatgatgcctgaggccaagtgcccatcttggtgtcttcttacaggccactctgcccttccactgcagtgccatcctggctacagccctggacacagtcactgttccttatcgcctgtgttcctctccagtttccatggttcatctggctgacatgctgagcttctgtgggaaaaaggtggtgacagcaggagcaatcatccctttccccttggctccaggccagtcccttcctgattccctgatgcagtttggaggagccaccccatggaccccactgtctgcatgtggggagccttctggaacacgttgctttgcccagtcagtggtgctgaggggtatagacagagcatgccacacaagccagctcaccccagggacacctccaccctctgcccttcatgcatgtaccactggggaagaaatcttggctcagtatttacaacagcagcagcctggagtcatgagttcttcccatctgctgctgactccctgcagggtggctcctccttacccccacctcttctcaagctgcagtccaccgggtatggttctggatggttcccccaagggagcagcagtggagagcatcccagtgtttggggcactgtgttcctcttcgtccctgcaccagaccctggaagccttggccagagacctcaccaaactcgacttgcggcgctgggccagcttcatggatgctggagtggagcacgatgacgta

SEQ ID NO: 12904 - DNA, 1232 bp, Homo sapiens
gcacaacatgccaacactcgaggggcccacgacagttgctcaagagccatttcgggaataggctgctaggccctggagacagtgaggacttgaactgcagcactcctgtcagacccctggatgtggttccccccgcgtcccacagctaatgactaagctgggaaccgaaagatggaatctagattctcctaagccaaggtttttcccccaactagtgtatatcccagaaagcttggaagagccaagtgctggagagatggtgacagcaggttgtcaggtgatcagaggaaggttagctagaggggaagggtgcccaggctttgacctaacattgtctctgttatttctgtacaggtagtttgagctccctaaaagaggaaggtggactctacagggacaaacagttggatgctgcaatagcatggtgtgtaactgatgtatggataagggtggggatcgtgtatgtacgcagaacgctggataactctgatcagagtgcagtttctttgatcaatctccaaactctttcaggcaggggaagctcaccacacacaaagaggaactctatcccaagaacccttatctccaagactttctgagtgcagaggtgagggcctctgtcctgaactttttaacccggtgccacaacccgagggtctccataggggcaggtaaacggggattttaatcattttaagtgtcttagaatgatattttgggaaaaagcactccttttcctaaggactgcgactcggtgaacagaaaggaggctatgcggtgtggccagccaactcaaggaggacgaagcaacctttgcctctaaactgcctggaactaaatgtcgatttttctgacccctcccagggagtgctgagtagtgatggtgtctggagggtcaaatccattcccaatggcaaaggtgagacttctccagatactgatggatgggggcttgggtagagcagaaacatggagaaaggtacatttcctctgcttgtcttcaggttcctcaccactccccaccgctacaactccaaaaccacttatccctacagaggccagcatcagggtctggtcagacttcctcagagtccatctccatccccggagcatctgtatgattcagaagtacaaccacgatgggtatggggaccccagaggctttgaggcaagaaacatgggtccccaccaatgcaggatgaggctcttgaggccatcttccctgcccttcc

SEQ ID NO: 12905 - DNA, 1040 bp, Homo sapiens
gcacaacatgccaacactcgaggggcccacgacagttgctcaagagccatttcgggaataggctgctaggccctggagacagtgaggacttgaactgcagcactcctgtcagacccctggatgtggttccccccgcgtcccacagctaatgactaagctgggaaccgaaagatggaatctagattctcctaagccaaggtttttcccccaactagtgtatatcccagaaagcttggaagagccaagtgctggagagatggtgacagcaggttgtcaggtgatcagaggaaggttagctagaggggaagggtgcccaggctttgacctaacattgtctctgttatttctgtacaggtagtttgagctccctaaaagaggaaggtggactctacagggacaaacagttggatgctgcaatagcatggcaggggaagctcaccacacacaaagaggaactctatcccaagaacccttatctccaagactttctgagtgcagaggtgagggcctctgtcctgaactttttaacccggtgccacaacccgagggtctccataggggcaggtaaacggggattttaatcattttaagtgtcttagaatgatattttgggaaaaagcactccttttcctaaggactgcgactcggtgaacagaaaggaggctatgcggtgtggccagccaactcaaggaggacgaagcaacctttgcctctaaactgcctggaactaaatgtcgatttttctgacccctcccagggagtgctgagtagtgatggtgtctggagggtcaaatccattcccaatggcaaaggttcctcaccactccccaccgctacaactccaaaaccacttatccctacagaggccagcatcagggtctggtcagacttcctcagagtccatctccatccccggagcatctgtatgattcagaagtacaaccacgatgggtatggggaccccagaggctttgaggcaagaaacatgggtccccaccaatgcaggatgaggctcttgaggccatcttccctgcccttcc

SEQ ID NO: 12906 - DNA, 1105 bp, Homo sapiens
cgcagtatggcgggcggggcccgggaggtgctcacactgcagttgggacattttgccggtttcgtgggcgcgcactggtggaaccagcaggtgaggtcagccggcagctgcccccgaggagcccttcgggatctacagtcccgacgttcagccggcctgcctcgtcctctctgcttccccaggatgctgcgctgggccgagcgaccgattccaaggagcccccgggagagctgtgccccgacgtcctgtatcgtacgggccggacgctgcacggccaggagacctacacgccgcgactcatcctcatggatctgaagggtgaggtggtggcagagttagccgatgccccttatttcccttccgcgtgcctagtccttgcgctgccgttatcttcaagaccctcccaccttaccgagctccaggaccggagatgaggagctgagcacaacatgccaacactcgaggggcccacgacagttgctcaagagccatttcgggaataggctgctaggccctggagacagtgaggacttgaactgcagcactcctgtcagacccctggatgtggttccccccgcgtcccacagctaatgactaagctgggaaccgaaagatggaatctagattctcctaagccaaggtttttcccccaactagtgtatatcccagaaagcttggaagagccaagtgctggagagatggtgacagcaggttgtcaggtgatcagaggaaggttagctagaggggaagggtgcccaggctttgacctaacattgtctctgttatttctgtacaggtagtttgagctccctaaaagaggaaggtggactctacagggacaaacagttggatgctgcaatagcatggtgtgtaactgatgtatggataagggtggggatcgtgtatgtacgcagaacgctggataactctgatcagagtgcagtttctttgatcaatctccaaactctttcaggcaggggaagctcaccacacacaaagaggaactctatcccaagaacccttatctccaagactttctgagtgcagaggtgagggcctctgtcctgaactttttaacccggtgccacaacccgagggtctccat

SEQ ID NO: 12907 - DNA, 535 bp, Homo sapiens
cgcagtatggcgggcggggcccgggaggtgctcacactgcagttgggacattttgccggtttcgtgggcgcgcactggtggaaccagcaggatgctgcgctgggccgagcgaccgattccaaggagcccccgggagagctgtgccccgacgtcctgtatcgtacgggccggacgctgcacggccaggagacctacacgccgcgactcatcctcatggatctgaagggtagtttgagctccctaaaagaggaaggtggactctacagggacaaacagttggatgctgcaatagcatggtgtgtaactgatgtatggataagggtggggatcgtgtatgtacgcagaacgctggataactctgatcagagtgcagtttctttgatcaatctccaaactctttcaggcaggggaagctcaccacacacaaagaggaactctatcccaagaacccttatctccaagactttctgagtgcagaggtgagggcctctgtcctgaactttttaacccggtgccacaacccgagggtctccat

SEQ ID NO: 12908 - DNA, 4312 bp, Homo sapiens
gcgctgccgttatcttcaagaccctcccaccttaccgagctccaggaccggagatgaggagctgagcacaacatgccaacactcgaggggcccacgacagttgctcaagagccatttcgggaataggctgctaggccctggagacagtgaggacttgaactgcagcactcctgtcagacccctggatgtggttccccccgcgtcccacagctaatgactaagctgggaaccgaaagatggaatctagattctcctaagccaaggtttttcccccaactagtgtatatcccagaaagcttggaagagccaagtgctggagagatggtgacagcaggttgtcaggtgatcagaggaaggttagctagaggggaagggtgcccaggctttgacctaacattgtctctgttatttctgtacaggtagtttgagctccctaaaagaggaaggtggactctacagggacaaacagttggatgctgcaatagcatggtgtgtaactgatgtatggataagggtggggatcgtgtatgtacgcagaacgctggataactctgatcagagtgcagtttctttgatcaatctccaaactctttcaggcaggggaagctcaccacacacaaagaggaactctatcccaagaacccttatctccaagactttctgagtgcagaggtgagggcctctgtcctgaactttttaacccggtgccacaacccgagggtctccataggggcaggtaaacggggattttaatcattttaagtgtcttagaatgatattttgggaaaaagcactccttttcctaaggactgcgactcggtgaacagaaaggaggctatgcggtgtggccagccaactcaaggaggacgaagcaacctttgcctctaaactgcctggaactaaatgtcgatttttctgacccctcccagggagtgctgagtagtgatggtgtctggagggtcaaatccattcccaatggcaaaggtgagacttctccagatactgatggatgggggcttgggtagagcagaaacatggagaaaggtacatttcctctgcttgtcttcaggttcctcaccactccccaccgctacaactccaaaaccacttatccctacagaggccagcatcagggtctggtcagacttcctcagagtccatctccatccccggagcatctgtatgattcagaagtacaaccacgatgggtatggggaccccagaggctttgaggcaagaaacatgggtccccaccaatgcaggatgaggctcttgaggccatcttccctgcccttccccaggacaagaggctgaggagttgagggaagagatgtaagtcttggatcatgtttacttgtggcagggaagcaggtcggctggaggcttttggccaaggggaaagtgtcctaaaggaacccaagtaccaggaagagctggaggacaggctgcatttctacgtggaggaatgtgactacttgcaggtagtggcgtggcaatgtgcactccagggtggaagctcttctcatcctgctaactatcttttgtcactcacccccgtccagggcttccagatcctgtgtgacctgcacgatggcttctctggggtaggcgcgaaggcggcagagctgctacaagatgaatattcagggcggggaataataacctggggcctgctacctggtccctaccatcgtggggtgagtggaacttagagaagtaaacagtcacacagtggggagggagaaatcagaatcccagtgggagagctgcttaatacaaactactctttcttcaccaggaggcccagagaaacatctatcgtctattaaacacagcttttggtctcgtgcacctgactgctcacagctctcttgtctgccccttgtccttgggtgggagcctgggcctgcgacccgagccacctgtcagcttcccttacctgcattatgatgtaagtctcggtgctcttgttctgactgcggcaggctacagggcctcctcatgctcccagtcagccgctgtctgttactggctctgttcttgaggcccgagcttgaactcagctgtgatgtggcctctcagatcacactgtcctatgcttgtccagcctggggtcaaacatacccctgattcgtcccctgggtctctctggtgttaatattctgcctccacacattcttttccaggcctgaggccaagtgcccatcttggtgtcttcttacaggccactctgcccttccactgcagtgccatcctggctacagccctggacacagtcactgttccttatcgcctgtgttcctctccagtttccatggttcatctggctgacatgctgagcttctgtgggaaaaaggtatgaagctttgtaaggggttgggtcagtgctgagaaaatgtcctataacgtgttctcttccatctctttaggtggtgacagcaggagcaatcatccctttccccttggctccaggccagtcccttcctgattccctgatgcagtttggaggagccaccccatggaccccactgtctgcatgtggggagccttctggaacacgttgctttgcccagtcagtggtgctgaggggtatagacagagcatgccacacaaggtgagagctgttggtccttaggagtccttgtcagatttttgtctcatatccatcttcccctaatttctctggggcattctaatgatactgttccctccccaccccttaaaaaggaaaaaaaaaagggctttgaatatcttgatccagctgatggcctgagaacataagaattctgtttcttattcatgcagccacagactaatggtggttttggctttgttctggcagccagctcaccccagggacacctccaccctctgcccttcatgcatgtaccactggggaagaaatcttggctcagtatttacaacagcagcagcctggagtcatgaggtcagtgtaacggttgctcctgcccttcttgccaaccgcaaccctcccttgacttcttacgcacttaatggctgttctctgcccccacagttcttcccatctgctgctgactccctgcagggtggctcctccttacccccacctcttctcaagctgcagtccaccgggtatggttctggatggttcccccaagggagcaggtatgtaggaggtgaagaaaactgagatttcaagtatgggagagtttttactatctccattcctggattaaaagtgctgaaaaagtccacagttaaacattcctttattcaccctatggctcccaagaaaagcattcttcctctggagtactggtgtactaaggggacaatacaccaaatttgttgagtttacaatcaagtctactaaggttggacttccttatcagtttggcagagtcccagggcagaataatcatccatctacaggtctctgtttcctctccctccacagcagtggagagcatcccagtgtttggggcactgtgttcctcttcgtccctgcaccagaccctggaagccttggccagagacctcaccaaactcgacttgcggcgctgggccagcttcatggatgctggagtggagcacgatgacgtagcagagctgctgcaggagctacaaagcctggcccagtgctaccagggtggtgacagcctcgtggactaaagttcccagtgtgggagaaaggagctagtttgcaataaaaacagctggatgcaggagcccagtgtcttcatgcagaggagctcaatgtcgcgggactagctacaccaacatatgcactttttacatttagaaacactgtgattagaccacagaacaataaatatgtgccatcagaccaaaaaaaagtagagaaaggagctgaactccactctcgatgctacttacagaggacatctgtaaagtcttcataaaagaccttgaatgatgcctaggatggcagagcccctgggtcctactccatcctccagcctttgtccttgtcctggcctcctgctctccagatctgtaaactgggctcaaggactgtacaagcagagtacaactacccgcctccccggtgccagggcgcctgttgggtttggtcctgtgtagatgattcccagagtctcattcatccagctcctcttcagacagaaggtccccatggtcagacagctggtctgcattgctggtactggttgcatcatcctcatcctcagagctggcttcacaggcagtgtggaagagctgcatgagttctcgaaaatggtgggaaacctaagaaaggaggagggctgtattcactgatccttagtaacatgttaacatttatgaagca

SEQ ID NO: 12909 - DNA, 2490 bp, Homo sapiens
gcgctgccgttatcttcaagaccctcccaccttaccgagctccaggaccggagatgaggagctgagcacaacatgccaacactcgaggggcccacgacagttgctcaagagccatttcgggaataggctgctaggccctggagacagtgaggacttgaactgcagcactcctgtcagacccctggatgtggttccccccgcgtcccacagctaatgactaagctgggaaccgaaagatggaatctagattctcctaagccaaggtttttcccccaactagtgtatatcccagaaagcttggaagagccaagtgctggagagatggtgacagcaggttgtcaggtagtttgagctccctaaaagaggaaggtggactctacagggacaaacagttggatgctgcaatagcatggcaggggaagctcaccacacacaaagaggaactctatcccaagaacccttatctccaagactttctgagtgcagagggagtgctgagtagtgatggtgtctggagggtcaaatccattcccaatggcaaaggttcctcaccactccccaccgctacaactccaaaaccacttatccctacagaggccagcatcagggtctggtcagacttcctcagagtccatctccatccccggagcatctgtatgattcagaagtacaaccacgatggggaagcaggtcggctggaggcttttggccaaggggaaagtgtcctaaaggaacccaagtaccaggaagagctggaggacaggctgcatttctacgtggaggaatgtgactacttgcagggcttccagatcctgtgtgacctgcacgatggcttctctggggtaggcgcgaaggcggcagagctgctacaagatgaatattcagggcggggaataataacctggggcctgctacctggtccctaccatcgtggggaggcccagagaaacatctatcgtctattaaacacagcttttggtctcgtgcacctgactgctcacagctctcttgtctgccccttgtccttgggtgggagcctgggcctgcgacccgagccacctgtcagcttcccttacctgcattatgatgccactctgcccttccactgcagtgccatcctggctacagccctggacacagtcactgttccttatcgcctgtgttcctctccagtttccatggttcatctggctgacatgctgagcttctgtgggaaaaaggtggtgacagcaggagcaatcatccctttccccttggctccaggccagtcccttcctgattccctgatgcagtttggaggagccaccccatggaccccactgtctgcatgtggggagccttctggaacacgttgctttgcccagtcagtggtgctgaggggtatagacagagcatgccacacaagccagctcaccccagggacacctccaccctctgcccttcatgcatgtaccactggggaagaaatcttggctcagtatttacaacagcagcagcctggagtcatgagttcttcccatctgctgctgactccctgcagggtggctcctccttacccccacctcttctcaagctgcagtccaccgggtatggttctggatggttcccccaagggagcagtggagagcatcccagtgtttggggcactgtgttcctcttcgtccctgcaccagaccctggaagccttggccagagacctcaccaaactcgacttgcggcgctgggccagcttcatggatgctggagtggagcacgatgacgtagcagagctgctgcaggagctacaaagcctggcccagtgctaccagggtggtgacagcctcgtggactaaagttcccagtgtgggagaaaggagctagtttgcaataaaaacagctggatgcaggagcccagtgtcttcatgcagaggagctcaatgtcgcgggactagctacaccaacatatgcactttttacatttagaaacactgtgattagaccacagaacaataaatatgtgccatcagaccaaaaaaaagtagagaaaggagctgaactccactctcgatgctacttacagaggacatctgtaaagtcttcataaaagaccttgaatgatgcctaggatggcagagcccctgggtcctactccatcctccagcctttgtccttgtcctggcctcctgctctccagatctgtaaactgggctcaaggactgtacaagcagagtacaactacccgcctccccggtgccagggcgcctgttgggtttggtcctgtgtagatgattcccagagtctcattcatccagctcctcttcagacagaaggtccccatggtcagacagctggtctgcattgctggtactggttgcatcatcctcatcctcagagctggcttcacaggcagtgtggaagagctgcatgagttctcgaaaatggtgggaaacctaagaaaggaggagggctgtattcactgatccttagtaacatgttaacatttatgaagca

SEQ ID NO: 12910 - DNA, 2080 bp, Homo sapiens
ccgggaggtgctcacactgcagttgggacattttgccggtttcgtgggcgcgcactggtggaaccagcaggtgaggtcagccggcagctgcccccgaggagcccttcgggatctacagtcccgacgttcagccggcctgcctcgtcctctctgcttccccaggatgctgcgctgggccgagcgaccgattccaaggagcccccgggagagctgtgccccgacgtcctgtatcgtacgggccggacgctgcacggccaggagacctacacgccgcgactcatcctcatggatctgaagggtgaggtggtggcagagttagccgatgccccttatttcccttccgcgtgcctagtccttgcgctgccgttatcttcaagaccctcccaccttaccgagctccaggaccggagatgaggagctgagcacaacatgccaacactcgaggggcccacgacagttgctcaagagccatttcgggaataggctgctaggccctggagacagtgaggacttgaactgcagcactcctgtcagacccctggatgtggttccccccgcgtcccacagctaatgactaagctgggaaccgaaagatggaatctagattctcctaagccaaggtttttcccccaactagtgtatatcccagaaagcttggaagagccaagtgctggagagatggtgacagcaggttgtcaggtgatcagaggaaggttagctagaggggaagggtgcccaggctttgacctaacattgtctctgttatttctgtacaggtagtttgagctccctaaaagaggaaggtggactctacagggacaaacagttggatgctgcaatagcatggtgtgtaactgatgtatggataagggtggggatcgtgtatgtacgcagaacgctggataactctgatcagagtgcagtttctttgatcaatctccaaactctttcaggcaggggaagctcaccacacacaaagaggaactctatcccaagaacccttatctccaagactttctgagtgcagaggtgagggcctctgtcctgaactttttaacccggtgccacaacccgagggtctccataggggcaggtaaacggggattttaatcattttaagtgtcttagaatgatattttgggaaaaagcactccttttcctaaggactgcgactcggtgaacagaaaggaggctatgcggtgtggccagccaactcaaggaggacgaagcaacctttgcctctaaactgcctggaactaaatgtcgatttttctgacccctcccagggagtgctgagtagtgatggtgtctggagggtcaaatccattcccaatggcaaaggtgagacttctccagatactgatggatgggggcttgggtagagcagaaacatggagaaaggtacatttcctctgcttgtcttcaggttcctcaccactccccaccgctacaactccaaaaccacttatccctacagaggccagcatcagggtctggtcagacttcctcagagtccatctccatccccggagcatctgtatgattcagaagtacaaccacgatgggtatggggaccccagaggctttgaggcaagaaacatgggtccccaccaatgcaggatgaggctcttgaggccatcttccctgcccttccccaggacaagaggctgaggagttgagggaagagatgtaagtcttggatcatgtttacttgtggcagggaagcaggtcggctggaggcttttggccaaggggaaagtgtcctaaaggaacccaagtaccaggaagagctggaggacaggctgcatttctacgtggaggaatgtgactacttgcaggtagtggcgtggcaatgtgcactccagggtggaagctcttctcatcctgctaactatcttttgtcactcacccccgtccagggcttccagatcctgtgtgacctgcacgatggcttctctggggtaggcgcgaaggcggcagagctgctacaagatgaatattcagggcggggaataataacctggggcctgctacctggtccctaccatcgtggggtgagtggaacttagagaagtaaaca

SEQ ID NO: 12911 - DNA, 781 bp, Homo sapiens
ccgggaggtgctcacactgcagttgggacattttgccggtttcgtgggcgcgcactggtggaaccagcaggatgctgcgctgggccgagcgaccgattccaaggagcccccgggagagctgtgccccgacgtcctgtatcgtacgggccggacgctgcacggccaggagacctacacgccgcgactcatcctcatggatctgaagggtagtttgagctccctaaaagaggaaggtggactctacagggacaaacagttggatgctgcaatagcatggcaggggaagctcaccacacacaaagaggaactctatcccaagaacccttatctccaagactttctgagtgcagagaggccagcatcagggtctggtcagacttcctcagagtccatctccatccccggagcatctgtatgattcagaagtacaaccacgatgggacaagaggctgaggagttgagggaagagatgtaagtcttggatcatgtttacttgtggcagggaagcaggtcggctggaggcttttggccaaggggaaagtgtcctaaaggaacccaagtaccaggaagagctggaggacaggctgcatttctacgtggaggaatgtgactacttgcagggcttccagatcctgtgtgacctgcacgatggcttctctggggtaggcgcgaaggcggcagagctgctacaagatgaatattcagggcggggaataataacctggggcctgctacctggtccctaccatcgtggggtgagtggaacttagagaagtaaaca

SEQ ID NO: 12912 - DNA, 2112 bp, Homo sapiens
gagcggcgcggctgaggcgcggcggccccgtggagcagcgcagtatggcgggcggggcccgggaggtgctcacactgcagttgggacattttgccggtttcgtgggcgcgcactggtggaaccagcaggtgaggtcagccggcagctgcccccgaggagcccttcgggatctacagtcccgacgttcagccggcctgcctcgtcctctctgcttccccaggatgctgcgctgggccgagcgaccgattccaaggagcccccgggagagctgtgccccgacgtcctgtatcgtacgggccggacgctgcacggccaggagacctacacgccgcgactcatcctcatggatctgaagggtgaggtggtggcagagttagccgatgccccttatttcccttccgcgtgcctagtccttgcgctgccgttatcttcaagaccctcccaccttaccgagctccaggaccggagatgaggagctgagcacaacatgccaacactcgaggggcccacgacagttgctcaagagccatttcgggaataggctgctaggccctggagacagtgaggacttgaactgcagcactcctgtcagacccctggatgtggttccccccgcgtcccacagctaatgactaagctgggaaccgaaagatggaatctagattctcctaagccaaggtttttcccccaactagtgtatatcccagaaagcttggaagagccaagtgctggagagatggtgacagcaggttgtcaggtgatcagaggaaggttagctagaggggaagggtgcccaggctttgacctaacattgtctctgttatttctgtacaggtagtttgagctccctaaaagaggaaggtggactctacagggacaaacagttggatgctgcaatagcatggtgtgtaactgatgtatggataagggtggggatcgtgtatgtacgcagaacgctggataactctgatcagagtgcagtttctttgatcaatctccaaactctttcaggcaggggaagctcaccacacacaaagaggaactctatcccaagaacccttatctccaagactttctgagtgcagaggtgagggcctctgtcctgaactttttaacccggtgccacaacccgagggtctccataggggcaggtaaacggggattttaatcattttaagtgtcttagaatgatattttgggaaaaagcactccttttcctaaggactgcgactcggtgaacagaaaggaggctatgcggtgtggccagccaactcaaggaggacgaagcaacctttgcctctaaactgcctggaactaaatgtcgatttttctgacccctcccagggagtgctgagtagtgatggtgtctggagggtcaaatccattcccaatggcaaaggtgagacttctccagatactgatggatgggggcttgggtagagcagaaacatggagaaaggtacatttcctctgcttgtcttcaggttcctcaccactccccaccgctacaactccaaaaccacttatccctacagaggccagcatcagggtctggtcagacttcctcagagtccatctccatccccggagcatctgtatgattcagaagtacaaccacgatgggtatggggaccccagaggctttgaggcaagaaacatgggtccccaccaatgcaggatgaggctcttgaggccatcttccctgcccttccccaggacaagaggctgaggagttgagggaagagatgtaagtcttggatcatgtttacttgtggcagggaagcaggtcggctggaggcttttggccaaggggaaagtgtcctaaaggaacccaagtaccaggaagagctggaggacaggctgcatttctacgtggaggaatgtgactacttgcaggtagtggcgtggcaatgtgcactccagggtggaagctcttctcatcctgctaactatcttttgtcactcacccccgtccagggcttccagatcctgtgtgacctgcacgatggcttctctggggtaggcgcgaaggcggcagagctgctacaagatgaatattcagggcggggaataataacctggggcctgctacctggtccctaccatcgtggg

SEQ ID NO: 12913 - DNA, 983 bp, Homo sapiens
gagcggcgcggctgaggcgcggcggccccgtggagcagcgcagtatggcgggcggggcccgggaggtgctcacactgcagttgggacattttgccggtttcgtgggcgcgcactggtggaaccagcaggatgctgcgctgggccgagcgaccgattccaaggagcccccgggagagctgtgccccgacgtcctgtatcgtacgggccggacgctgcacggccaggagacctacacgccgcgactcatcctcatggatctgaagggtagtttgagctccctaaaagaggaaggtggactctacagggacaaacagttggatgctgcaatagcatggcaggggaagctcaccacacacaaagaggaactctatcccaagaacccttatctccaagactttctgagtgcagaggtgagggcctctgtcctgaactttttaacccggtgccacaacccgagggtctccataggggcagggagtgctgagtagtgatggtgtctggagggtcaaatccattcccaatggcaaaggttcctcaccactccccaccgctacaactccaaaaccacttatccctacagaggccagcatcagggtctggtcagacttcctcagagtccatctccatccccggagcatctgtatgattcagaagtacaaccacgatgggacaagaggctgaggagttgagggaagagatgtaagtcttggatcatgtttacttgtggcagggaagcaggtcggctggaggcttttggccaaggggaaagtgtcctaaaggaacccaagtaccaggaagagctggaggacaggctgcatttctacgtggaggaatgtgactacttgcagggcttccagatcctgtgtgacctgcacgatggcttctctggggtaggcgcgaaggcggcagagctgctacaagatgaatattcagggcggggaataataacctggggcctgctacctggtccctaccatcgtggg

SEQ ID NO: 12914 - DNA, 1337 bp, Homo sapiens
gcagtatggcgggcggggcccgggaggtgctcacactgcagttgggacattttgccggtttcgtgggcgcgcactggtggaaccagcaggtgaggtcagccggcagctgcccccgaggagcccttcgggatctacagtcccgacgttcagccggcctgcctcgtcctctctgcttccccaggatgctgcgctgggccgagcgaccgattccaaggagcccccgggagagctgtgccccgacgtcctgtatcgtacgggccggacgctgcacggccaggagacctacacgccgcgactcatcctcatggatctgaagggtgaggtggtggcagagttagccgatgccccttatttcccttccgcgtgcctagtccttgcgctgccgttatcttcaagaccctcccaccttaccgagctccaggaccggagatgaggagctgagcacaacatgccaacactcgaggggcccacgacagttgctcaagagccatttcgggaataggctgctaggccctggagacagtgaggacttgaactgcagcactcctgtcagacccctggatgtggttccccccgcgtcccacagctaatgactaagctgggaaccgaaagatggaatctagattctcctaagccaaggtttttcccccaactagtgtatatcccagaaagcttggaagagccaagtgctggagagatggtgacagcaggttgtcaggtgatcagaggaaggttagctagaggggaagggtgcccaggctttgacctaacattgtctctgttatttctgtacaggtagtttgagctccctaaaagaggaaggtggactctacagggacaaacagttggatgctgcaatagcatggtgtgtaactgatgtatggataagggtggggatcgtgtatgtacgcagaacgctggataactctgatcagagtgcagtttctttgatcaatctccaaactctttcaggcaggggaagctcaccacacacaaagaggaactctatcccaagaacccttatctccaagactttctgagtgcagaggtgagggcctctgtcctgaactttttaacccggtgccacaacccgagggtctccataggggcaggtaaacggggattttaatcattttaagtgtcttagaatgatattttgggaaaaagcactccttttcctaaggactgcgactcggtgaacagaaaggaggctatgcggtgtggccagccaactcaaggaggacgaagcaacctttgcctctaaactgcctggaactaaatgtcgatttttctgacccctcccagggagtgctgagtagtgatggtgtctggagggt

SEQ ID NO: 12915 - DNA, 541 bp, Homo sapiens
gcagtatggcgggcggggcccgggaggtgctcacactgcagttgggacattttgccggtttcgtgggcgcgcactggtggaaccagcaggatgctgcgctgggccgagcgaccgattccaaggagcccccgggagagctgtgccccgacgtcctgtatcgtacgggccggacgctgcacggccaggagacctacacgccgcgactcatcctcatggatctgaagggtagtttgagctccctaaaagaggaaggtggactctacagggacaaacagttggatgctgcaatagcatggcaggggaagctcaccacacacaaagaggaactctatcccaagaacccttatctccaagactttctgagtgcagagcactccttttcctaaggactgcgactcggtgaacagaaaggaggctatgcggtgtggccagccaactcaaggaggacgaagcaacctttgcctctaaactgcctggaactaaatgtcgatttttctgacccctcccagggagtgctgagtagtgatggtgtctggagggt

SEQ ID NO: 12916 - DNA, 4734 bp, Homo sapiens
gaggcgcggcggccccgtggagcagcgcagtatggcgggcggggcccgggaggtgctcacactgcagttgggacattttgccggtttcgtgggcgcgcactggtggaaccagcaggtgaggtcagccggcagctgcccccgaggagcccttcgggatctacagtcccgacgttcagccggcctgcctcgtcctctctgcttccccaggatgctgcgctgggccgagcgaccgattccaaggagcccccgggagagctgtgccccgacgtcctgtatcgtacgggccggacgctgcacggccaggagacctacacgccgcgactcatcctcatggatctgaagggtgaggtggtggcagagttagccgatgccccttatttcccttccgcgtgcctagtccttgcgctgccgttatcttcaagaccctcccaccttaccgagctccaggaccggagatgaggagctgagcacaacatgccaacactcgaggggcccacgacagttgctcaagagccatttcgggaataggctgctaggccctggagacagtgaggacttgaactgcagcactcctgtcagacccctggatgtggttccccccgcgtcccacagctaatgactaagctgggaaccgaaagatggaatctagattctcctaagccaaggtttttcccccaactagtgtatatcccagaaagcttggaagagccaagtgctggagagatggtgacagcaggttgtcaggtgatcagaggaaggttagctagaggggaagggtgcccaggctttgacctaacattgtctctgttatttctgtacaggtagtttgagctccctaaaagaggaaggtggactctacagggacaaacagttggatgctgcaatagcatggtgtgtaactgatgtatggataagggtggggatcgtgtatgtacgcagaacgctggataactctgatcagagtgcagtttctttgatcaatctccaaactctttcaggcaggggaagctcaccacacacaaagaggaactctatcccaagaacccttatctccaagactttctgagtgcagaggtgagggcctctgtcctgaactttttaacccggtgccacaacccgagggtctccataggggcaggtaaacggggattttaatcattttaagtgtcttagaatgatattttgggaaaaagcactccttttcctaaggactgcgactcggtgaacagaaaggaggctatgcggtgtggccagccaactcaaggaggacgaagcaacctttgcctctaaactgcctggaactaaatgtcgatttttctgacccctcccagggagtgctgagtagtgatggtgtctggagggtcaaatccattcccaatggcaaaggtgagacttctccagatactgatggatgggggcttgggtagagcagaaacatggagaaaggtacatttcctctgcttgtcttcaggttcctcaccactccccaccgctacaactccaaaaccacttatccctacagaggccagcatcagggtctggtcagacttcctcagagtccatctccatccccggagcatctgtatgattcagaagtacaaccacgatgggtatggggaccccagaggctttgaggcaagaaacatgggtccccaccaatgcaggatgaggctcttgaggccatcttccctgcccttccccaggacaagaggctgaggagttgagggaagagatgtaagtcttggatcatgtttacttgtggcagggaagcaggtcggctggaggcttttggccaaggggaaagtgtcctaaaggaacccaagtaccaggaagagctggaggacaggctgcatttctacgtggaggaatgtgactacttgcaggtagtggcgtggcaatgtgcactccagggtggaagctcttctcatcctgctaactatcttttgtcactcacccccgtccagggcttccagatcctgtgtgacctgcacgatggcttctctggggtaggcgcgaaggcggcagagctgctacaagatgaatattcagggcggggaataataacctggggcctgctacctggtccctaccatcgtggggtgagtggaacttagagaagtaaacagtcacacagtggggagggagaaatcagaatcccagtgggagagctgcttaatacaaactactctttcttcaccaggaggcccagagaaacatctatcgtctattaaacacagcttttggtctcgtgcacctgactgctcacagctctcttgtctgccccttgtccttgggtgggagcctgggcctgcgacccgagccacctgtcagcttcccttacctgcattatgatgtaagtctcggtgctcttgttctgactgcggcaggctacagggcctcctcatgctcccagtcagccgctgtctgttactggctctgttcttgaggcccgagcttgaactcagctgtgatgtggcctctcagatcacactgtcctatgcttgtccagcctggggtcaaacatacccctgattcgtcccctgggtctctctggtgttaatattctgcctccacacattcttttccaggcctgaggccaagtgcccatcttggtgtcttcttacaggccactctgcccttccactgcagtgccatcctggctacagccctggacacagtcactgttccttatcgcctgtgttcctctccagtttccatggttcatctggctgacatgctgagcttctgtgggaaaaaggtatgaagctttgtaaggggttgggtcagtgctgagaaaatgtcctataacgtgttctcttccatctctttaggtggtgacagcaggagcaatcatccctttccccttggctccaggccagtcccttcctgattccctgatgcagtttggaggagccaccccatggaccccactgtctgcatgtggggagccttctggaacacgttgctttgcccagtcagtggtgctgaggggtatagacagagcatgccacacaaggtgagagctgttggtccttaggagtccttgtcagatttttgtctcatatccatcttcccctaatttctctggggcattctaatgatactgttccctccccaccccttaaaaaggaaaaaaaaaagggctttgaatatcttgatccagctgatggcctgagaacataagaattctgtttcttattcatgcagccacagactaatggtggttttggctttgttctggcagccagctcaccccagggacacctccaccctctgcccttcatgcatgtaccactggggaagaaatcttggctcagtatttacaacagcagcagcctggagtcatgaggtcagtgtaacggttgctcctgcccttcttgccaaccgcaaccctcccttgacttcttacgcacttaatggctgttctctgcccccacagttcttcccatctgctgctgactccctgcagggtggctcctccttacccccacctcttctcaagctgcagtccaccgggtatggttctggatggttcccccaagggagcaggtatgtaggaggtgaagaaaactgagatttcaagtatgggagagtttttactatctccattcctggattaaaagtgctgaaaaagtccacagttaaacattcctttattcaccctatggctcccaagaaaagcattcttcctctggagtactggtgtactaaggggacaatacaccaaatttgttgagtttacaatcaagtctactaaggttggacttccttatcagtttggcagagtcccagggcagaataatcatccatctacaggtctctgtttcctctccctccacagcagtggagagcatcccagtgtttggggcactgtgttcctcttcgtccctgcaccagaccctggaagccttggccagagacctcaccaaactcgacttgcggcgctgggccagcttcatggatgctggagtggagcacgatgacgtagcagagctgctgcaggagctacaaagcctggcccagtgctaccagggtggtgacagcctcgtggactaaagttcccagtgtgggagaaaggagctagtttgcaataaaaacagctggatgcaggagcccagtgtcttcatgcagaggagctcaatgtcgcgggactagctacaccaacatatgcactttttacatttagaaacactgtgattagaccacagaacaataaatatgtgccatcagaccaaaaaaaagtagagaaaggagctgaactccactctcgatgctacttacagaggacatctgtaaagtcttcataaaagaccttgaatgatgcctaggatggcagagcccctgggtcctactccatcctccagcctttgtccttgtcctggcctcctgctctccagatctgtaaactgggctcaaggactgtacaagcagagtacaactacccgcctccccggtgccagggcgcctgttgggtttggtcctgtgtagatgattcccagagtctcattcatccagctcctcttcagacagaaggtccccatggtcagacagctggtctgcattgctggtactggttgcatcatcctcatcctcagagctggcttcacaggcagtgtggaagagctgcatgagttctcgaaaatggtgggaaacctaagaaaggaggagggctgtattcactgatccttagtaacatgttaacatttatgaagcactatatattgatttgcaaaa

SEQ ID NO: 12917 - DNA, 2346 bp, Homo sapiens
gaggcgcggcggccccgtggagcagcgcagtatggcgggcggggcccgggaggtgctcacactgcagttgggacattttgccggtttcgtgggcgcgcactggtggaaccagcaggatgctgcgctgggccgagcgaccgattccaaggagcccccgggagagctgtgccccgacgtcctgtatcgtacgggccggacgctgcacggccaggagacctacacgccgcgactcatcctcatggatctgaagggtagtttgagctccctaaaagaggaaggtggactctacagggacaaacagttggatgctgcaatagcatgggagtgctgagtagtgatggtgtctggagggtcaaatccattcccaatggcaaaggttcctcaccactccccaccgctacaactccaaaaccacttatccctacagaggccagcatcagggtctggtcagacttcctcagagtccatctccatccccggagcatctgtatgattcagaagtacaaccacgatggggaagcaggtcggctggaggcttttggccaaggggaaagtgtcctaaaggaacccaagtaccaggaagagctggaggacaggctgcatttctacgtggaggaatgtgactacttgcagggcttccagatcctgtgtgacctgcacgatggcttctctggggtaggcgcgaaggcggcagagctgctacaagatgaatattcagggcggggaataataacctggggcctgctacctggtccctaccatcgtggggaggcccagagaaacatctatcgtctattaaacacagcttttggtctcgtgcacctgactgctcacagctctcttgtctgccccttgtccttgggtgggagcctgggcctgcgacccgagccacctgtcagcttcccttacctgcattatgatgccactctgcccttccactgcagtgccatcctggctacagccctggacacagtcactgttccttatcgcctgtgttcctctccagtttccatggttcatctggctgacatgctgagcttctgtgggaaaaaggtggtgacagcaggagcaatcatccctttccccttggctccaggccagtcccttcctgattccctgatgcagtttggaggagccaccccatggaccccactgtctgcatgtggggagccttctggaacacgttgctttgcccagtcagtggtgctgaggggtatagacagagcatgccacacaagccagctcaccccagggacacctccaccctctgcccttcatgcatgtaccactggggaagaaatcttggctcagtatttacaacagcagcagcctggagtcatgagttcttcccatctgctgctgactccctgcagggtggctcctccttacccccacctcttctcaagctgcagtccaccgggtatggttctggatggttcccccaagggagcagcagtggagagcatcccagtgtttggggcactgtgttcctcttcgtccctgcaccagaccctggaagccttggccagagacctcaccaaactcgacttgcggcgctgggccagcttcatggatgctggagtggagcacgatgacgtagcagagctgctgcaggagctacaaagcctggcccagtgctaccagggtggtgacagcctcgtggactaaagttcccagtgtgggagaaaggagctagtttgcaataaaaacagctggatgcaggagcccagtgtcttcatgcagaggagctcaatgtcgcgggactagctacaccaacatatgcactttttacatttagaaacactgtgattagaccacagaacaataaatatgtgccatcagaccaaaaaaaagtagagaaaggagctgaactccactctcgatgctacttacagaggacatctgtaaagtcttcataaaagaccttgaatgatgcctaggatggcagagcccctgggtcctactccatcctccagcctttgtccttgtcctggcctcctgctctccagatctgtaaactgggctcaaggactgtacaagcagagtacaactacccgcctccccggtgccagggcgcctgttgggtttggtcctgtgtagatgattcccagagtctcattcatccagctcctcttcagacagaaggtccccatggtcagacagctggtctgcattgctggtactggttgcatcatcctcatcctcagagctggcttcacaggcagtgtggaagagctgcatgagttctcgaaaatggtgggaaacctaagaaaggaggagggctgtattcactgatccttagtaacatgttaacatttatgaagcactatatattgatttgcaaaa

SEQ ID NO: 12918 - DNA, 2229 bp, Homo sapiens
gggcggggcccgggaggtgctcacactgcagttgggacattttgccggtttcgtgggcgcgcactggtggaaccagcaggtgaggtcagccggcagctgcccccgaggagcccttcgggatctacagtcccgacgttcagccggcctgcctcgtcctctctgcttccccaggatgctgcgctgggccgagcgaccgattccaaggagcccccgggagagctgtgccccgacgtcctgtatcgtacgggccggacgctgcacggccaggagacctacacgccgcgactcatcctcatggatctgaagggtgaggtggtggcagagttagccgatgccccttatttcccttccgcgtgcctagtccttgcgctgccgttatcttcaagaccctcccaccttaccgagctccaggaccggagatgaggagctgagcacaacatgccaacactcgaggggcccacgacagttgctcaagagccatttcgggaataggctgctaggccctggagacagtgaggacttgaactgcagcactcctgtcagacccctggatgtggttccccccgcgtcccacagctaatgactaagctgggaaccgaaagatggaatctagattctcctaagccaaggtttttcccccaactagtgtatatcccagaaagcttggaagagccaagtgctggagagatggtgacagcaggttgtcaggtgatcagaggaaggttagctagaggggaagggtgcccaggctttgacctaacattgtctctgttatttctgtacaggtagtttgagctccctaaaagaggaaggtggactctacagggacaaacagttggatgctgcaatagcatggtgtgtaactgatgtatggataagggtggggatcgtgtatgtacgcagaacgctggataactctgatcagagtgcagtttctttgatcaatctccaaactctttcaggcaggggaagctcaccacacacaaagaggaactctatcccaagaacccttatctccaagactttctgagtgcagaggtgagggcctctgtcctgaactttttaacccggtgccacaacccgagggtctccataggggcaggtaaacggggattttaatcattttaagtgtcttagaatgatattttgggaaaaagcactccttttcctaaggactgcgactcggtgaacagaaaggaggctatgcggtgtggccagccaactcaaggaggacgaagcaacctttgcctctaaactgcctggaactaaatgtcgatttttctgacccctcccagggagtgctgagtagtgatggtgtctggagggtcaaatccattcccaatggcaaaggtgagacttctccagatactgatggatgggggcttgggtagagcagaaacatggagaaaggtacatttcctctgcttgtcttcaggttcctcaccactccccaccgctacaactccaaaaccacttatccctacagaggccagcatcagggtctggtcagacttcctcagagtccatctccatccccggagcatctgtatgattcagaagtacaaccacgatgggtatggggaccccagaggctttgaggcaagaaacatgggtccccaccaatgcaggatgaggctcttgaggccatcttccctgcccttccccaggacaagaggctgaggagttgagggaagagatgtaagtcttggatcatgtttacttgtggcagggaagcaggtcggctggaggcttttggccaaggggaaagtgtcctaaaggaacccaagtaccaggaagagctggaggacaggctgcatttctacgtggaggaatgtgactacttgcaggtagtggcgtggcaatgtgcactccagggtggaagctcttctcatcctgctaactatcttttgtcactcacccccgtccagggcttccagatcctgtgtgacctgcacgatggcttctctggggtaggcgcgaaggcggcagagctgctacaagatgaatattcagggcggggaataataacctggggcctgctacctggtccctaccatcgtggggtgagtggaacttagagaagtaaacagtcacacagtggggagggagaaatcagaatcccagtgggagagctgcttaatacaaactactctttcttcaccaggaggcccagagaaacatctatcgtctattaaacacagcttttggtctcgtgcacctgactgctca

SEQ ID NO: 12919 - DNA, 904 bp, Homo sapiens
gggcggggcccgggaggtgctcacactgcagttgggacattttgccggtttcgtgggcgcgcactggtggaaccagcagccggcctgcctcgtcctctctgcttccccaggatgctgcgctgggccgagcgaccgattccaaggagcccccgggagagctgtgccccgacgtcctgtatcgtacgggccggacgctgcacggccaggagacctacacgccgcgactcatcctcatggatctgaagggtagtttgagctccctaaaagaggaaggtggactctacagggacaaacagttggatgctgcaatagcatggcaggggaagctcaccacacacaaagaggaactctatcccaagaacccttatctccaagactttctgagtgcagagggagtgctgagtagtgatggtgtctggagggtcaaatccattcccaatggcaaaggttcctcaccactccccaccgctacaactccaaaaccacttatccctacagaggccagcatcagggtctggtcagacttcctcagagtccatctccatccccggagcatctgtatgattcagaagtacaaccacgatggggaagcaggtcggctggaggcttttggccaaggggaaagtgtcctaaaggaacccaagtaccaggaagagctggaggacaggctgcatttctacgtggaggaatgtgactacttgcagggcttccagatcctgtgtgacctgcacgatggcttctctggggtaggcgcgaaggcggcagagctgctacaagatgaatattcagggcggggaataataacctggggcctgctacctggtccctaccatcgtggggaggcccagagaaacatctatcgtctattaaacacagcttttggtctcgtgcacctgactgctca

SEQ ID NO: 12920 - DNA, 4695 bp, Homo sapiens; identical to SEQ ID NO: 12888

SEQ ID NO: 12921 - DNA, 2406 bp, Homo sapiens
agcgcagtatggcgggcggggcccgggaggtgctcacactgcagttgggacattttgccggtttcgtgggcgcgcactggtggaaccagcaggtgaggtcagccggcagctgcccccgaggagcccttcgggatctacagtcccgacgttcagccggcctgcctcgtcctctctgcttccccaggatgctgcgctgggccgagcgaccgattccaaggagcccccgggagagctgtgccccgacgtcctgtatcgtacgggccggacgctgcacggccaggagacctacacgccgcgactcatcctcatggatctgaagggtagtttgagctccctaaaagaggaaggtggactctacagggacaaacagttggatgctgcaatagcatggcaggggaagctcaccacacacaaagaggaactctatcccaagaacccttatctccaagactttctgagtgcagagaggccagcatcagggtctggtcagacttcctcagagtccatctccatccccggagcatctgtatgattcagaagtacaaccacgatggggaagcaggtcggctggaggcttttggccaaggggaaagtgtcctaaaggaacccaagtaccaggaagagctggaggacaggctgcatttctacgtggaggaatgtgactacttgcagggcttccagatcctgtgtgacctgcacgatggcttctctggggtaggcgcgaaggcggcagagctgctacaagatgaatattcagggcggggaataataacctggggcctgctacctggtccctaccatcgtggggaggcccagagaaacatctatcgtctattaaacacagcttttggtctcgtgcacctgactgctcacagctctcttgtctgccccttgtccttgggtgggagcctgggcctgcgacccgagccacctgtcagcttcccttacctgcattatgatgccactctgcccttccactgcagtgccatcctggctacagccctggacacagtcactgttccttatcgcctgtgttcctctccagtttccatggttcatctggctgacatgctgagcttctgtgggaaaaaggtggtgacagcaggagcaatcatccctttccccttggctccaggccagtcccttcctgattccctgatgcagtttggaggagccaccccatggaccccactgtctgcatgtggggagccttctggaacacgttgctttgcccagtcagtggtgctgaggggtatagacagagcatgccacacaagccacagactaatggtggttttggctttgttctggcagccagctcaccccagggacacctccaccctctgcccttcatgcatgtaccactggggaagaaatcttggctcagtatttacaacagcagcagcctggagtcatgagttcttcccatctgctgctgactccctgcagggtggctcctccttacccccacctcttctcaagctgcagtccaccgggtatggttctggatggttcccccaagggagcagcagtggagagcatcccagtgtttggggcactgtgttcctcttcgtccctgcaccagaccctggaagccttggccagagacctcaccaaactcgacttgcggcgctgggccagcttcatggatgctggagtggagcacgatgacgtagcagagctgctgcaggagctacaaagcctggcccagtgctaccagggtggtgacagcctcgtggactaaagttcccagtgtgggagaaaggagctagtttgcaataaaaacagctggatgcaggagcccagtgtcttcatgcagaggagctcaatgtcgcgggactagctacaccaacatatgcactttttacatttagaaacactgtgattagaccacagaacaataaatatgtgccatcagaccaaaaaaaagtagagaaaggagctgaactccactctcgatgctacttacagaggacatctgtaaagtcttcataaaagaccttgaatgatgcctaggatggcagagcccctgggtcctactccatcctccagcctttgtccttgtcctggcctcctgctctccagatctgtaaactgggctcaaggactgtacaagcagagtacaactacccgcctccccggtgccagggcgcctgttgggtttggtcctgtgtagatgattcccagagtctcattcatccagctcctcttcagacagaaggtccccatggtcagacagctggtctgcattgctggtactggttgcatcatcctcatcctcagagctggcttcacaggcagtgtggaagagctgcatgagttctcgaaaatggtgggaaacctaagaaaggaggagggctgtattcactgatccttagtaacatgttaacatttatgaagcactat

SEQ ID NO: 12922 - DNA, 4716 bp, Homo sapiens
gaggcgcggcggccccgtggagcagcgcagtatggcgggcggggcccgggaggtgctcacactgcagttgggacattttgccggtttcgtgggcgcgcactggtggaaccagcaggtgaggtcagccggcagctgcccccgaggagcccttcgggatctacagtcccgacgttcagccggcctgcctcgtcctctctgcttccccaggatgctgcgctgggccgagcgaccgattccaaggagcccccgggagagctgtgccccgacgtcctgtatcgtacgggccggacgctgcacggccaggagacctacacgccgcgactcatcctcatggatctgaagggtgaggtggtggcagagttagccgatgccccttatttcccttccgcgtgcctagtccttgcgctgccgttatcttcaagaccctcccaccttaccgagctccaggaccggagatgaggagctgagcacaacatgccaacactcgaggggcccacgacagttgctcaagagccatttcgggaataggctgctaggccctggagacagtgaggacttgaactgcagcactcctgtcagacccctggatgtggttccccccgcgtcccacagctaatgactaagctgggaaccgaaagatggaatctagattctcctaagccaaggtttttcccccaactagtgtatatcccagaaagcttggaagagccaagtgctggagagatggtgacagcaggttgtcaggtgatcagaggaaggttagctagaggggaagggtgcccaggctttgacctaacattgtctctgttatttctgtacaggtagtttgagctccctaaaagaggaaggtggactctacagggacaaacagttggatgctgcaatagcatggtgtgtaactgatgtatggataagggtggggatcgtgtatgtacgcagaacgctggataactctgatcagagtgcagtttctttgatcaatctccaaactctttcaggcaggggaagctcaccacacacaaagaggaactctatcccaagaacccttatctccaagactttctgagtgcagaggtgagggcctctgtcctgaactttttaacccggtgccacaacccgagggtctccataggggcaggtaaacggggattttaatcattttaagtgtcttagaatgatattttgggaaaaagcactccttttcctaaggactgcgactcggtgaacagaaaggaggctatgcggtgtggccagccaactcaaggaggacgaagcaacctttgcctctaaactgcctggaactaaatgtcgatttttctgacccctcccagggagtgctgagtagtgatggtgtctggagggtcaaatccattcccaatggcaaaggtgagacttctccagatactgatggatgggggcttgggtagagcagaaacatggagaaaggtacatttcctctgcttgtcttcaggttcctcaccactccccaccgctacaactccaaaaccacttatccctacagaggccagcatcagggtctggtcagacttcctcagagtccatctccatccccggagcatctgtatgattcagaagtacaaccacgatgggtatggggaccccagaggctttgaggcaagaaacatgggtccccaccaatgcaggatgaggctcttgaggccatcttccctgcccttccccaggacaagaggctgaggagttgagggaagagatgtaagtcttggatcatgtttacttgtggcagggaagcaggtcggctggaggcttttggccaaggggaaagtgtcctaaaggaacccaagtaccaggaagagctggaggacaggctgcatttctacgtggaggaatgtgactacttgcaggtagtggcgtggcaatgtgcactccagggtggaagctcttctcatcctgctaactatcttttgtcactcacccccgtccagggcttccagatcctgtgtgacctgcacgatggcttctctggggtaggcgcgaaggcggcagagctgctacaagatgaatattcagggcggggaataataacctggggcctgctacctggtccctaccatcgtggggtgagtggaacttagagaagtaaacagtcacacagtggggagggagaaatcagaatcccagtgggagagctgcttaatacaaactactctttcttcaccaggaggcccagagaaacatctatcgtctattaaacacagcttttggtctcgtgcacctgactgctcacagctctcttgtctgccccttgtccttgggtgggagcctgggcctgcgacccgagccacctgtcagcttcccttacctgcattatgatgtaagtctcggtgctcttgttctgactgcggcaggctacagggcctcctcatgctcccagtcagccgctgtctgttactggctctgttcttgaggcccgagcttgaactcagctgtgatgtggcctctcagatcacactgtcctatgcttgtccagcctggggtcaaacatacccctgattcgtcccctgggtctctctggtgttaatattctgcctccacacattcttttccaggcctgaggccaagtgcccatcttggtgtcttcttacaggccactctgcccttccactgcagtgccatcctggctacagccctggacacagtcactgttccttatcgcctgtgttcctctccagtttccatggttcatctggctgacatgctgagcttctgtgggaaaaaggtatgaagctttgtaaggggttgggtcagtgctgagaaaatgtcctataacgtgttctcttccatctctttaggtggtgacagcaggagcaatcatccctttccccttggctccaggccagtcccttcctgattccctgatgcagtttggaggagccaccccatggaccccactgtctgcatgtggggagccttctggaacacgttgctttgcccagtcagtggtgctgaggggtatagacagagcatgccacacaaggtgagagctgttggtccttaggagtccttgtcagatttttgtctcatatccatcttcccctaatttctctggggcattctaatgatactgttccctccccaccccttaaaaaggaaaaaaaaaagggctttgaatatcttgatccagctgatggcctgagaacataagaattctgtttcttattcatgcagccacagactaatggtggttttggctttgttctggcagccagctcaccccagggacacctccaccctctgcccttcatgcatgtaccactggggaagaaatcttggctcagtatttacaacagcagcagcctggagtcatgaggtcagtgtaacggttgctcctgcccttcttgccaaccgcaaccctcccttgacttcttacgcacttaatggctgttctctgcccccacagttcttcccatctgctgctgactccctgcagggtggctcctccttacccccacctcttctcaagctgcagtccaccgggtatggttctggatggttcccccaagggagcaggtatgtaggaggtgaagaaaactgagatttcaagtatgggagagtttttactatctccattcctggattaaaagtgctgaaaaagtccacagttaaacattcctttattcaccctatggctcccaagaaaagcattcttcctctggagtactggtgtactaaggggacaatacaccaaatttgttgagtttacaatcaagtctactaaggttggacttccttatcagtttggcagagtcccagggcagaataatcatccatctacaggtctctgtttcctctccctccacagcagtggagagcatcccagtgtttggggcactgtgttcctcttcgtccctgcaccagaccctggaagccttggccagagacctcaccaaactcgacttgcggcgctgggccagcttcatggatgctggagtggagcacgatgacgtagcagagctgctgcaggagctacaaagcctggcccagtgctaccagggtggtgacagcctcgtggactaaagttcccagtgtgggagaaaggagctagtttgcaataaaaacagctggatgcaggagcccagtgtcttcatgcagaggagctcaatgtcgcgggactagctacaccaacatatgcactttttacatttagaaacactgtgattagaccacagaacaataaatatgtgccatcagaccaaaaaaaagtagagaaaggagctgaactccactctcgatgctacttacagaggacatctgtaaagtcttcataaaagaccttgaatgatgcctaggatggcagagcccctgggtcctactccatcctccagcctttgtccttgtcctggcctcctgctctccagatctgtaaactgggctcaaggactgtacaagcagagtacaactacccgcctccccggtgccagggcgcctgttgggtttggtcctgtgtagatgattcccagagtctcattcatccagctcctcttcagacagaaggtccccatggtcagacagctggtctgcattgctggtactggttgcatcatcctcatcctcagagctggcttcacaggcagtgtggaagagctgcatgagttctcgaaaatggtgggaaacctaagaaaggaggagggctgtattcactgatccttagtaacatgttaacatttatgaagcact

SEQ ID NO: 12923 - DNA, 2438 bp, Homo sapiens
gaggcgcggcggccccgtggagcagcgcagtatggcgggcggggcccgggaggtgctcacactgcagttgggacattttgccggtttcgtgggcgcgcactggtggaaccagcaggatgctgcgctgggccgagcgaccgattccaaggagcccccgggagagctgtgccccgacgtcctgtatcgtacgggccggacgctgcacggccaggagacctacacgccgcgactcatcctcatggatctgaagggtagtttgagctccctaaaagaggaaggtggactctacagggacaaacagttggatgctgcaatagcatggcaggggaagctcaccacacacaaagaggaactctatcccaagaacccttatctccaagactttctgagtgcagagggagtgctgagtagtgatggtgtctggagggtcaaatccattcccaatggcaaaggttcctcaccactccccaccgctacaactccaaaaccacttatccctacagaggccagcatcagggtctggtcagacttcctcagagtccatctccatccccggagcatctgtatgattcagaagtacaaccacgatggggaagcaggtcggctggaggcttttggccaaggggaaagtgtcctaaaggaacccaagtaccaggaagagctggaggacaggctgcatttctacgtggaggaatgtgactacttgcagggcttccagatcctgtgtgacctgcacgatggcttctctggggtaggcgcgaaggcggcagagctgctacaagatgaatattcagggcggggaataataacctggggcctgctacctggtccctaccatcgtggggaggcccagagaaacatctatcgtctattaaacacagcttttggtctcgtgcacctgactgctcacagctctcttgtctgccccttgtccttgggtgggagcctgggcctgcgacccgagccacctgtcagcttcccttacctgcattatgatgccactctgcccttccactgcagtgccatcctggctacagccctggacacagtcactgttccttatcgcctgtgttcctctccagtttccatggttcatctggctgacatgctgagcttctgtgggaaaaaggtggtgacagcaggagcaatcatccctttccccttggctccaggccagtcccttcctgattccctgatgcagtttggaggagccaccccatggaccccactgtctgcatgtggggagccttctggaacacgttgctttgcccagtcagtggtgctgaggggtatagacagagcatgccacacaagccacagactaatggtggttttggctttgttctggcagccagctcaccccagggacacctccaccctctgcccttcatgcatgtaccactggggaagaaatcttggctcagtatttacaacagcagcagcctggagtcatgagttcttcccatctgctgctgactccctgcagggtggctcctccttacccccacctcttctcaagctgcagtccaccgggtatggttctggatggttcccccaagggagcagtggagagcatcccagtgtttggggcactgtgttcctcttcgtccctgcaccagaccctggaagccttggccagagacctcaccaaactcgacttgcggcgctgggccagcttcatggatgctggagtggagcacgatgacgtagcagagctgctgcaggagctacaaagcctggcccagtgctaccagggtggtgacagcctcgtggactaaagttcccagtgtgggagaaaggagctagtttgcaataaaaacagctggatgcaggagcccagtgtcttcatgcagaggagctcaatgtcgcgggactagctacaccaacatatgcactttttacatttagaaacactgtgattagaccacagaacaataaatatgtgccatcagaccaaaaaaaagtagagaaaggagctgaactccactctcgatgctacttacagaggacatctgtaaagtcttcataaaagaccttgaatgatgcctaggatggcagagcccctgggtcctactccatcctccagcctttgtccttgtcctggcctcctgctctccagatctgtaaactgggctcaaggactgtacaagcagagtacaactacccgcctccccggtgccagggcgcctgttgggtttggtcctgtgtagatgattcccagagtctcattcatccagctcctcttcagacagaaggtccccatggtcagacagctggtctgcattgctggtactggttgcatcatcctcatcctcagagctggcttcacaggcagtgtggaagagctgcatgagttctcgaaaatggtgggaaacctaagaaaggaggagggctgtattcactgatccttagtaacatgttaacatttatgaagcact

SEQ ID NO: 12924 - DNA, 14236 bp, Homo sapiens
ggcccatggagctgcgtcacctgctgcgcccccggccaggattggactcggaaccaggcggagctgaggctggaaaggcccgacacgcaggtgctgtcatccgcacattatcaggcatggccaggcaccagggtcctgcacgtgctctgcgctactttgacctcacgcccagcatggcgggcatcatggtaccccctgtacagcgatggccagggcctggcttcacctttcatgcctggctctgtctgcaccctatggatacagcacctacccctgcccccacccgaccactccagcgaaagcagctgtacaggtgggtgactgccaggggccagggacctcctgccagggtgagcaggaacaagcagacataactggcttgcctgcccccagcttctttaccagcagcggctcagggtttgaggccttcttcacggcggccgggaccctggtggtggctgtgtgcacacggaaggagtatttgaccatgagtttgcccgaagtgtcctttgccgactctgcctgggtgagaccccatccttctcatgtggcccagtagagagaggggtgctgagtcccaagtatggcctaatgtgaggcttctgttctagcactgcgtggctatcgtccatgtgcctgggcgccggcccttcagccagaacctggtccatgtctacaaagacggccatctggtcaagacagcaccccttcgctgcccctccctcagtgaggtgtgccaagcaaggtttggggaggccttgggtagatgggaggacttggaacacagtgggcaggtgtagcctggagcccttgtgtcccgtgctgccccacaggcctgactttagccactggggtccatgcagccatgggggtcactgtgaggaactggttgtaggcggagccccaggttctgctgtgacctgaccgctcccccaaccccggccccacagcctttctcctcctgctgtatcggctccgctggataccgcacaacgaccaccaccacagggctgcccacaccaccagtccccgccaccctggcctacactcaccccgccctcacccgctcccagtcagtcccagcctccacagggcttggctgggggtccgggctggtggcccccctgcaggagggcagcatcgactctaccctcgcaggcacccaggacactcggtggggcagccccacatccctggagggtgagctgggggctgtggccatctttcacgaagccctgcaggcgacggctctgaggaccctgtgcaccctgggtatgcagcattctccatctctgccacagccccaggccagaagctaggggtccggggggagaaggcatctctgggggtctctcctgtggtcaggcagtctctggatggggtttggccagaggcctagcaaggtctgaagccccctgcccacctcccagggcccaatgagacggcacccttcaagcctgagggggagctgcatgagctcagcaccaggctgctcctccattactcacctcaggtatttgggggccccaggggagtggttggctcgactgtgctacttccccggctcccacactctgcctgccaccccctcctccctctgaccctggctgcctgcccattcccctatccctaggcttgtaagaacaacatctgcctggacctgtcccccagtcatgggcttgatgggcgcctgacgggccacagagtggagacctgggatgtgaaggtctgtgagcacgtgtgggtggtgtgtgcaggaggcatgaatatggggcacatgtgtgttcggagtcagctggggagcagcgctgtgcctggggaggatttggacagtccagctcaagagagcaaaacttcctttctgggtggtctgctggggtggagtagggcaggaaactggctggaaggtccccctcactgccatcctccttcccccaggatgtggtgaactgcgttgggggtatgggtgccctgctgcccctgctggagcgagtagctgcacagcccaaagaggctgaagcaggtccagctgaaacgcatgacctcgtgggtcctgaactgacctctggtcacaacacccagggcctggttctcccattgggtaaatcttcaggtaagtgttcctggtgcctatgttgtggagagggaatcttggcatggtaggggggtggaatgcccaaggtctcctggccactggcaggcccttgacacacatctgtccccttcctgatggctggcagaggaacggatggagaggaacgcagtggctgcttttctgctgatgctgcggaacttccttcagggtcacatggtgaaccaagagagcctggtgcagtgccaggggcctgccatcatcggggccctcctgcgaaaggtggggcccggtgggacaggcatgggggttaggggtatggtcagcctgtctgaccgaggggactgagtggggaaccctgtcagtcatgaagaacctcctgggagagttgccacttgagtggggcctgaaaggccgagcagggttgggtctggaggatctggggaaaggcccagcacaggtcggggcagggacccgcacagcaggcaggaggcttgcgtgtcagaggcggcaggaagcccccaaagggttctgagcaggctggtggccatgtttgtggccgtcatggctgtgcagggaagagtggcagctgaaaagctcagacagcagacaggcagagcctgagccctcactccagctcctgtcttatcccaggtcccaagctgggccatggacatgaacgtgctcatgtccgcccagctgctgatggagcaggtggcagctgagggcagcgggcccctcctgtacctactctaccagcatttgctcttcaactttcacctctggaccctcagtgacttcgccgtgcgcctcggtaggtgtgaggacctgagcaaggggccggccatagggcagctgagcactgagaagttagaactctgctctgggggatctgagggactcacctgttaggaatccagaatgccatggggcggctgaggggactatgaccctgccctggaagtctgacaggcacatggccctggcctggaggatctgaagggcccagctcagcctagtggcctgagccctctgctcattcccgctcaggtcacatccagtacatgtccagcatagttcgggagcacagacagaagctgcggaagaagtacggcgtccagtttatcttggatgctctgcgcacccactacaggtgaggccagtggggccagatgggccatggggggctgacacagtggcctccggccttggggactgggcggtgcgcttccctgactcacctgcccaccctctctccccgcctttctttgggacctggctgggtgtgcctactgacctgccagcccgcagcgggagcgccccctggctgctgacgacctacgcaccgtgcagacctccctcctgggcctggcgagggagttcctggtgcggagtctctcagcagatgacgtgcaggtcacgcagaccatgctgagctttttggcggccacaggcgatgacggtcaggtaggctggaggttggggagcgggaggcttgggtgaggggagtgggggcccgacacagtgtgagaccctgcatccccaggcggtgggtgcgctggacctgctgctggccctgctgcacggttccctggtgcaggagtccttggctgtctttctgttggagccagggaacctcgaagtgctactggccctgctagtgcggccagggtcactgcccctgctgcccgatcgagtctgcaaggtacacccagcccaccccctcccctggcatcccattcactggggcccctgcctggggttcagggaggtacagcaggccttgggccagcggatgaagctgccttcaagggcctcttgagccacacacctgcacggtgacttcccctcctacagtaactccttccacatgatgacagtcctccgatgacccccacacagatcctgcgcagactgcagcagaatgagcggctacctgagcggagccgccagcgcctccggctgcgggagtgtggtctccagggtctggttgcctgcttgcctgaggggactgtttccccccagctctgccagggcctctacaagctgttcctgggggcaggtacaacctggttaaggccaagtggagggggtgacatgtcagaaaaacagggcaggcaggccggaagaaggaagatagtggcataggggccagggctgggccctgccctttctagtctggtcagtccctcaggtccccccaacccatccccccagattgcctgaacctctcagatctgctggctgtggtacagctgtccctccaggctgacctcagcgttcgcctagacatctgtcgccaggtgagcatgagaggtaaaagctttgggggagggggagggtggcttctaccctctggccttccaccttgcctgtctcatgaggggtctctggagccctcctctgcaaaggccctggatgagggtctggagcaggcagttggatgcgtcctcacttgctgtgctctcgcctgcagcttttccacctcatctacggacagccagatgtagtgcggcttctggcccgacaggctggctggcaagatgtgctgacccggctatatgtcctggaggctgccacagccggcagcccccctccgtcttccccagagtcacctacctcccccaagccagccccacccaagccacccactgagtcacctgctgagccttcagatgtcttcctgccctcagaggccccctgccctgaccctgatggcttttaccatgctctctccccattctgcacgccctttgacctgggcctggaacggtctagtgtaggatcaggcaacactgctggtggtggcggcagcagtgggactcttactccagccagccagcccggcactccttcgccactggatgggccgcggccctttcctgctgctcctggccgccacagctccagtctctccaatgtgctggaggacggcagcctcccggagcccaccattagcggggatgatacctcgaacaccagcaacccacaggtgaggtgggcccaccctctgccactgcatggtacccaagggaggacacttctggtacacagggctggcagtgtagcctctccaaaggtgtggccctgtctgaccagggttgcagccactggtcaggcctattgctgtcccctcatagctctcatctgcagttgtgttcccagagggctcctggaacagggtgagtcatgatgagccacagtgggtgacaccagccaggcttcagaagggccctcaagagagcctgtagggcagacacctcacagggtccaagggcagcaaactccaaaggccctgccctgggcttctgggtttggggatgggcctctgcttgttctatgtgaactgcctcatctcctcttgggagtctggcaagaccccaggattctgcctggaactcaggtagtagttgagacccctataccattcttccaggcccttagtgccaggctcactgttagccaaatgctctgactcctgggtggctaccccaggaggggtgctgagtggggatgggtgggcgtcagcctgattccctcccttagccgcccacaacccacgcccacaccacccacctgtgcccacagcaaacctctgaggaagagttgtgcaatctgctcaccaacgtgctgttctcggtgacgtggcgtggcgtggaaggcagcgatgaggctgcctggcgggagcgtggccaggttttctcagtgctcacccagctgggggcctcagccacacttgtgcgcccaccagactgcatcaagcgcaggtgagagggaaagtctggagggggaggggcttcaggaagcctcgggggaaggagagaagatagtcaggtagacccttgagttccccactcacccgccagcctcctggagatgatgctggagtcagccctgaccgacatcaaagaggcccccgtgggggtcctggccagcctcacccagcaagcgctttggctgctgcgtctgctgcaggacttcctgtgtgctgaaggccatggtaaccaggaactgtggagtgagaaggtgcgacccctcagagaggcgtgagccacatgaacactcatgttcatgcaagcctgcagggatctggtctgggaggtggatgggtacacgtgcgcaggtgtgggtgcatcagcatgaatgcctgtgagtgtggacttgcctgtgtgcacaaaccctacctggcccccagcgcaaactttactttgctccctttccatggactcctggcctcccctggtgatgtctgttgggaacctgttttctgtggcagctctttgaaggtgtatgcagcctacttgatcgcctgggagcctggccccacctggccaacggcacagctgatctccgtgagatggcgcagattggcctacggcttgtacttggctacatcctgctggaagacccacaggtgagcacagggtgagcatgggggcagggggcgtgtgagatgtcgggagctccaagagtggctgggtgccactcatctctcttgcgcccacagctgcatgcccaggcctacgtgagattgcacatgctgctacagactgcagtgccagcccgccgcgaggaggcctgctatgtgctctccaagctggaggctgcactggggcgggtgctgaacacctcttccttggagtcagccactgatgaggcagggtccccacttgcagctgcagcagctgcagcagctgcagagcgctgctcctggctggtgccactggtgcgcacgctgctagaccgtgcctatgagccgctggggctgcagtggggactgccctccctgccacccaccaatggcagccccaccttctttgaagacttccaggctttttgtgccacacccgaatggcgccacttcatcgacaaacaggtgcctggaggttggggcccaggaagaggagtgggggctggggcccacatcgagcactgttctcctctgcccaatcctccaggtacagccaaccatgtcccagttcgaaatggacacgtatgctaagagccacgaccttatgtcaggtttctggaatgcctgctatgacatgcttatgagcagtgggcagcggcgccagtgggagcgcgcccagagtcgtcgggccttccaggtgtgccacccggggtaagggatgggaaactgctccacacatgcacccaggagatgactgacaatgtggagaaacgggtagggcaggcagcagccaggggactgacctattacccccaccccaggagctggtgctggaacctgcgcagaggcgggcgcgcctggaggggctacgctacacggcagtgctgaagcagcaggcaacgcagcactccatggccctgctgcactggggggcgctgtggcgccagctcgccagcccatgtggggcctgggcgctgaggtgggccgggcttggggcagggtcgctgtggaggggtggggcttgggagggagggagccacctggagccccagactgcctttggggtgaggccagggagggatgggggtgtctacagccttctaccgacccatgacctgggggacattctgcagggacactcccatcccccgctggaaactgtccagcgccgagacatattcacgcatgcgtctgaagctggtgcccaaccatcacttcgaccctcacctggaagccagcgctctccgagacaatctgggtgagggagtgtgctgagatgggtccacccaactcgattgtcccgtctcctgtcctgccttgcttctgctgagtacccttggccccttgcaggtgaggttcccctgacacccaccgaggaggcctcactgcctctggcagtgaccaaagaggccaaagtgagcaccccacccgagttgctgcaggaggaccagctcggcgaggacgagctggctgagctggagaccccgtgagtggggccctggagagattggactggtgtggtgggcaaggggtctgctccagtgtgtgcatgcctctgtgggatcaactccctgagtgtgtcctcttctgctgcccgactacgtccccctgaagggactgtccaaagccagatggtgagtgggagagtctcctaacagggctgagagttgctcttttaacagccaggcacctgaggacagcactgagaaacacaaaccagagcaggaagggggcccagggagtgggcaggggctgggtgaggggagcaggggacaagggttggcatcctggcaaaatattcagaagcccagtgggtggcaggtgggggacaggggctgggaccagtaggttctggaccctaggcagcccctccccatctctgggagtcatgagagtatataccccatgactcaatggcacttggatgccctttgggcttgtgaagaagggggtcccagagcctacagcgtgaggtgggttgctggtctttaggatggaggcagcagaactggatgagcagcgtgagaagctggtgctgtcggccgagtgccagctggtgacggtagtggccgtggtcccagggctgctggaggtcaccacacagaatgtatacttctacgatggcagcactgagcgcgtggaaaccgaggagggtgcgtcctggtggtgtggtttaggaggatggcagggaatggctgagctctgggtggggctggggtgagtgactcccgtacctgctgttcctccccataggcatcggctatgatttccggcgcccactggcccagctgcgtgaggtccacctgcggcgtttcaacctgcgccgttcagcacttgagctcttctttatcgatcaggccaactacttcctcaacttcccatgcaaggtgggcacgaccccagtctcatctcctagccagactcccagaccccagcctggccccatcccaccccatacccaggtacggaaccaggtgtactcgtggctcctgcgcctacggcccccctctcaaggctacctaagcagccgctccccccaggagatgctgcgtgcctcaggccttacccaggtgagagccctgggtgtgagggatgtgaagtcgggaccctgaatcacggggcagtgctggacagcccacctggctcacatcttgtctgcccctgtccccagaaatgggtacagcgtgagatatccaacttcgagtacttgatgcaactcaacaccattgcggggcggacctacaatgacctgtctcagtaccctgtggtgagggtcccactctgcacccctccacccctgcccctctgacctgtcagcccttggttcccccaagtgtaggtacctgccagtgggccaagctctgagcttggtcaagggtagatgtgccaatgaagacctggcctctgttccctgccaacccccagaggtccccagcctcactcccttcccctccctgcctagcctctattcctcaaaaggaatcctgttccaggacactctgtccttctcccctgtgacccctctaagtggtgctcccccaacctgtgggcaggctctgtgcccgccttcttgagggtgtgggcagggcagggtgggctggtaggccatcagggccctcatgcagcccctgctcgggtgggtggccagttcccctgggtcctgcaggactacgtgtccccaaccctggacctcagcaacccagccgtcttccgggacctgtctaagcccatcggtgtggtgaaccccaagcatgcccagctcgtgagggagaagtgagcatgtgggcagggctgggctcagcgggtagggaaaggcgaggggagggcttctgctgacacgtccaactgtggccccaggtatgaaagctttgaggacccagcagggaccattgacaagttccactatggcacccactactccaatgcagcaggcgtgatgcactacctcatccgcgtggagcccttcacctccctgcacgtccagctgcaaagtggccggtgcggcccaggggctggtgggcagactagggggcagataaggggaggaggctggtcctccccacatcctgggcccacccctggctcccttcttccctccagccacagcatctccctccctgtctccattctccccacctcaccttggccccgtgcccctcccccagctttgactgctccgaccggcagttccactcggtggcggcagcctggcaggcacgcctggagagccctgccgatgtgaaggagctcatcccggaattcttctactttcctgacttcctggagaaccagaacggtaggtgtgaggtgctcacactggagcgggcaggtgtagggatggagagcagatggtggagtggccagggggcagtcgggatggacagggagacagctgacccagtcctctgtgccaggttttgacctgggctgtctccagctgaccaacgagaaggtaggcgatgtggtgctacccccgtgggccagctctcctgaggacttcatccagcagcaccgccaggctctggtgaggaaggaaccacaggcaaacggcaggcagccggggttctgaagatcatggggggtcagctgtccctgcactgattgctgcctccctactctcaggagtcggagtatgtgtctgcacacctacacgagtggatcgacctcatctttggctacaagcagcgggggccagccgccgaggaggccctcaatgtcttctattactgcacctatgagggtgggcagtgcgctggactccagtcagggccaggacaagatcaggtcgggtggatgcagagggcacgcagggagccctgactgctctgcctgccttcccaggggctgtagacctggaccatgtgacagatgagcgggaacggaaggctctggagggcattatcagcaactttgggcagactccctgtcagctgctgaaggtaaggccagcttagaggatagtggccagggatgcccatgccatggtgctgaccagccacttacccacaggagccacatccaactcggctctcagctgaggaagcagcccatcgccttgcacgcctggacactaactcacctagcatcttccagcacctggacgaactcaaggcattcttcgcagaggtgaaaggaagacaagacctcaactttatattctgtgaaatgggtttaaccccactgtccttaccaaccacgtggggcagatgggaatcctaatcaaggtcactgatttcaaggcaccttagaaaatgagctaaacatgggaagagtatgggggcaggaggggtgccttcttcatcagggccaggataaagtgtcgactcaacaagctctgaaagccttagggagatcaggagggagatctgtccttggaccccttccatcgccttcctagacaggaacattcctgaatgttgcccccaggcctgactttttttttaggtttccctctcttcctgcctttgggctagggggacaaggaataacagggtgagaggaccaagttgaaactaagtgtgatactctggaagcatcttccatgtctgtcccagcttctcacccactttctgagatgccctcctaaagtctctgcctgtttcttggagggaacctctgcatctgtgacacctactctatgacccctggggactgacagtaaaggaagggatgatgcttcagggagcagatagtgtaatctgatagtactcaggcatagctaggcctgcccttgcccctgcaggttgtcagtgatggtgtacccctggtgctagccctggtcccccaccggcagccccactccttcatcacccagggttccccagacctgttggtaagtgcattgtgcagagccccagctcagctccactcccccttgcctctgccagaaacccacctctgccccctcctgcctgcaggtgactgtgagtgccagtgggctgctgggcacccacagctggttgccctatgaccgcaacataagcaactacttcagcttcagcaaagaccccaccatgggcagccacaagtaggacagagggctgtgggtggggtgggctacaaatgccctgcacccggaattattcccctccctaatcagaatgtaggccagctgcaggggaaaggtctggccaggctccctgagggcctgggtctcttccatgtggcctggcctcacttgctatccccctcactgggtcaggacgcagcgactgctgagtggcccgtgggtgccaggcagtggtgtgagtggacaagcactggcagtggccccggatggaaagctgctattcagcggtggccactgggatggcagcctgcgggtgactgcactaccccgtggcaagctgttgagccagctcagctgccaccttggtatgaacagccttggagctggggagaatgaggcacacaggtatggggccgggttctgaggctggccagggcggatgtgactcctccgttctgcctgtaccctccccttcccatgcagatgtagtaacctgccttgcactggacacctgtggcatctacctcatctcaggctcccgggacaccacgtgcatggtgtggcggctcctgcatcaggtgtgcctcgtgggcagctctgtggggcccccgtagcccagacctgcagcccatccgtccctcagtggccttccagtcctgtcctcctctagtcttggacaaggccttcatttcctgagcctcaggggacagtcctaagccaaccctggtcctccacagggtggtctgtcagtaggcctggcaccaaagcctgtgcaggtcctgtatgggcatggggctgcagtgagctgtgtggccatcagcactgaacttgacatggctgtgtctggatctgaggtgtgtgtatgcatgtgccctggggagggtgagtttcctgggcaatccccctggagcccagactcctgcccaggaccctaagttgccttcctgcaggatggaactgtgatcatacacactgtacgccgcggacagtttgtagcggcactacggcctctgggtgccacattccctggacctattttccacctggcattggggtccgaaggccagattgtggtacagagctcagcgtgggaacgtcctggggcccaggtatggggaaggggtgcccagcaaagatggaggggcagttgggatcctgtccttgctgacactccctgcttcctccaggtcacctactccttgcacctgtattcagtcaatgggaagttgcgggcttcactgcccctggcagagcagcctacagccctgacggtgacagaggactttgtgttgctgggcaccgcccagtgcgccctgcacatcctccaactaaacacgtaagccccccatttatgggttcatggcccctgaaggtggtggtcattggtgtaggataaaggccctaggaacccacacaccatacatgtttgtgggcacatatttcaaggtttgttacctgtcccttcatcttcccatggggaggtcttgccctgggcctccgcttagccacagttgtgggagatttctttgtgtataagaatttcaatttaaccatccttaaaatgaggacagagagggtatatgggataagggatatctgctggtcgcaaagcccccttgcagtcgcaagttggtgtatatcccctctcccttccagactgctcccggccgcgcctcccttgcccatgaaggtggccatccgcagcgtggccgtgaccaaggagcgcagccacgtgctggtgggcctggaggatggcaagctcatcgtggtggtcgcggggcagccctctgaggtgaggatggggcgggggtggggaggcccctcgaacggggcggggcgtggcgcggcgatcccagctgatcctactcaacccttacgcccaccaggtgcgcagcagccagttcgcgcggaagctgtggcggtcctcgcggcgcatctcccaggtgtcctcgggagagacggaatacaaccctactgaggcgcgctgaacctggccagtccggctgctcgggccccgcccccggcaggcctggcccgggaggccccgcccagaagtcggcgggaacaccccggggtgggcagcccaggggggtgagcggggcccaccctgcccagctcagggattggcgggcgatgttaccccctcagggattggcgggcggaagtcccgcccctcgccggctgaggggccgccctgagggccagcactggcgtctgcggccgc

SEQ ID NO: 12925 - DNA, 6364 bp, Homo sapiens
ggcccatggagctgcgtcacctgctgcgcccccggccaggattggactcggaaccaggcggagctgaggctggaaaggcccgacacgcaggtgctgtcatccgcacattatcaggcatggccaggcaccagggtcctgcacgtgctctgcgctactttgacctcacgcccagcatggcgggcatcatggtaccccctgtacagcgatggccagggcctggcttcacctttcatgcctggctctgtctgcaccctatggatacagcacctacccctgcccccacccgaccactccagcgaaagcagctgtacagcttctttaccagcagcggctcagggtttgaggccttcttcacggcggccgggaccctggtggtggctgtgtgcacacggaaggagtatttgaccatgagtttgcccgaagtgtcctttgccgactctgcctggcactgcgtggctatcgtccatgtgcctgggcgccggcccttcagccagaacctggtccatgtctacaaagacggccatctggtcaagacagcaccccttcgctgcccctccctcagtgagcctttctcctcctgctgtatcggctccgctggataccgcacaacgaccaccaccacagggctgcccacaccaccagtccccgccaccctggcctacactcaccccgccctcacccgctcccagtcagtcccagcctccacagggcttggctgggggtccgggctggtggcccccctgcaggagggcagcatcgactctaccctcgcaggcacccaggacactcggtggggcagccccacatccctggagggtgagctgggggctgtggccatctttcacgaagccctgcaggcgacggctctgaggaccctgtgcaccctggggcccaatgagacggcacccttcaagcctgagggggagctgcatgagctcagcaccaggctgctcctccattactcacctcaggcttgtaagaacaacatctgcctggacctgtcccccagtcatgggcttgatgggcgcctgacgggccacagagtggagacctgggatgtgaaggatgtggtgaactgcgttgggggtatgggtgccctgctgcccctgctggagcgagtagctgcacagcccaaagaggctgaagcaggtccagctgaaacgcatgacctcgtgggtcctgaactgacctctggtcacaacacccagggcctggttctcccattgggtaaatcttcagaggaacggatggagaggaacgcagtggctgcttttctgctgatgctgcggaacttccttcagggtcacatggtgaaccaagagagcctggtgcagtgccaggggcctgccatcatcggggccctcctgcgaaaggtcccaagctgggccatggacatgaacgtgctcatgtccgcccagctgctgatggagcaggtggcagctgagggcagcgggcccctcctgtacctactctaccagcatttgctcttcaactttcacctctggaccctcagtgacttcgccgtgcgcctcggtcacatccagtacatgtccagcatagttcgggagcacagacagaagctgcggaagaagtacggcgtccagtttatcttggatgctctgcgcacccactacagcccgcagcgggagcgccccctggctgctgacgacctacgcaccgtgcagacctccctcctgggcctggcgagggagttcctggtgcggagtctctcagcagatgacgtgcaggtcacgcagaccatgctgagctttttggcggccacaggcgatgacggtcagatcctgcgcagactgcagcagaatgagcggctacctgagcggagccgccagcgcctccggctgcgggagtgtggtctccagggtctggttgcctgcttgcctgaggggactgtttccccccagctctgccagggcctctacaagctgttcctgggggcaggatcaggcaacactgctggtggtggcggcagcagtgggactcttactccagccagccagcccggcactccttcgccactggatgggccgcggccctttcctgctgctcctggccgccacagctccagtctctccaatgtgctggaggacggcagcctcccggagcccaccattagcggggatgatacctcgaacaccagcaacccacagcaaacctctgaggaagagttgtgcaatctgctcaccaacgtgctgttctcggtgacgtggcgtggcgtggaaggcagcgatgaggctgcctggcgggagcgtggccaggttttctcagtgctcacccagctgggggcctcagccacacttgtgcgcccaccagactgcatcaagcgcagcctcctggagatgatgctggagtcagccctgaccgacatcaaagaggcccccgtgggggtcctggccagcctcacccagcaagcgctttggctgctgcgtctgctgcaggacttcctgtgtgctgaaggccatggtaaccaggaactgtggagtgagaagctctttgaaggtgtatgcagcctacttgatcgcctgggagcctggccccacctggccaacggcacagctgatctccgtgagatggcgcagattggcctacggcttgtacttggctacatcctgctggaagacccacagctgcatgcccaggcctacgtgagattgcacatgctgctacagactgcagtgccagcccgccgcgaggaggcctgctatgtgctctccaagctggaggctgcactggggcgggtgctgaacacctcttccttggagtcagccactgatgaggcagggtccccacttgcagctgcagcagctgcagcagctgcagagcgctgctcctggctggtgccactggtgcgcacgctgctagaccgtgcctatgagccgctggggctgcagtggggactgccctccctgccacccaccaatggcagccccaccttctttgaagacttccaggctttttgtgccacacccgaatggcgccacttcatcgacaaacaggtacagccaaccatgtcccagttcgaaatggacacgtatgctaagagccacgaccttatgtcaggtttctggaatgcctgctatgacatgcttatgagcagtgggcagcggcgccagtgggagcgcgcccagagtcgtcgggccttccaggagctggtgctggaacctgcgcagaggcgggcgcgcctggaggggctacgctacacggcagtgctgaagcagcaggcaacgcagcactccatggccctgctgcactggggggcgctgtggcgccagctcgccagcccatgtggggcctgggcgctgagggacactcccatcccccgctggaaactgtccagcgccgagacatattcacgcatgcgtctgaagctggtgcccaaccatcacttcgaccctcacctggaagccagcgctctccgagacaatctgggtgaggttcccctgacacccaccgaggaggcctcactgcctctggcagtgaccaaagaggccaaagtgagcaccccacccgagttgctgcaggaggaccagctcggcgaggacgagctggctgagctggagaccccgatggaggcagcagaactggatgagcagcgtgagaagctggtgctgtcggccgagtgccagctggtgacggtagtggccgtggtcccagggctgctggaggtcaccacacagaatgtatacttctacgatggcagcactgagcgcgtggaaaccgaggagggcatcggctatgatttccggcgcccactggcccagctgcgtgaggtccacctgcggcgtttcaacctgcgccgttcagcacttgagctcttctttatcgatcaggccaactacttcctcaacttcccatgcaaggtgggcacgaccccagtctcatctcctagccagactcccagaccccagcctggccccatcccaccccatacccaggtacggaaccaggtgtactcgtggctcctgcgcctacggcccccctctcaaggctacctaagcagccgctccccccaggagatgctgcgtgcctcaggccttacccagaaatgggtacagcgtgagatatccaacttcgagtacttgatgcaactcaacaccattgcggggcggacctacaatgacctgtctcagtaccctgtgttcccctgggtcctgcaggactacgtgtccccaaccctggacctcagcaacccagccgtcttccgggacctgtctaagcccatcggtgtggtgaaccccaagcatgcccagctcgtgagggagaagtatgaaagctttgaggacccagcagggaccattgacaagttccactatggcacccactactccaatgcagcaggcgtgatgcactacctcatccgcgtggagcccttcacctccctgcacgtccagctgcaaagtggccgctttgactgctccgaccggcagttccactcggtggcggcagcctggcaggcacgcctggagagccctgccgatgtgaaggagctcatcccggaattcttctactttcctgacttcctggagaaccagaacggttttgacctgggctgtctccagctgaccaacgagaaggtaggcgatgtggtgctacccccgtgggccagctctcctgaggacttcatccagcagcaccgccaggctctggagtcggagtatgtgtctgcacacctacacgagtggatcgacctcatctttggctacaagcagcgggggccagccgccgaggaggccctcaatgtcttctattactgcacctatgagggggctgtagacctggaccatgtgacagatgagcgggaacggaaggctctggagggcattatcagcaactttgggcagactccctgtcagctgctgaaggagccacatccaactcggctctcagctgaggaagcagcccatcgccttgcacgcctggacactaactcacctagcatcttccagcacctggacgaactcaaggcattcttcgcagaggttgtcagtgatggtgtacccctggtgctagccctggtcccccaccggcagccccactccttcatcacccagggttccccagacctgttggtgactgtgagtgccagtgggctgctgggcacccacagctggttgccctatgaccgcaacataagcaactacttcagcttcagcaaagaccccaccatgggcagccacaagacgcagcgactgctgagtggcccgtgggtgccaggcagtggtgtgagtggacaagcactggcagtggccccggatggaaagctgctattcagcggtggccactgggatggcagcctgcgggtgactgcactaccccgtggcaagctgttgagccagctcagctgccaccttgatgtagtaacctgccttgcactggacacctgtggcatctacctcatctcaggctcccgggacaccacgtgcatggtgtggcggctcctgcatcagggtggtctgtcagtaggcctggcaccaaagcctgtgcaggtcctgtatgggcatggggctgcagtgagctgtgtggccatcagcactgaacttgacatggctgtgtctggatctgaggatggaactgtgatcatacacactgtacgccgcggacagtttgtagcggcactacggcctctgggtgccacattccctggacctattttccacctggcattggggtccgaaggccagattgtggtacagagctcagcgtgggaacgtcctggggcccaggtcacctactccttgcacctgtattcagtcaatgggaagttgcgggcttcactgcccctggcagagcagcctacagccctgacggtgacagaggactttgtgttgctgggcaccgcccagtgcgccctgcacatcctccaactaaacacactgctcccggccgcgcctcccttgcccatgaaggtggccatccgcagcgtggccgtgaccaaggagcgcagccacgtgctggtgggcctggaggatggcaagctcatcgtggtggtcgcggggcagccctctgaggtgcgcagcagccagttcgcgcggaagctgtggcggtcctcgcggcgcatctcccaggtgtcctcgggagagacggaatacaaccctactgaggcgcgctgaacctggccagtccggctgctcgggccccgcccccggcaggcctggcccgggaggccccgcccagaagtcggcgggaacaccccggggtgggcagcccaggggggtgagcggggcccaccctgcccagctcagggattggcgggcgatgttaccccctcagggattggcgggcggaagtcccgcccctcgccggctgaggggccgccctgagggccagcactggcgtctgcggccgc

SEQ ID NO: 12926 - DNA, 2394 bp, Homo sapiens
gagcccttcacctccctgcacgtccagctgcaaagtggccggtgcggcccaggggctggtgggcagactagggggcagataaggggaggaggctggtcctccccacatcctgggcccacccctggctcccttcttccctccagccacagcatctccctccctgtctccattctccccacctcaccttggccccgtgcccctcccccagctttgactgctccgaccggcagttccactcggtggcggcagcctggcaggcacgcctggagagccctgccgatgtgaaggagctcatcccggaattcttctactttcctgacttcctggagaaccagaacggtaggtgtgaggtgctcacactggagcgggcaggtgtagggatggagagcagatggtggagtggccagggggcagtcgggatggacagggagacagctgacccagtcctctgtgccaggttttgacctgggctgtctccagctgaccaacgagaaggtaggcgatgtggtgctacccccgtgggccagctctcctgaggacttcatccagcagcaccgccaggctctggtgaggaaggaaccacaggcaaacggcaggcagccggggttctgaagatcatggggggtcagctgtccctgcactgattgctgcctccctactctcaggagtcggagtatgtgtctgcacacctacacgagtggatcgacctcatctttggctacaagcagcgggggccagccgccgaggaggccctcaatgtcttctattactgcacctatgagggtgggcagtgcgctggactccagtcagggccaggacaagatcaggtcgggtggatgcagagggcacgcagggagccctgactgctctgcctgccttcccaggggctgtagacctggaccatgtgacagatgagcgggaacggaaggctctggagggcattatcagcaactttgggcagactccctgtcagctgctgaaggtaaggccagcttagaggatagtggccagggatgcccatgccatggtgctgaccagccacttacccacaggagccacatccaactcggctctcagctgaggaagcagcccatcgccttgcacgcctggacactaactcacctagcatcttccagcacctggacgaactcaaggcattcttcgcagaggtgaaaggaagacaagacctcaactttatattctgtgaaatgggtttaaccccactgtccttaccaaccacgtggggcagatgggaatcctaatcaaggtcactgatttcaaggcaccttagaaaatgagctaaacatgggaagagtatgggggcaggaggggtgccttcttcatcagggccaggataaagtgtcgactcaacaagctctgaaagccttagggagatcaggagggagatctgtccttggaccccttccatcgccttcctagacaggaacattcctgaatgttgcccccaggcctgactttttttttaggtttccctctcttcctgcctttgggctagggggacaaggaataacagggtgagaggaccaagttgaaactaagtgtgatactctggaagcatcttccatgtctgtcccagcttctcacccactttctgagatgccctcctaaagtctctgcctgtttcttggagggaacctctgcatctgtgacacctactctatgacccctggggactgacagtaaaggaagggatgatgcttcagggagcagatagtgtaatctgatagtactcaggcatagctaggcctgcccttgcccctgcaggttgtcagtgatggtgtacccctggtgctagccctggtcccccaccggcagccccactccttcatcacccagggttccccagacctgttggtaagtgcattgtgcagagccccagctcagctccactcccccttgcctctgccagaaacccacctctgccccctcctgcctgcaggtgactgtgagtgccagtgggctgctgggcacccacagctggttgccctatgaccgcaacataagcaactacttcagcttcagcaaagaccccaccatgggcagccacaagtaggacagagggctgtgggtggggtgggctacaaatgccctgcacccggaattattcccctccctaatcagaatgtaggccagctgcaggggaaaggtctggccaggctccctgagggcctgggtctcttccatgtggcctggcctcacttgctatccccctcactgggtcaggacgcagcgactgctgagtggcccgtgggtgccaggcagtggtgtgagtggacaagcactggcagtggccccggatggaaagctgctattcagcggtggccactgggatggcagcctgcgggtgactgcactaccccgtggcaagctgtt

SEQ ID NO: 12927 - DNA, 765 bp, Homo sapiens
gagcccttcacctccctgcacgtccagctgcaaagtggccgctttgactgctccgaccggcagttccactcggtggcggcagcctggcaggcacgcctggagagccctgccgatgtgaaggagctcatcccggaattcttctactttcctgacttcctggagaaccagaacggttttgacctgggctgtctccagctgaccaacgagaaggtaggcgatgtggtgctacccccgtgggccagctctcctgaggacttcatccagcagcaccgccaggctctggagtcggagtatgtgtctgcacacctacacgagtggatcgacctcatctttggctacaagcagcgggggccagccgccgaggaggccctcaatgtcttctattactgcacctatgagggggctgtagacctggaccatgtgacagatgagcgggaacggaaggctctggagggcattatcagcaactttgggcagactccctgtcagctgctgaaggagccacatccaactcggctctcagctgaggaagcagcccatcgccttgcacgcctggacactaactcacctagcatcttccagcacctggacgaactcaaggcattcttcgcagaggacgcagcgactgctgagtggcccgtgggtgccaggcagtggtgtgagtggacaagcactggcagtggccccggatggaaagctgctattcagcggtggccactgggatggcagcctgcgggtgactgcactaccccgtggcaagctgtt

SEQ ID NO: 12928 - DNA, 1612 bp, Homo sapiens
atcgatcaggccaactacttcctcaacttcccatgcaaggtgggcacgaccccagtctcatctcctagccagactcccagaccccagcctggccccatcccaccccatacccaggtacggaaccaggtgtactcgtggctcctgcgcctacggcccccctctcaaggctacctaagcagccgctccccccaggagatgctgcgtgcctcaggccttacccaggtgagagccctgggtgtgagggatgtgaagtcgggaccctgaatcacggggcagtgctggacagcccacctggctcacatcttgtctgcccctgtccccagaaatgggtacagcgtgagatatccaacttcgagtacttgatgcaactcaacaccattgcggggcggacctacaatgacctgtctcagtaccctgtggtgagggtcccactctgcacccctccacccctgcccctctgacctgtcagcccttggttcccccaagtgtaggtacctgccagtgggccaagctctgagcttggtcaagggtagatgtgccaatgaagacctggcctctgttccctgccaacccccagaggtccccagcctcactcccttcccctccctgcctagcctctattcctcaaaaggaatcctgttccaggacactctgtccttctcccctgtgacccctctaagtggtgctcccccaacctgtgggcaggctctgtgcccgccttcttgagggtgtgggcagggcagggtgggctggtaggccatcagggccctcatgcagcccctgctcgggtgggtggccagttcccctgggtcctgcaggactacgtgtccccaaccctggacctcagcaacccagccgtcttccgggacctgtctaagcccatcggtgtggtgaaccccaagcatgcccagctcgtgagggagaagtgagcatgtgggcagggctgggctcagcgggtagggaaaggcgaggggagggcttctgctgacacgtccaactgtggccccaggtatgaaagctttgaggacccagcagggaccattgacaagttccactatggcacccactactccaatgcagcaggcgtgatgcactacctcatccgcgtggagcccttcacctccctgcacgtccagctgcaaagtggccggtgcggcccaggggctggtgggcagactagggggcagataaggggaggaggctggtcctccccacatcctgggcccacccctggctcccttcttccctccagccacagcatctccctccctgtctccattctccccacctcaccttggccccgtgcccctcccccagctttgactgctccgaccggcagttccactcggtggcggcagcctggcaggcacgcctggagagccctgccgatgtgaaggagctcatcccggaattcttctactttcctgacttcctggagaaccagaacggtaggtgtgaggtgctcacactggagcgggcaggtgtagggatggagagcagatggtggagtggccagggggcagtcgggatggacagggagacagctgacccagtcctctgtgccaggttttgacctgggctgtctccagctgaccaacgagaaggtaggcga

SEQ ID NO: 12929 - DNA, 636 bp, Homo sapiens
atcgatcaggccaactacttcctcaacttcccatgcaaggtgggcacgaccccagtctcatctcctagccagactcccagaccccagcctggccccatcccaccccatacccaggtacggaaccaggtgtactcgtggctcctgcgcctacggcccccctctcaaggctacctaagcagccgctccccccaggagatgctgcgtgcctcaggccttacccagaaatgggtacagcgtgagatatccaacttcgagtacttgatgcaactcaacaccattgcggggcggacctacaatgacctgtctcagtaccctgtggtatgaaagctttgaggacccagcagggaccattgacaagttccactatggcacccactactccaatgcagcaggcgtgatgcactacctcatccgcgtggagcccttcacctccctgcacgtccagctgcaaagtggccgctttgactgctccgaccggcagttccactcggtggcggcagcctggcaggcacgcctggagagccctgccgatgtgaaggagctcatcccggaattcttctactttcctgacttcctggagaaccagaacggttttgacctgggctgtctccagctgaccaacgagaaggtaggcga

SEQ ID NO: 12930 - DNA, 7516 bp, Homo sapiens
gctgaacacctcttccttggagtcagccactgatgaggcagggtccccacttgcagctgcagcagctgcagcagctgcagagcgctgctcctggctggtgccactggtgcgcacgctgctagaccgtgcctatgagccgctggggctgcagtggggactgccctccctgccacccaccaatggcagccccaccttctttgaagacttccaggctttttgtgccacacccgaatggcgccacttcatcgacaaacaggtgcctggaggttggggcccaggaagaggagtgggggctggggcccacatcgagcactgttctcctctgcccaatcctccaggtacagccaaccatgtcccagttcgaaatggacacgtatgctaagagccacgaccttatgtcaggtttctggaatgcctgctatgacatgcttatgagcagtgggcagcggcgccagtgggagcgcgcccagagtcgtcgggccttccaggtgtgccacccggggtaagggatgggaaactgctccacacatgcacccaggagatgactgacaatgtggagaaacgggtagggcaggcagcagccaggggactgacctattacccccaccccaggagctggtgctggaacctgcgcagaggcgggcgcgcctggaggggctacgctacacggcagtgctgaagcagcaggcaacgcagcactccatggccctgctgcactggggggcgctgtggcgccagctcgccagcccatgtggggcctgggcgctgaggtgggccgggcttggggcagggtcgctgtggaggggtggggcttgggagggagggagccacctggagccccagactgcctttggggtgaggccagggagggatgggggtgtctacagccttctaccgacccatgacctgggggacattctgcagggacactcccatcccccgctggaaactgtccagcgccgagacatattcacgcatgcgtctgaagctggtgcccaaccatcacttcgaccctcacctggaagccagcgctctccgagacaatctgggtgagggagtgtgctgagatgggtccacccaactcgattgtcccgtctcctgtcctgccttgcttctgctgagtacccttggccccttgcaggtgaggttcccctgacacccaccgaggaggcctcactgcctctggcagtgaccaaagaggccaaagtgagcaccccacccgagttgctgcaggaggaccagctcggcgaggacgagctggctgagctggagaccccgtgagtggggccctggagagattggactggtgtggtgggcaaggggtctgctccagtgtgtgcatgcctctgtgggatcaactccctgagtgtgtcctcttctgctgcccgactacgtccccctgaagggactgtccaaagccagatggtgagtgggagagtctcctaacagggctgagagttgctcttttaacagccaggcacctgaggacagcactgagaaacacaaaccagagcaggaagggggcccagggagtgggcaggggctgggtgaggggagcaggggacaagggttggcatcctggcaaaatattcagaagcccagtgggtggcaggtgggggacaggggctgggaccagtaggttctggaccctaggcagcccctccccatctctgggagtcatgagagtatataccccatgactcaatggcacttggatgccctttgggcttgtgaagaagggggtcccagagcctacagcgtgaggtgggttgctggtctttaggatggaggcagcagaactggatgagcagcgtgagaagctggtgctgtcggccgagtgccagctggtgacggtagtggccgtggtcccagggctgctggaggtcaccacacagaatgtatacttctacgatggcagcactgagcgcgtggaaaccgaggagggtgcgtcctggtggtgtggtttaggaggatggcagggaatggctgagctctgggtggggctggggtgagtgactcccgtacctgctgttcctccccataggcatcggctatgatttccggcgcccactggcccagctgcgtgaggtccacctgcggcgtttcaacctgcgccgttcagcacttgagctcttctttatcgatcaggccaactacttcctcaacttcccatgcaaggtgggcacgaccccagtctcatctcctagccagactcccagaccccagcctggccccatcccaccccatacccaggtacggaaccaggtgtactcgtggctcctgcgcctacggcccccctctcaaggctacctaagcagccgctccccccaggagatgctgcgtgcctcaggccttacccaggtgagagccctgggtgtgagggatgtgaagtcgggaccctgaatcacggggcagtgctggacagcccacctggctcacatcttgtctgcccctgtccccagaaatgggtacagcgtgagatatccaacttcgagtacttgatgcaactcaacaccattgcggggcggacctacaatgacctgtctcagtaccctgtggtgagggtcccactctgcacccctccacccctgcccctctgacctgtcagcccttggttcccccaagtgtaggtacctgccagtgggccaagctctgagcttggtcaagggtagatgtgccaatgaagacctggcctctgttccctgccaacccccagaggtccccagcctcactcccttcccctccctgcctagcctctattcctcaaaaggaatcctgttccaggacactctgtccttctcccctgtgacccctctaagtggtgctcccccaacctgtgggcaggctctgtgcccgccttcttgagggtgtgggcagggcagggtgggctggtaggccatcagggccctcatgcagcccctgctcgggtgggtggccagttcccctgggtcctgcaggactacgtgtccccaaccctggacctcagcaacccagccgtcttccgggacctgtctaagcccatcggtgtggtgaaccccaagcatgcccagctcgtgagggagaagtgagcatgtgggcagggctgggctcagcgggtagggaaaggcgaggggagggcttctgctgacacgtccaactgtggccccaggtatgaaagctttgaggacccagcagggaccattgacaagttccactatggcacccactactccaatgcagcaggcgtgatgcactacctcatccgcgtggagcccttcacctccctgcacgtccagctgcaaagtggccggtgcggcccaggggctggtgggcagactagggggcagataaggggaggaggctggtcctccccacatcctgggcccacccctggctcccttcttccctccagccacagcatctccctccctgtctccattctccccacctcaccttggccccgtgcccctcccccagctttgactgctccgaccggcagttccactcggtggcggcagcctggcaggcacgcctggagagccctgccgatgtgaaggagctcatcccggaattcttctactttcctgacttcctggagaaccagaacggtaggtgtgaggtgctcacactggagcgggcaggtgtagggatggagagcagatggtggagtggccagggggcagtcgggatggacagggagacagctgacccagtcctctgtgccaggttttgacctgggctgtctccagctgaccaacgagaaggtaggcgatgtggtgctacccccgtgggccagctctcctgaggacttcatccagcagcaccgccaggctctggtgaggaaggaaccacaggcaaacggcaggcagccggggttctgaagatcatggggggtcagctgtccctgcactgattgctgcctccctactctcaggagtcggagtatgtgtctgcacacctacacgagtggatcgacctcatctttggctacaagcagcgggggccagccgccgaggaggccctcaatgtcttctattactgcacctatgagggtgggcagtgcgctggactccagtcagggccaggacaagatcaggtcgggtggatgcagagggcacgcagggagccctgactgctctgcctgccttcccaggggctgtagacctggaccatgtgacagatgagcgggaacggaaggctctggagggcattatcagcaactttgggcagactccctgtcagctgctgaaggtaaggccagcttagaggatagtggccagggatgcccatgccatggtgctgaccagccacttacccacaggagccacatccaactcggctctcagctgaggaagcagcccatcgccttgcacgcctggacactaactcacctagcatcttccagcacctggacgaactcaaggcattcttcgcagaggtgaaaggaagacaagacctcaactttatattctgtgaaatgggtttaaccccactgtccttaccaaccacgtggggcagatgggaatcctaatcaaggtcactgatttcaaggcaccttagaaaatgagctaaacatgggaagagtatgggggcaggaggggtgccttcttcatcagggccaggataaagtgtcgactcaacaagctctgaaagccttagggagatcaggagggagatctgtccttggaccccttccatcgccttcctagacaggaacattcctgaatgttgcccccaggcctgactttttttttaggtttccctctcttcctgcctttgggctagggggacaaggaataacagggtgagaggaccaagttgaaactaagtgtgatactctggaagcatcttccatgtctgtcccagcttctcacccactttctgagatgccctcctaaagtctctgcctgtttcttggagggaacctctgcatctgtgacacctactctatgacccctggggactgacagtaaaggaagggatgatgcttcagggagcagatagtgtaatctgatagtactcaggcatagctaggcctgcccttgcccctgcaggttgtcagtgatggtgtacccctggtgctagccctggtcccccaccggcagccccactccttcatcacccagggttccccagacctgttggtaagtgcattgtgcagagccccagctcagctccactcccccttgcctctgccagaaacccacctctgccccctcctgcctgcaggtgactgtgagtgccagtgggctgctgggcacccacagctggttgccctatgaccgcaacataagcaactacttcagcttcagcaaagaccccaccatgggcagccacaagtaggacagagggctgtgggtggggtgggctacaaatgccctgcacccggaattattcccctccctaatcagaatgtaggccagctgcaggggaaaggtctggccaggctccctgagggcctgggtctcttccatgtggcctggcctcacttgctatccccctcactgggtcaggacgcagcgactgctgagtggcccgtgggtgccaggcagtggtgtgagtggacaagcactggcagtggccccggatggaaagctgctattcagcggtggccactgggatggcagcctgcgggtgactgcactaccccgtggcaagctgttgagccagctcagctgccaccttggtatgaacagccttggagctggggagaatgaggcacacaggtatggggccgggttctgaggctggccagggcggatgtgactcctccgttctgcctgtaccctccccttcccatgcagatgtagtaacctgccttgcactggacacctgtggcatctacctcatctcaggctcccgggacaccacgtgcatggtgtggcggctcctgcatcaggtgtgcctcgtgggcagctctgtggggcccccgtagcccagacctgcagcccatccgtccctcagtggccttccagtcctgtcctcctctagtcttggacaaggccttcatttcctgagcctcaggggacagtcctaagccaaccctggtcctccacagggtggtctgtcagtaggcctggcaccaaagcctgtgcaggtcctgtatgggcatggggctgcagtgagctgtgtggccatcagcactgaacttgacatggctgtgtctggatctgaggtgtgtgtatgcatgtgccctggggagggtgagtttcctgggcaatccccctggagcccagactcctgcccaggaccctaagttgccttcctgcaggatggaactgtgatcatacacactgtacgccgcggacagtttgtagcggcactacggcctctgggtgccacattccctggacctattttccacctggcattggggtccgaaggccagattgtggtacagagctcagcgtgggaacgtcctggggcccaggtatggggaaggggtgcccagcaaagatggaggggcagttgggatcctgtccttgctgacactccctgcttcctccaggtcacctactccttgcacctgtattcagtcaatgggaagttgcgggcttcactgcccctggcagagcagcctacagccctgacggtgacagaggactttgtgttgctgggcaccgcccagtgcgccctgcacatcctccaactaaacacgtaagccccccatttatgggttcatggcccctgaaggtggtggtcattggtgtaggataaaggccctaggaacccacacaccatacatgtttgtgggcacatatttcaaggtttgttacctgtcccttcatcttcccatggggaggtcttgccctgggcctccgcttagccacagttgtgggagatttctttgtgtataagaatttcaatttaaccatccttaaaatgaggacagagagggtatatgggataagggatatctgctggtcgcaaagcccccttgcagtcgcaagttggtgtatatcccctctcccttccagactgctcccggccgcgcctcccttgcccatgaaggtggccatccgcagcgtggccgtgaccaaggagcgcagccacgtgctggtgggcctggaggatggcaagctcatcgtggtggtcgcggggcagccctctgaggtgaggatggggcgggggtggggaggcccctcgaacggggcggggcgtggcgcggcgatcccagctgatcctactcaacccttacgcccaccaggtgcgcagcagccagttcgcgcggaagctgtggcggtcctcgcggcgcatctcccaggtgtcctcgggagagacggaatacaaccctactgaggcgcgctgaacctggccagtccggctgctcgggccccgcccccggcaggcctggcccgggaggccccgcccagaagtcggcgggaacaccccggggtgggcagcccaggggggtgagcggggcccaccctgcccagctcagggattggcgggcgatgttaccccctcagggattggcgggcggaagtcccgcccctcgccggctgaggggccgccctgagggccagcactggcgtct

SEQ ID NO: 12931 - DNA, 3508 bp, Homo sapiens
gctgaacacctcttccttggagtcagccactgatgaggcagggtccccacttgcagctgcagcagctgcagcagctgcagagcgctgctcctggctggtgccactggtgcgcacgctgctagaccgtgcctatgagccgctggggctgcagtggggactgccctccctgccacccaccaatggcagccccaccttctttgaagacttccaggctttttgtgccacacccgaatggcgccacttcatcgacaaacaggtacagccaaccatgtcccagttcgaaatggacacgtatgctaagagccacgaccttatgtcaggtttctggaatgcctgctatgacatgcttatgagcagtgggcagcggcgccagtgggagcgcgcccagagtcgtcgggccttccaggagctggtgctggaacctgcgcagaggcgggcgcgcctggaggggctacgctacacggcagtgctgaagcagcaggcaacgcagcactccatggccctgctgcactggggggcgctgtggcgccagctcgccagcccatgtggggcctgggcgctgagggacactcccatcccccgctggaaactgtccagcgccgagacatattcacgcatgcgtctgaagctggtgcccaaccatcacttcgaccctcacctggaagccagcgctctccgagacaatctgggtgaggttcccctgacacccaccgaggaggcctcactgcctctggcagtgaccaaagaggccaaagtgagcaccccacccgagttgctgcaggaggaccagctcggcgaggacgagctggctgagctggagaccccgatggaggcagcagaactggatgagcagcgtgagaagctggtgctgtcggccgagtgccagctggtgacggtagtggccgtggtcccagggctgctggaggtcaccacacagaatgtatacttctacgatggcagcactgagcgcgtggaaaccgaggagggcatcggctatgatttccggcgcccactggcccagctgcgtgaggtccacctgcggcgtttcaacctgcgccgttcagcacttgagctcttctttatcgatcaggccaactacttcctcaacttcccatgcaaggtgggcacgaccccagtctcatctcctagccagactcccagaccccagcctggccccatcccaccccatacccaggtacggaaccaggtgtactcgtggctcctgcgcctacggcccccctctcaaggctacctaagcagccgctccccccaggagatgctgcgtgcctcaggccttacccagaaatgggtacagcgtgagatatccaacttcgagtacttgatgcaactcaacaccattgcggggcggacctacaatgacctgtctcagtaccctgtgttcccctgggtcctgcaggactacgtgtccccaaccctggacctcagcaacccagccgtcttccgggacctgtctaagcccatcggtgtggtgaaccccaagcatgcccagctcgtgagggagaagtatgaaagctttgaggacccagcagggaccattgacaagttccactatggcacccactactccaatgcagcaggcgtgatgcactacctcatccgcgtggagcccttcacctccctgcacgtccagctgcaaagtggccgctttgactgctccgaccggcagttccactcggtggcggcagcctggcaggcacgcctggagagccctgccgatgtgaaggagctcatcccggaattcttctactttcctgacttcctggagaaccagaacggttttgacctgggctgtctccagctgaccaacgagaaggtaggcgatgtggtgctacccccgtgggccagctctcctgaggacttcatccagcagcaccgccaggctctggagtcggagtatgtgtctgcacacctacacgagtggatcgacctcatctttggctacaagcagcgggggccagccgccgaggaggccctcaatgtcttctattactgcacctatgagggggctgtagacctggaccatgtgacagatgagcgggaacggaaggctctggagggcattatcagcaactttgggcagactccctgtcagctgctgaaggagccacatccaactcggctctcagctgaggaagcagcccatcgccttgcacgcctggacactaactcacctagcatcttccagcacctggacgaactcaaggcattcttcgcagaggtgactgtgagtgccagtgggctgctgggcacccacagctggttgccctatgaccgcaacataagcaactacttcagcttcagcaaagaccccaccatgggcagccacaagacgcagcgactgctgagtggcccgtgggtgccaggcagtggtgtgagtggacaagcactggcagtggccccggatggaaagctgctattcagcggtggccactgggatggcagcctgcgggtgactgcactaccccgtggcaagctgttgagccagctcagctgccaccttgatgtagtaacctgccttgcactggacacctgtggcatctacctcatctcaggctcccgggacaccacgtgcatggtgtggcggctcctgcatcagggtggtctgtcagtaggcctggcaccaaagcctgtgcaggtcctgtatgggcatggggctgcagtgagctgtgtggccatcagcactgaacttgacatggctgtgtctggatctgaggatggaactgtgatcatacacactgtacgccgcggacagtttgtagcggcactacggcctctgggtgccacattccctggacctattttccacctggcattggggtccgaaggccagattgtggtacagagctcagcgtgggaacgtcctggggcccaggtcacctactccttgcacctgtattcagtcaatgggaagttgcgggcttcactgcccctggcagagcagcctacagccctgacggtgacagaggactttgtgttgctgggcaccgcccagtgcgccctgcacatcctccaactaaacacactgctcccggccgcgcctcccttgcccatgaaggtggccatccgcagcgtggccgtgaccaaggagcgcagccacgtgctggtgggcctggaggatggcaagctcatcgtggtggtcgcggggcagccctctgaggtgcgcagcagccagttcgcgcggaagctgtggcggtcctcgcggcgcatctcccaggtgtcctcgggagagacggaatacaaccctactgaggcgcgctgaacctggccagtccggctgctcgggccccgcccccggcaggcctggcccgggaggccccgcccagaagtcggcgggaacaccccggggtgggcagcccaggggggtgagcggggcccaccctgcccagctcagggattggcgggcgatgttaccccctcagggattggcgggcggaagtcccgcccctcgccggctgaggggccgccctgagggccagcactggcgtct

SEQ ID NO: 12932 - DNA, 8842 bp, Homo sapiens
agtgaggaggaggagcgagcagacttgggtggctctgcgccgcggaggccacagccgcagacttccccagtagtaccgcgccgctccgccccggagtgacgccctccgcccatgggcctggccgagggcaaccggcgggcggcgcggaggaggcggcgacaggtggcgcgcagcagggccggagccgggccgggccatggccgcctcggagcggctgtacgagttgtggctgctctactacgcgcagaaggacctgggttacctgcagcagtggctgaaggcctttgtaggtgccttcaagaagagcatctcactgtcctctctggagccacgaaggccagaggaggcaggtgcagaggtcccgctgctaccactggatgagctgcatgtgctggccgaacagctgcaccaggctgacctggagcaagccctcctgctgctcaagctcttcatcattctctgcaggaacctggagaacatagaggcaggccggggccaagtgctagtgccccgagtgctggcactgttgaccaagttggtggcggagctgaaaggatgcccaccaccccagggccgaggcacgcagttggagaatgtggccctacatgctctgcttctctgcgagggcctctttgacccttaccaaacctggcggcgccagcgcagtggggaagtcatcagctccaaggagaagagcaaatacaagttccctcctgctgctttgccccaggaattcagcgccttcttccaagagagcctacagaatgcagaccacttgcctcccatactgctgttacgtctcatccacctcttctgcgccgtcctcgctggaggaaaggagaacgggcagatggctgtaagtgatggctctgtgaagggcctgctgagtgtggtgcggggctggagccgtgggccagccccggacccgtgcctagtgccactggctctagaggcactggtaggtgcagtccatgtcttgcatgccagccgcgcacctcctcgtggcccagagcttcgtgccctgcttgagagctacttccatgtccttaatgctgactggccagctggtctgagctcaggccccgaagaggcccttgtcaccctccgggtcagcatgctcgacgccatccccatgatgctggcatgtgaagaccggccagtgctgcaagccaccttcctcagcaacaattgctttgaacacctcactcggctcattcagaacagcaagctgtacctgcagtcccgggcgccccccgagggggacagtgacctggctacccggttactgactgagcccgatgtccaaaaggtcctggaccaagacacagacgccattgcagtccatgtagtcagagtgctgacctgcatcatgagtgactccccctcggccaaggaggtgtttaaggagcgcatcggctaccctcacctgcaggaggttctgcagagccatggtccccccacccatcggctgttgcaagagctgctcaacatggctgtggagggtgaccacagcatgtgcccacctccaccaatccgcaacgagcagccggtactggtgctggcgcagtggctgccgtcattgcccaccgctgagctgcggctcttcctagcgcaacgcctcaggtggctctgtgacagctgccctgccagccgtgccacctgtgtgcaggcaggcctggtgggctgcctgttggagacactcagcacagggctagccctggaggcccgctgccaagagcagctgctggcactgctacaagcactgggccgtgtatcaataaggcccatggagctgcgtcacctgctgcgcccccggccaggattggactcggaaccaggcggagctgaggctggaaaggcccgacacgcaggtgctgtcatccgcacattatcaggcatggccaggcaccagggtcctgcacgtgctctgcgctactttgacctcacgcccagcatggcgggcatcatggtaccccctgtacagcgatggccagggcctggcttcacctttcatgcctggctctgtctgcaccctatggatacagcacctacccctgcccccacccgaccactccagcgaaagcagctgtacagcttctttaccagcagcggctcagggtttgaggccttcttcacggcggccgggaccctggtggtggctgtgtgcacacggaaggagtatttgaccatgagtttgcccgaagtgtcctttgccgactctgcctggcactgcgtggctatcgtccatgtgcctgggcgccggcccttcagccagaacctggtccatgtctacaaagacggccatctggtcaagacagcaccccttcgctgcccctccctcagtgagcctttctcctcctgctgtatcggctccgctggataccgcacaacgaccaccaccacagggctgcccacaccaccagtccccgccaccctggcctacactcaccccgccctcacccgctcccagtcagtcccagcctccacagggcttggctgggggtccgggctggtggcccccctgcaggagggcagcatcgactctaccctcgcaggcacccaggacactcggtggggcagccccacatccctggagggtgagctgggggctgtggccatctttcacgaagccctgcaggcgacggctctgaggaccctgtgcaccctggggcccaatgagacggcacccttcaagcctgagggggagctgcatgagctcagcaccaggctgctcctccattactcacctcaggcttgtaagaacaacatctgcctggacctgtcccccagtcatgggcttgatgggcgcctgacgggccacagagtggagacctgggatgtgaaggatgtggtgaactgcgttgggggtatgggtgccctgctgcccctgctggagcgagtagctgcacagcccaaagaggctgaagcaggtccagctgaaacgcatgacctcgtgggtcctgaactgacctctggtcacaacacccagggcctggttctcccattgggtaaatcttcagaggaacggatggagaggaacgcagtggctgcttttctgctgatgctgcggaacttccttcagggtcacatggtgaaccaagagagcctggtgcagtgccaggggcctgccatcatcggggccctcctgcgaaaggtcccaagctgggccatggacatgaacgtgctcatgtccgcccagctgctgatggagcaggtggcagctgagggcagcgggcccctcctgtacctactctaccagcatttgctcttcaactttcacctctggaccctcagtgacttcgccgtgcgcctcggtcacatccagtacatgtccagcatagttcgggagcacagacagaagctgcggaagaagtacggcgtccagtttatcttggatgctctgcgcacccactacagcccgcagcgggagcgccccctggctgctgacgacctacgcaccgtgcagacctccctcctgggcctggcgagggagttcctggtgcggagtctctcagcagatgacgtgcaggtcacgcagaccatgctgagctttttggcggccacaggcgatgacggtcaggcggtgggtgcgctggacctgctgctggccctgctgcacggttccctggtgcaggagtccttggctgtctttctgttggagccagggaacctcgaagtgctactggccctgctagtgcggccagggtcactgcccctgctgcccgatcgagtctgcaagatcctgcgcagactgcagcagaatgagcggctacctgagcggagccgccagcgcctccggctgcgggagtgtggtctccagggtctggttgcctgcttgcctgaggggactgtttccccccagctctgccagggcctctacaagctgttcctgggggcagattgcctgaacctctcagatctgctggctgtggtacagctgtccctccaggctgacctcagcgttcgcctagacatctgtcgccagcttttccacctcatctacggacagccagatgtagtgcggcttctggcccgacaggctggctggcaagatgtgctgacccggctatatgtcctggaggctgccacagccggcagcccccctccgtcttccccagagtcacctacctcccccaagccagccccacccaagccacccactgagtcacctgctgagccttcagatgtcttcctgccctcagaggccccctgccctgaccctgatggcttttaccatgctctctccccattctgcacgccctttgacctgggcctggaacggtctagtgtaggatcaggcaacactgctggtggtggcggcagcagtgggactcttactccagccagccagcccggcactccttcgccactggatgggccgcggccctttcctgctgctcctggccgccacagctccagtctctccaatgtgctggaggacggcagcctcccggagcccaccattagcggggatgatacctcgaacaccagcaacccacagcaaacctctgaggaagagttgtgcaatctgctcaccaacgtgctgttctcggtgacgtggcgtggcgtggaaggcagcgatgaggctgcctggcgggagcgtggccaggttttctcagtgctcacccagctgggggcctcagccacacttgtgcgcccaccagactgcatcaagcgcagcctcctggagatgatgctggagtcagccctgaccgacatcaaagaggcccccgtgggggtcctggccagcctcacccagcaagcgctttggctgctgcgtctgctgcaggacttcctgtgtgctgaaggccatggtaaccaggaactgtggagtgagaagctctttgaaggtgtatgcagcctacttgatcgcctgggagcctggccccacctggccaacggcacagctgatctccgtgagatggcgcagattggcctacggcttgtacttggctacatcctgctggaagacccacagctgcatgcccaggcctacgtgagattgcacatgctgctacagactgcagtgccagcccgccgcgaggaggcctgctatgtgctctccaagctggaggctgcactggggcgggtgctgaacacctcttccttggagtcagccactgatgaggcagggtccccacttgcagctgcagcagctgcagcagctgcagagcgctgctcctggctggtgccactggtgcgcacgctgctagaccgtgcctatgagccgctggggctgcagtggggactgccctccctgccacccaccaatggcagccccaccttctttgaagacttccaggctttttgtgccacacccgaatggcgccacttcatcgacaaacaggtacagccaaccatgtcccagttcgaaatggacacgtatgctaagagccacgaccttatgtcaggtttctggaatgcctgctatgacatgcttatgagcagtgggcagcggcgccagtgggagcgcgcccagagtcgtcgggccttccaggagctggtgctggaacctgcgcagaggcgggcgcgcctggaggggctacgctacacggcagtgctgaagcagcaggcaacgcagcactccatggccctgctgcactggggggcgctgtggcgccagctcgccagcccatgtggggcctgggcgctgagggacactcccatcccccgctggaaactgtccagcgccgagacatattcacgcatgcgtctgaagctggtgcccaaccatcacttcgaccctcacctggaagccagcgctctccgagacaatctgggtgaggttcccctgacacccaccgaggaggcctcactgcctctggcagtgaccaaagaggccaaagtgagcaccccacccgagttgctgcaggaggaccagctcggcgaggacgagctggctgagctggagaccccgatggaggcagcagaactggatgagcagcgtgagaagctggtgctgtcggccgagtgccagctggtgacggtagtggccgtggtcccagggctgctggaggtcaccacacagaatgtatacttctacgatggcagcactgagcgcgtggaaaccgaggagggcatcggctatgatttccggcgcccactggcccagctgcgtgaggtccacctgcggcgtttcaacctgcgccgttcagcacttgagctcttctttatcgatcaggccaactacttcctcaacttcccatgcaaggtgggcacgaccccagtctcatctcctagccagactcccagaccccagcctggccccatcccaccccatacccaggtacggaaccaggtgtactcgtggctcctgcgcctacggcccccctctcaaggctacctaagcagccgctccccccaggagatgctgcgtgcctcaggccttacccagaaatgggtacagcgtgagatatccaacttcgagtacttgatgcaactcaacaccattgcggggcggacctacaatgacctgtctcagtaccctgtgttcccctgggtcctgcaggactacgtgtccccaaccctggacctcagcaacccagccgtcttccgggacctgtctaagcccatcggtgtggtgaaccccaagcatgcccagctcgtgagggagaagtatgaaagctttgaggacccagcagggaccattgacaagttccactatggcacccactactccaatgcagcaggcgtgatgcactacctcatccgcgtggagcccttcacctccctgcacgtccagctgcaaagtggccgctttgactgctccgaccggcagttccactcggtggcggcagcctggcaggcacgcctggagagccctgccgatgtgaaggagctcatcccggaattcttctactttcctgacttcctggagaaccagaacggttttgacctgggctgtctccagctgaccaacgagaaggtaggcgatgtggtgctacccccgtgggccagctctcctgaggacttcatccagcagcaccgccaggctctggagtcggagtatgtgtctgcacacctacacgagtggatcgacctcatctttggctacaagcagcgggggccagccgccgaggaggccctcaatgtcttctattactgcacctatgagggggctgtagacctggaccatgtgacagatgagcgggaacggaaggctctggagggcattatcagcaactttgggcagactccctgtcagctgctgaaggagccacatccaactcggctctcagctgaggaagcagcccatcgccttgcacgcctggacactaactcacctagcatcttccagcacctggacgaactcaaggcattcttcgcagaggttgtcagtgatggtgtacccctggtgctagccctggtcccccaccggcagccccactccttcatcacccagggttccccagacctgttggtgactgtgagtgccagtgggctgctgggcacccacagctggttgccctatgaccgcaacataagcaactacttcagcttcagcaaagaccccaccatgggcagccacaagacgcagcgactgctgagtggcccgtgggtgccaggcagtggtgtgagtggacaagcactggcagtggccccggatggaaagctgctattcagcggtggccactgggatggcagcctgcgggtgactgcactaccccgtggcaagctgttgagccagctcagctgccaccttgatgtagtaacctgccttgcactggacacctgtggcatctacctcatctcaggctcccgggacaccacgtgcatggtgtggcggctcctgcatcagggtggtctgtcagtaggcctggcaccaaagcctgtgcaggtcctgtatgggcatggggctgcagtgagctgtgtggccatcagcactgaacttgacatggctgtgtctggatctgaggatggaactgtgatcatacacactgtacgccgcggacagtttgtagcggcactacggcctctgggtgccacattccctggacctattttccacctggcattggggtccgaaggccagattgtggtacagagctcagcgtgggaacgtcctggggcccaggtcacctactccttgcacctgtattcagtcaatgggaagttgcgggcttcactgcccctggcagagcagcctacagccctgacggtgacagaggactttgtgttgctgggcaccgcccagtgcgccctgcacatcctccaactaaacacactgctcccggccgcgcctcccttgcccatgaaggtggccatccgcagcgtggccgtgaccaaggagcgcagccacgtgctggtgggcctggaggatggcaagctcatcgtggtggtcgcggggcagccctctgaggtgcgcagcagccagttcgcgcggaagctgtggcggtcctcgcggcgcatctcccaggtgtcctcgggagagacggaatacaaccctactgaggcgcgctgaacctggccagtccggctgctcgggccccgcccccggcaggcctggcccgggaggccccgcccagaagtcggcgggaacaccccggggtgggcagcccaggggggtgagcggggcccaccctgcccagctcagggattggcgggcgatgttaccccctcagggattggcgggcggaagtcccgcccctcgccggctgaggggccgccctgagggccagcactggcgtctgcggccgcagcagcactttttgcacagtctggggcggggttccccggcttccaagtcgctgtttcgtcaaagcacgagggccgcctgtggccttaattcctaacggcggccccggttctcccttctcggcaataaaccaggcctagttttgta

SEQ ID NO: 12933 - DNA, 988 bp, Homo sapiens
ccccactccttcatcacccagggttccccagacctgttggtaagtgcattgtgcagagccccagctcagctccactcccccttgcctctgccagaaacccacctctgccccctcctgcctgcaggtgactgtgagtgccagtgggctgctgggcacccacagctggttgccctatgaccgcaacataagcaactacttcagcttcagcaaagaccccaccatgggcagccacaagtaggacagagggctgtgggtggggtgggctacaaatgccctgcacccggaattattcccctccctaatcagaatgtaggccagctgcaggggaaaggtctggccaggctccctgagggcctgggtctcttccatgtggcctggcctcacttgctatccccctcactgggtcaggacgcagcgactgctgagtggcccgtgggtgccaggcagtggtgtgagtggacaagcactggcagtggccccggatggaaagctgctattcagcggtggccactgggatggcagcctgcgggtgactgcactaccccgtggcaagctgttgagccagctcagctgccaccttggtatgaacagccttggagctggggagaatgaggcacacaggtatggggccgggttctgaggctggccagggcggatgtgactcctccgttctgcctgtaccctccccttcccatgcagatgtagtaacctgccttgcactggacacctgtggcatctacctcatctcaggctcccgggacaccacgtgcatggtgtggcggctcctgcatcaggtgtgcctcgtgggcagctctgtggggcccccgtagcccagacctgcagcccatccgtccctcagtggccttccagtcctgtcctcctctagtcttggacaaggccttcatttcctgagcctcaggggacagtcctaagccaaccctggtcctccacagggtggtctgtcagtaggcctggcaccaaagcctgt

SEQ ID NO: 12934 - DNA, 785 bp, Homo sapiens
ccccactccttcatcacccagggttccccagacctgttggtgactgtgagtgccagtgggctgctgggcacccacagctggttgccctatgaccgcaacataagcaactacttcagcttcagcaaagaccccaccatgggcagccacaagtaggacagagggctgtgggtggggtgggctacaaatgccctgcacccggaattattcccctccctaatcagaatgtaggccagctgcaggggaaaggtctggccaggctccctgagggcctgggtctcttccatgtggcctggcctcacttgctatccccctcactgggtcaggacgcagcgactgctgagtggcccgtgggtgccaggcagtggtgtgagtggacaagcactggcagtggccccggatggaaagctgctattcagcggtggccactgggatggcagcctgcgggtgactgcactaccccgtggcaagctgttgagccagctcagctgccaccttgatgtagtaacctgccttgcactggacacctgtggcatctacctcatctcaggctcccgggacaccacgtgcatggtgtggcggctcctgcatcaggtgtgcctcgtgggcagctctgtggggcccccgtagcccagacctgcagcccatccgtccctcagtggccttccagtcctgtcctcctctagtcttggacaaggccttcatttcctgagcctcaggggacagtcctaagccaaccctggtcctccacagggtggtctgtcagtaggcctggcaccaaagcctgt

SEQ ID NO: 12935 - DNA, 636 bp, Homo sapiens
ccagggcggatgtgactcctccgttctgcctgtaccctccccttcccatgcagatgtagtaacctgccttgcactggacacctgtggcatctacctcatctcaggctcccgggacaccacgtgcatggtgtggcggctcctgcatcaggtgtgcctcgtgggcagctctgtggggcccccgtagcccagacctgcagcccatccgtccctcagtggccttccagtcctgtcctcctctagtcttggacaaggccttcatttcctgagcctcaggggacagtcctaagccaaccctggtcctccacagggtggtctgtcagtaggcctggcaccaaagcctgtgcaggtcctgtatgggcatggggctgcagtgagctgtgtggccatcagcactgaacttgacatggctgtgtctggatctgaggtgtgtgtatgcatgtgccctggggagggtgagtttcctgggcaatccccctggagcccagactcctgcccaggaccctaagttgccttcctgcaggatggaactgtgatcatacacactgtacgccgcggacagtttgtagcggcactacggcctctgggtgccacattccctggacctattttccacctggcattggggtccgaaggcca

SEQ ID NO: 12936 - DNA, 540 bp, Homo sapiens
ccagggcggatgtgactcctccgttctgcctgtaccctccccttcccatgcagatgtagtaacctgccttgcactggacacctgtggcatctacctcatctcaggctcccgggacaccacgtgcatggtgtggcggctcctgcatcaggtgtgcctcgtgggcagctctgtggggcccccgtagcccagacctgcagcccatccgtccctcagtggccttccagtcctgtcctcctctagtcttggacaaggccttcatttcctgagcctcaggggacagtcctaagccaaccctggtcctccacagggtggtctgtcagtaggcctggcaccaaagcctgtgcaggtcctgtatgggcatggggctgcagtgagctgtgtggccatcagcactgaacttgacatggctgtgtctggatctgaggatggaactgtgatcatacacactgtacgccgcggacagtttgtagcggcactacggcctctgggtgccacattccctggacctattttccacctggcattggggtccgaaggcca

SEQ ID NO: 12937 - DNA, 1020 bp, Homo sapiens
ctcccttagccgcccacaacccacgcccacaccacccacctgtgcccacagcaaacctctgaggaagagttgtgcaatctgctcaccaacgtgctgttctcggtgacgtggcgtggcgtggaaggcagcgatgaggctgcctggcgggagcgtggccaggttttctcagtgctcacccagctgggggcctcagccacacttgtgcgcccaccagactgcatcaagcgcaggtgagagggaaagtctggagggggaggggcttcaggaagcctcgggggaaggagagaagatagtcaggtagacccttgagttccccactcacccgccagcctcctggagatgatgctggagtcagccctgaccgacatcaaagaggcccccgtgggggtcctggccagcctcacccagcaagcgctttggctgctgcgtctgctgcaggacttcctgtgtgctgaaggccatggtaaccaggaactgtggagtgagaaggtgcgacccctcagagaggcgtgagccacatgaacactcatgttcatgcaagcctgcagggatctggtctgggaggtggatgggtacacgtgcgcaggtgtgggtgcatcagcatgaatgcctgtgagtgtggacttgcctgtgtgcacaaaccctacctggcccccagcgcaaactttactttgctccctttccatggactcctggcctcccctggtgatgtctgttgggaacctgttttctgtggcagctctttgaaggtgtatgcagcctacttgatcgcctgggagcctggccccacctggccaacggcacagctgatctccgtgagatggcgcagattggcctacggcttgtacttggctacatcctgctggaagacccacaggtgagcacagggtgagcatgggggcagggggcgtgtgagatgtcgggagctccaagagtggctgggtgccactcatctctcttgcgcccacagctgcatgcccaggcctacgtgagattgcacatgctgctacagactgcagt

SEQ ID NO: 12938 - DNA, 677 bp, Homo sapiens
ctcccttagccgcccacaacccacgcccacaccacccacctgtgcccacagcaaacctctgaggaagagttgtgcaatctgctcaccaacgtgctgttctcggtgacgtggcgtggcgtggaaggcagcgatgaggctgcctggcgggagcgtggccaggttttctcagtgctcacccagctgggggcctcagccacacttgtgcgcccaccagactgcatcaagcgcaggtgagagggaaagtctggagggggaggggcttcaggaagcctcgggggaaggagagaagatagtcaggtagacccttgagttccccactcacccgccagcctcctggagatgatgctggagtcagccctgaccgacatcaaagaggcccccgtgggggtcctggccagcctcacccagcaagcgctttggctgctgcgtctgctgcaggacttcctgtgtgctgaaggccatggtaaccaggaactgtggagtgagaagctctttgaaggtgtatgcagcctacttgatcgcctgggagcctggccccacctggccaacggcacagctgatctccgtgagatggcgcagattggcctacggcttgtacttggctacatcctgctggaagacccacagctgcatgcccaggcctacgtgagattgcacatgctgctacagactgcagt

SEQ ID NO: 12939 - DNA, 2077 bp, Homo sapiens
cccttgcccctgcaggttgtcagtgatggtgtacccctggtgctagccctggtcccccaccggcagccccactccttcatcacccagggttccccagacctgttggtaagtgcattgtgcagagccccagctcagctccactcccccttgcctctgccagaaacccacctctgccccctcctgcctgcaggtgactgtgagtgccagtgggctgctgggcacccacagctggttgccctatgaccgcaacataagcaactacttcagcttcagcaaagaccccaccatgggcagccacaagtaggacagagggctgtgggtggggtgggctacaaatgccctgcacccggaattattcccctccctaatcagaatgtaggccagctgcaggggaaaggtctggccaggctccctgagggcctgggtctcttccatgtggcctggcctcacttgctatccccctcactgggtcaggacgcagcgactgctgagtggcccgtgggtgccaggcagtggtgtgagtggacaagcactggcagtggccccggatggaaagctgctattcagcggtggccactgggatggcagcctgcgggtgactgcactaccccgtggcaagctgttgagccagctcagctgccaccttggtatgaacagccttggagctggggagaatgaggcacacaggtatggggccgggttctgaggctggccagggcggatgtgactcctccgttctgcctgtaccctccccttcccatgcagatgtagtaacctgccttgcactggacacctgtggcatctacctcatctcaggctcccgggacaccacgtgcatggtgtggcggctcctgcatcaggtgtgcctcgtgggcagctctgtggggcccccgtagcccagacctgcagcccatccgtccctcagtggccttccagtcctgtcctcctctagtcttggacaaggccttcatttcctgagcctcaggggacagtcctaagccaaccctggtcctccacagggtggtctgtcagtaggcctggcaccaaagcctgtgcaggtcctgtatgggcatggggctgcagtgagctgtgtggccatcagcactgaacttgacatggctgtgtctggatctgaggtgtgtgtatgcatgtgccctggggagggtgagtttcctgggcaatccccctggagcccagactcctgcccaggaccctaagttgccttcctgcaggatggaactgtgatcatacacactgtacgccgcggacagtttgtagcggcactacggcctctgggtgccacattccctggacctattttccacctggcattggggtccgaaggccagattgtggtacagagctcagcgtgggaacgtcctggggcccaggtatggggaaggggtgcccagcaaagatggaggggcagttgggatcctgtccttgctgacactccctgcttcctccaggtcacctactccttgcacctgtattcagtcaatgggaagttgcgggcttcactgcccctggcagagcagcctacagccctgacggtgacagaggactttgtgttgctgggcaccgcccagtgcgccctgcacatcctccaactaaacacgtaagccccccatttatgggttcatggcccctgaaggtggtggtcattggtgtaggataaaggccctaggaacccacacaccatacatgtttgtgggcacatatttcaaggtttgttacctgtcccttcatcttcccatggggaggtcttgccctgggcctccgcttagccacagttgtgggagatttctttgtgtataagaatttcaatttaaccatccttaaaatgaggacagagagggtatatgggataagggatatctgctggtcgcaaagcccccttgcagtcgcaagttggtgtatatcccctctcccttccagactgctcccggccgcgcctcccttgcccatgaaggtggccatccgcagcgtggccgtgaccaaggagcgcagccacgtgctggtgggcctggaggatggcaagctcatcgtggtggtcgcggggcagccctctgaggtg

SEQ ID NO: 12940 - DNA, 959 bp, Homo sapiens
cccttgcccctgcaggttgtcagtgatggtgtacccctggtgctagccctggtcccccaccggcagccccactccttcatcacccagggttccccagacctgttggtaagtgcattgtgcagagccccagctcagctccactcccccttgcctctgccagaaacccacctctgccccctcctgcctgcaggtgactgtgagtgccagtgggctgctgggcacccacagctggttgccctatgaccgcaacataagcaactacttcagcttcagcaaagaccccaccatgggcagccacaaatgtagtaacctgccttgcactggacacctgtggcatctacctcatctcaggctcccgggacaccacgtgcatggtgtggcggctcctgcatcagggtggtctgtcagtaggcctggcaccaaagcctgtgcaggtcctgtatgggcatggggctgcagtgagctgtgtggccatcagcactgaacttgacatggctgtgtctggatctgaggatggaactgtgatcatacacactgtacgccgcggacagtttgtagcggcactacggcctctgggtgccacattccctggacctattttccacctggcattggggtccgaaggccagattgtggtacagagctcagcgtgggaacgtcctggggcccaggtcacctactccttgcacctgtattcagtcaatgggaagttgcgggcttcactgcccctggcagagcagcctacagccctgacggtgacagaggactttgtgttgctgggcaccgcccagtgcgccctgcacatcctccaactaaacacactgctcccggccgcgcctcccttgcccatgaaggtggccatccgcagcgtggccgtgaccaaggagcgcagccacgtgctggtgggcctggaggatggcaagctcatcgtggtggtcgcggggcagccctctgaggtg

SEQ ID NO: 12941 - DNA, 1278 bp, Homo sapiens
gcaaagaccccaccatgggcagccacaagtaggacagagggctgtgggtggggtgggctacaaatgccctgcacccggaattattcccctccctaatcagaatgtaggccagctgcaggggaaaggtctggccaggctccctgagggcctgggtctcttccatgtggcctggcctcacttgctatccccctcactgggtcaggacgcagcgactgctgagtggcccgtgggtgccaggcagtggtgtgagtggacaagcactggcagtggccccggatggaaagctgctattcagcggtggccactgggatggcagcctgcgggtgactgcactaccccgtggcaagctgttgagccagctcagctgccaccttggtatgaacagccttggagctggggagaatgaggcacacaggtatggggccgggttctgaggctggccagggcggatgtgactcctccgttctgcctgtaccctccccttcccatgcagatgtagtaacctgccttgcactggacacctgtggcatctacctcatctcaggctcccgggacaccacgtgcatggtgtggcggctcctgcatcaggtgtgcctcgtgggcagctctgtggggcccccgtagcccagacctgcagcccatccgtccctcagtggccttccagtcctgtcctcctctagtcttggacaaggccttcatttcctgagcctcaggggacagtcctaagccaaccctggtcctccacagggtggtctgtcagtaggcctggcaccaaagcctgtgcaggtcctgtatgggcatggggctgcagtgagctgtgtggccatcagcactgaacttgacatggctgtgtctggatctgaggtgtgtgtatgcatgtgccctggggagggtgagtttcctgggcaatccccctggagcccagactcctgcccaggaccctaagttgccttcctgcaggatggaactgtgatcatacacactgtacgccgcggacagtttgtagcggcactacggcctctgggtgccacattccctggacctattttccacctggcattggggtccgaaggccagattgtggtacagagctcagcgtgggaacgtcctggggcccaggtatggggaaggggtgcccagcaaagatggaggggcagttgggatcctgtccttgctgacactccctgcttcctccaggtcacctactccttgcacctgtattcagtcaatgggaagttgcgggcttcactgcccctggcagagcagcctacagccctg

SEQ ID NO: 12942 - DNA, 827 bp, Homo sapiens
gcaaagaccccaccatgggcagccacaagtaggacagagggctgtgggtggggtgggctacaaatgccctgcacccggaattattcccctccctaatcagaatgtaggccagctgcaggggaaaggtctggccaggctccctgagggcctgggtctcttccatgtggcctggcctcacttgctatccccctcactgggtcaggacgcagcgactgctgagtggcccgtgggtgccaggcagtggtgtgagtggacaagcactggcagtggccccggatggaaagctgctattcagcggtggccactgggatggcagcctgcgggtgactgcactaccccgtggcaagctgttgagccagctcagctgccaccttgatgtagtaacctgccttgcactggacacctgtggcatctacctcatctcaggctcccgggacaccacgtgcatggtgtggcggctcctgcatcagggtggtctgtcagtaggcctggcaccaaagcctgtgcaggtcctgtatgggcatggggctgcagtgagctgtgtggccatcagcactgaacttgacatggctgtgtctggatctgaggatggaactgtgatcatacacactgtacgccgcggacagtttgtagcggcactacggcctctgggtgccacattccctggacctattttccacctggcattggggtccgaaggccagattgtggtacagagctcagcgtgggaacgtcctggggcccaggtcacctactccttgcacctgtattcagtcaatgggaagttgcgggcttcactgcccctggcagagcagcctacagccctg

SEQ ID NO: 12943 - DNA, 1644 bp, Homo sapiens
ccctgcccctctgacctgtcagcccttggttcccccaagtgtaggtacctgccagtgggccaagctctgagcttggtcaagggtagatgtgccaatgaagacctggcctctgttccctgccaacccccagaggtccccagcctcactcccttcccctccctgcctagcctctattcctcaaaaggaatcctgttccaggacactctgtccttctcccctgtgacccctctaagtggtgctcccccaacctgtgggcaggctctgtgcccgccttcttgagggtgtgggcagggcagggtgggctggtaggccatcagggccctcatgcagcccctgctcgggtgggtggccagttcccctgggtcctgcaggactacgtgtccccaaccctggacctcagcaacccagccgtcttccgggacctgtctaagcccatcggtgtggtgaaccccaagcatgcccagctcgtgagggagaagtgagcatgtgggcagggctgggctcagcgggtagggaaaggcgaggggagggcttctgctgacacgtccaactgtggccccaggtatgaaagctttgaggacccagcagggaccattgacaagttccactatggcacccactactccaatgcagcaggcgtgatgcactacctcatccgcgtggagcccttcacctccctgcacgtccagctgcaaagtggccggtgcggcccaggggctggtgggcagactagggggcagataaggggaggaggctggtcctccccacatcctgggcccacccctggctcccttcttccctccagccacagcatctccctccctgtctccattctccccacctcaccttggccccgtgcccctcccccagctttgactgctccgaccggcagttccactcggtggcggcagcctggcaggcacgcctggagagccctgccgatgtgaaggagctcatcccggaattcttctactttcctgacttcctggagaaccagaacggtaggtgtgaggtgctcacactggagcgggcaggtgtagggatggagagcagatggtggagtggccagggggcagtcgggatggacagggagacagctgacccagtcctctgtgccaggttttgacctgggctgtctccagctgaccaacgagaaggtaggcgatgtggtgctacccccgtgggccagctctcctgaggacttcatccagcagcaccgccaggctctggtgaggaaggaaccacaggcaaacggcaggcagccggggttctgaagatcatggggggtcagctgtccctgcactgattgctgcctccctactctcaggagtcggagtatgtgtctgcacacctacacgagtggatcgacctcatctttggctacaagcagcgggggccagccgccgaggaggccctcaatgtcttctattactgcacctatgagggtgggcagtgcgctggactccagtcagggccaggacaagatcaggtcgggtggatgcagagggcacgcagggagccctgactgctctgcctgccttcccaggggctgtagacctggaccatgtgacagatgagcgggaacggaaggctctggagggcattatcagcaactttgggcagactccctgtcagctgctgaag

SEQ ID NO: 12944 - DNA, 1076 bp, Homo sapiens
ccctgcccctctgacctgtcagcccttggttcccccaagtgtaggtacctgccagtgggccaagctctgagcttggtcaagggtagatgtgccaatgaagacctggcctctgttccctgccaacccccagaggtccccagcctcactcccttcccctccctgcctagcctctattcctcaaaaggaatcctgttccaggacactctgtccttctcccctgtgacccctctaagtggtgctcccccaacctgtgggcaggctctgtgcccgccttcttgagggtgtgggcagggcagggtgggctggtaggccatcagggccctcatgcagcccctgctcgggtgggtggccagttcccctgggtcctgcaggactacgtgtccccaaccctggacctcagcaacccagccgtcttccgggacctgtctaagcccatcggtgtggtgaaccccaagcatgcccagctcgtgagggagaagtatgaaagctttgaggacccagcagggaccattgacaagttccactatggcacccactactccaatgcagcaggcgtgatgcactacctcatccgcgtggagcccttcacctccctgcacgtccagctgcaaagtggccgctttgactgctccgaccggcagttccactcggtggcggcagcctggcaggcacgcctggagagccctgccgatgtgaaggagctcatcccggaattcttctactttcctgacttcctggagaaccagaacggttttgacctgggctgtctccagctgaccaacgagaaggtaggcgatgtggtgctacccccgtgggccagctctcctgaggacttcatccagcagcaccgccaggctctggagtcggagtatgtgtctgcacacctacacgagtggatcgacctcatctttggctacaagcagcgggggccagccgccgaggaggccctcaatgtcttctattactgcacctatgagggggctgtagacctggaccatgtgacagatgagcgggaacggaaggctctggagggcattatcagcaactttgggcagactccctgtcagctgctgaag

SEQ ID NO: 12945 - DNA, 983 bp, Homo sapiens
ggtgctacccccgtgggccagctctcctgaggacttcatccagcagcaccgccaggctctggtgaggaaggaaccacaggcaaacggcaggcagccggggttctgaagatcatggggggtcagctgtccctgcactgattgctgcctccctactctcaggagtcggagtatgtgtctgcacacctacacgagtggatcgacctcatctttggctacaagcagcgggggccagccgccgaggaggccctcaatgtcttctattactgcacctatgagggtgggcagtgcgctggactccagtcagggccaggacaagatcaggtcgggtggatgcagagggcacgcagggagccctgactgctctgcctgccttcccaggggctgtagacctggaccatgtgacagatgagcgggaacggaaggctctggagggcattatcagcaactttgggcagactccctgtcagctgctgaaggtaaggccagcttagaggatagtggccagggatgcccatgccatggtgctgaccagccacttacccacaggagccacatccaactcggctctcagctgaggaagcagcccatcgccttgcacgcctggacactaactcacctagcatcttccagcacctggacgaactcaaggcattcttcgcagaggtgaaaggaagacaagacctcaactttatattctgtgaaatgggtttaaccccactgtccttaccaaccacgtggggcagatgggaatcctaatcaaggtcactgatttcaaggcaccttagaaaatgagctaaacatgggaagagtatgggggcaggaggggtgccttcttcatcagggccaggataaagtgtcgactcaacaagctctgaaagccttagggagatcaggagggagatctgtccttggaccccttccatcgccttcctagacaggaacattcctgaatgttgcccccaggcctgactttttttttaggt

SEQ ID NO: 12946 - DNA, 714 bp, Homo sapiens
ggtgctacccccgtgggccagctctcctgaggacttcatccagcagcaccgccaggctctggagtcggagtatgtgtctgcacacctacacgagtggatcgacctcatctttggctacaagcagcgggggccagccgccgaggaggccctcaatgtcttctattactgcacctatgagggggctgtagacctggaccatgtgacagatgagcgggaacggaaggctctggagggcattatcagcaactttgggcagactccctgtcagctgctgaaggagccacatccaactcggctctcagctgaggaagcagcccatcgccttgcacgcctggacactaactcacctagcatcttccagcacctggacgaactcaaggcattcttcgcagaggtgaaaggaagacaagacctcaactttatattctgtgaaatgggtttaaccccactgtccttaccaaccacgtggggcagatgggaatcctaatcaaggtcactgatttcaaggcaccttagaaaatgagctaaacatgggaagagtatgggggcaggaggggtgccttcttcatcagggccaggataaagtgtcgactcaacaagctctgaaagccttagggagatcaggagggagatctgtccttggaccccttccatcgccttcctagacaggaacattcctgaatgttgcccccaggcctgactttttttttaggt

SEQ ID NO: 12947 - DNA, 994 bp, Homo sapiens
gaatgtatacttctacgatggcagcactgagcgcgtggaaaccgaggagggtgcgtcctggtggtgtggtttaggaggatggcagggaatggctgagctctgggtggggctggggtgagtgactcccgtacctgctgttcctccccataggcatcggctatgatttccggcgcccactggcccagctgcgtgaggtccacctgcggcgtttcaacctgcgccgttcagcacttgagctcttctttatcgatcaggccaactacttcctcaacttcccatgcaaggtgggcacgaccccagtctcatctcctagccagactcccagaccccagcctggccccatcccaccccatacccaggtacggaaccaggtgtactcgtggctcctgcgcctacggcccccctctcaaggctacctaagcagccgctccccccaggagatgctgcgtgcctcaggccttacccaggtgagagccctgggtgtgagggatgtgaagtcgggaccctgaatcacggggcagtgctggacagcccacctggctcacatcttgtctgcccctgtccccagaaatgggtacagcgtgagatatccaacttcgagtacttgatgcaactcaacaccattgcggggcggacctacaatgacctgtctcagtaccctgtggtgagggtcccactctgcacccctccacccctgcccctctgacctgtcagcccttggttcccccaagtgtaggtacctgccagtgggccaagctctgagcttggtcaagggtagatgtgccaatgaagacctggcctctgttccctgccaacccccagaggtccccagcctcactcccttcccctccctgcctagcctctattcctcaaaaggaatcctgttccaggacactctgtccttctcccctgtgacccctctaagtggtgctcccccaacctgtgggcaggctctgtgcccgccttcttgagggtgtgggcagggcagggtggg

SEQ ID NO: 12948 - DNA, 894 bp, Homo sapiens
gaatgtatacttctacgatggcagcactgagcgcgtggaaaccgaggagggcatcggctatgatttccggcgcccactggcccagctgcgtgaggtccacctgcggcgtttcaacctgcgccgttcagcacttgagctcttctttatcgatcaggccaactacttcctcaacttcccatgcaaggtgggcacgaccccagtctcatctcctagccagactcccagaccccagcctggccccatcccaccccatacccaggtacggaaccaggtgtactcgtggctcctgcgcctacggcccccctctcaaggctacctaagcagccgctccccccaggagatgctgcgtgcctcaggccttacccaggtgagagccctgggtgtgagggatgtgaagtcgggaccctgaatcacggggcagtgctggacagcccacctggctcacatcttgtctgcccctgtccccagaaatgggtacagcgtgagatatccaacttcgagtacttgatgcaactcaacaccattgcggggcggacctacaatgacctgtctcagtaccctgtggtgagggtcccactctgcacccctccacccctgcccctctgacctgtcagcccttggttcccccaagtgtaggtacctgccagtgggccaagctctgagcttggtcaagggtagatgtgccaatgaagacctggcctctgttccctgccaacccccagaggtccccagcctcactcccttcccctccctgcctagcctctattcctcaaaaggaatcctgttccaggacactctgtccttctcccctgtgacccctctaagtggtgctcccccaacctgtgggcaggctctgtgcccgccttcttgagggtgtgggcagggcagggtggg

SEQ ID NO: 12949 - DNA, 4411 bp, Homo sapiens
ggagggcttctgctgacacgtccaactgtggccccaggtatgaaagctttgaggacccagcagggaccattgacaagttccactatggcacccactactccaatgcagcaggcgtgatgcactacctcatccgcgtggagcccttcacctccctgcacgtccagctgcaaagtggccggtgcggcccaggggctggtgggcagactagggggcagataaggggaggaggctggtcctccccacatcctgggcccacccctggctcccttcttccctccagccacagcatctccctccctgtctccattctccccacctcaccttggccccgtgcccctcccccagctttgactgctccgaccggcagttccactcggtggcggcagcctggcaggcacgcctggagagccctgccgatgtgaaggagctcatcccggaattcttctactttcctgacttcctggagaaccagaacggtaggtgtgaggtgctcacactggagcgggcaggtgtagggatggagagcagatggtggagtggccagggggcagtcgggatggacagggagacagctgacccagtcctctgtgccaggttttgacctgggctgtctccagctgaccaacgagaaggtaggcgatgtggtgctacccccgtgggccagctctcctgaggacttcatccagcagcaccgccaggctctggtgaggaaggaaccacaggcaaacggcaggcagccggggttctgaagatcatggggggtcagctgtccctgcactgattgctgcctccctactctcaggagtcggagtatgtgtctgcacacctacacgagtggatcgacctcatctttggctacaagcagcgggggccagccgccgaggaggccctcaatgtcttctattactgcacctatgagggtgggcagtgcgctggactccagtcagggccaggacaagatcaggtcgggtggatgcagagggcacgcagggagccctgactgctctgcctgccttcccaggggctgtagacctggaccatgtgacagatgagcgggaacggaaggctctggagggcattatcagcaactttgggcagactccctgtcagctgctgaaggtaaggccagcttagaggatagtggccagggatgcccatgccatggtgctgaccagccacttacccacaggagccacatccaactcggctctcagctgaggaagcagcccatcgccttgcacgcctggacactaactcacctagcatcttccagcacctggacgaactcaaggcattcttcgcagaggtgaaaggaagacaagacctcaactttatattctgtgaaatgggtttaaccccactgtccttaccaaccacgtggggcagatgggaatcctaatcaaggtcactgatttcaaggcaccttagaaaatgagctaaacatgggaagagtatgggggcaggaggggtgccttcttcatcagggccaggataaagtgtcgactcaacaagctctgaaagccttagggagatcaggagggagatctgtccttggaccccttccatcgccttcctagacaggaacattcctgaatgttgcccccaggcctgactttttttttaggtttccctctcttcctgcctttgggctagggggacaaggaataacagggtgagaggaccaagttgaaactaagtgtgatactctggaagcatcttccatgtctgtcccagcttctcacccactttctgagatgccctcctaaagtctctgcctgtttcttggagggaacctctgcatctgtgacacctactctatgacccctggggactgacagtaaaggaagggatgatgcttcagggagcagatagtgtaatctgatagtactcaggcatagctaggcctgcccttgcccctgcaggttgtcagtgatggtgtacccctggtgctagccctggtcccccaccggcagccccactccttcatcacccagggttccccagacctgttggtaagtgcattgtgcagagccccagctcagctccactcccccttgcctctgccagaaacccacctctgccccctcctgcctgcaggtgactgtgagtgccagtgggctgctgggcacccacagctggttgccctatgaccgcaacataagcaactacttcagcttcagcaaagaccccaccatgggcagccacaagtaggacagagggctgtgggtggggtgggctacaaatgccctgcacccggaattattcccctccctaatcagaatgtaggccagctgcaggggaaaggtctggccaggctccctgagggcctgggtctcttccatgtggcctggcctcacttgctatccccctcactgggtcaggacgcagcgactgctgagtggcccgtgggtgccaggcagtggtgtgagtggacaagcactggcagtggccccggatggaaagctgctattcagcggtggccactgggatggcagcctgcgggtgactgcactaccccgtggcaagctgttgagccagctcagctgccaccttggtatgaacagccttggagctggggagaatgaggcacacaggtatggggccgggttctgaggctggccagggcggatgtgactcctccgttctgcctgtaccctccccttcccatgcagatgtagtaacctgccttgcactggacacctgtggcatctacctcatctcaggctcccgggacaccacgtgcatggtgtggcggctcctgcatcaggtgtgcctcgtgggcagctctgtggggcccccgtagcccagacctgcagcccatccgtccctcagtggccttccagtcctgtcctcctctagtcttggacaaggccttcatttcctgagcctcaggggacagtcctaagccaaccctggtcctccacagggtggtctgtcagtaggcctggcaccaaagcctgtgcaggtcctgtatgggcatggggctgcagtgagctgtgtggccatcagcactgaacttgacatggctgtgtctggatctgaggtgtgtgtatgcatgtgccctggggagggtgagtttcctgggcaatccccctggagcccagactcctgcccaggaccctaagttgccttcctgcaggatggaactgtgatcatacacactgtacgccgcggacagtttgtagcggcactacggcctctgggtgccacattccctggacctattttccacctggcattggggtccgaaggccagattgtggtacagagctcagcgtgggaacgtcctggggcccaggtatggggaaggggtgcccagcaaagatggaggggcagttgggatcctgtccttgctgacactccctgcttcctccaggtcacctactccttgcacctgtattcagtcaatgggaagttgcgggcttcactgcccctggcagagcagcctacagccctgacggtgacagaggactttgtgttgctgggcaccgcccagtgcgccctgcacatcctccaactaaacacgtaagccccccatttatgggttcatggcccctgaaggtggtggtcattggtgtaggataaaggccctaggaacccacacaccatacatgtttgtgggcacatatttcaaggtttgttacctgtcccttcatcttcccatggggaggtcttgccctgggcctccgcttagccacagttgtgggagatttctttgtgtataagaatttcaatttaaccatccttaaaatgaggacagagagggtatatgggataagggatatctgctggtcgcaaagcccccttgcagtcgcaagttggtgtatatcccctctcccttccagactgctcccggccgcgcctcccttgcccatgaaggtggccatccgcagcgtggccgtgaccaaggagcgcagccacgtgctggtgggcctggaggatggcaagctcatcgtggtggtcgcggggcagccctctgaggtgaggatggggcgggggtggggaggcccctcgaacggggcggggcgtggcgcggcgatcccagctgatcctactcaacccttacgcccaccaggtgcgcagcagccagttcgcgcggaagctgtggcggtcctcgcggcgcatctcccaggtgtcctcgggagagacggaatacaaccctactgaggcgcgctgaacctggccagtccggctgctcgggccccgcccccggcaggcctggcccgggaggccccgcccagaagtcggcgggaacaccccggggtgggcagcccaggggggtgagcggggcccaccctgcccagctcagggattggcgggcgatgttaccccctcagggattggcgggcggaagtcccgcccctcgccggctgaggggccgccctgagggccagcactggcgtctgcggcc

SEQ ID NO: 12950 - DNA, 4411 bp, Homo sapiens; identical to SEQ ID NO: 12949

SEQ ID NO: 12951 - DNA, 21715 bp, Homo sapiens
acaccaaagttttcctggcagcgcctagacctgggcttagccactgcccctcttgcccatggaaccagctctggggcctggggtccaggtaaccagcaagggtgggtggaggttcccggggcaaggcagggccgcacatgaggatgtgcgcatgtctgggtctgcctgtctaatggtacacgtgtgtcctgggatccacagttaaagaaggctactgaaggtggtggctgctgggctgggtgaagatggcagatgaggacccagcccaaggctcttggtagggggtggctgctgtgtgggacaccttctccagccctagcaccagtgtgggccacagccacaccccacttacgcccctcccctggctgtgtcagacctgcctaggactgcaggcattagggaggtgggagcagaaactgggaggctgagagaagcagtggggtgcctggaaaagtggtcagtatgtacctaactctctgatgctgaccttccaatgtcctgccctccctcccccgtcccccactccccttctccacaccctccactctgcctttaaccccttgtccatgccctctgtccacctccattcattcttcgcctctgtctacatccccttgtccctgccctgtttactgcatccctcctgccccccaccactgttcccctgttctgcctacagaaggacctgggttacctgcagcagtggctgaaggcctttgtaggtgccttcaagaagagcatctcactgtcctctctggagccacgaaggtgaggctggatctgcactgagggcagggacagagcagggagattgaggggtcctcagcacccgtgtctcccctttccttgcaggccagaggaggcaggtgcagaggtcccgctgctaccactggatgagctgcatgtgctggccgaacagctgcaccaggctgacctggagcaagccctcctgctgctcaagctcttcatcattctctgcaggtgtctctgttgtccactctacaagcaggggcctagaactgtgggccagagggagaggggacaaggaggggcatggtgtattattgtgacctctctcatcattgactcccccaggaacctggagaacatagaggcaggccggggccaagtgctagtgccccgagtgctggcactgttgaccaagttggtggcggaggtgaagtggcctctaccttggggggcagagggtgtatgcagggaggcaggcggtagccatggcggggctaaccctctctccccacacctacagctgaaaggatgcccaccaccccagggccgaggcacgcagttggagaatgtggccctacatgctctgcttctctgcgagggcctctttgacccttaccaaacctggcggcgccagcgcagtgggtgagacccagcccacaggaagggaacccagaggagggtggggagaggatggccgcgctgggcccaaggaggggtgacggccaggagtggtgagagccgggctgatgtacttggcctcactgcccccagggaagtcatcagctccaaggagaagagcaaatacaagttccctcctgctgctttgccccaggaattcagcgccttcttccaaggtcaggccccgcccctgcccccacttggctccacccccaaacctaggccccttcctgtcgttccttgatcctgccatacacaggaaccacttggtggtggctgcatgcaggactgggagaaccaaagaccaagcaagagtttagggacagagacaagagaagacatcttgggctggagcgagggcctcccatcaggtggaggggtggggtcaacctgcctacccagatttctcatcctctttccccgccatctcctggatccttctagccacttgtaccctactgtgatcttaaaactctctggtccaatccctttgtccccatagcctccacgcatctccacccatcccggagacacaggaggtatctccacctcctgttccctggctgctggaggatctggtgcccaggacagctgtggctgcctgttcacaggtggtcctgtgaacctgttctccctggtgaccctccacccctgggtcccctctctcctctcattggagggagactggccaggactttagataggctcagggtgggatatggcctggacagaggtgggcagggctgtgaaaaggtggtgacctattgggatattaaatgtctcagtgatgcccccatggagctgtgggcctggatctagagttggggcagcaactccaggaggggaggcacccctagggagctcctcgactttattttcccatagcctgggtgctgttattaaaacaaactggatttcatttctcctcccatcatatcccttgatgtcaacctgacgtcctcaagatgaaatcctactcctcccacagcctttctctccacttgccctgctgctcagcctggcttctgtcctctcattcccagactgctaccactgaccccacctcagggtcttagcccatgctgtgccttctcccctccaactgcattctcaggtctcccctcaaaagccccatccccaaggaggcctcccacccatccagccggaatcaagccccagccctactcttcctcctctgccaggcatgtgacccggggctagtcccttctgccctctgagtttcagtccctggcctggcatcctgtccagttttgctggcgcagggccaggtgggcctcctacgtattaggttgtgaaagcccctagaagtcccaggcaaaggcatgggcgtggggggaggtggcatcagtatagtagatacagcagagtccccagagcacggcatgggaagcaccaaccgtcacagggcagaggcagcaagagatttgcatctgagaaactaagccctggtcatcatggggaagtggaagggtatgtgctcatgctggggccctcactttggggcttaaggatctgggaagctggctagactctcagggctggtctttgtcacccttaagtcccccaaagaagggttgtccctttcaggccctctactatacagccataactccttagatgccccccagggcagagccagctcttatccctcacactggatcttttacttggcccagctccctctcccctccaccccagggcactcacctcttgtgcagccccctgggtccatagccctgcaaccttggtgacattaccctgcccacacccccctacccagagagcctacagaatgcagaccacttgcctcccatactgctgttacgtctcatccacctcttctgcgccgtcctcgctggaggaaaggtaggctgggaggtgagcctgtggactagagagcagctctttcagtatctctctgctgggtgagccccttgcccactgcccatctctgtccacacctgcaggagaacgggcagatggctgtaagtgatggctctgtgaagggcctgctgagtgtggtgcggggctggagccgtgggccagccccggacccgtgcctagtgccactggctctagaggcactggtaggtgcagtccatgtcttgcatgccagccgcgcacctcctcgtggcccagagcttcgtgccctgcttgagagctacttccatgtccttaatgctgactggccagctggtctgagctcaggccccgaagaggcccttgtcaccctccgggtcagcatgctcggtgggtatgggctcccaggctcttggggaaggggcaccatgagggaaaagcctaagtgatgatggaaggtctggatagggcagcataggaaggaaggcttaaggctgcctagaggggtctgggcagggcctgacccttgacccttccacagacgccatccccatgatgctggcatgtgaagaccggccagtgctgcaagccaccttcctcagcaacaattgctttgaacacctcactcggctcattcagaacagcaaggtgggtagggcccagcctgggggtgagggtctggaagccagaggctaggggagccacgcataggtgccaggctgctgctgagcaaacatgggctggacagagtcagtgttttgcagctggtgggatggcttgcagttcagtgggagggtgtggggcatggacaagggcccatcccttggggcctctataggactgggcttgaggcttaggacatctttgtgccccatggaagcggggcttgttatggaaggaagggagctgctctggtgccttgtttccctttccgtggccccaagtacaggggctagaggagggcaccactgctttcagatgcagtgcctgctcccacccgctcatccccccgactgcccatctgagcagggcacagggggctcagcaccctactcttccctagtgccgggcagggcacctggcagctgcccctggtcctgctctaaccccaccctctcccatcttcctcctctcttctttgcctcctccaccctgtgcctccccacttccccacagctgtacctgcagtcccgggcgccccccgagggggacagtgacctggctacccggttactgactgagcccgatgtccaaaaggtaccatcctggggctgaccagctcagacaccccctgggactccctctttgagcttttcctgcactatagctggggaaatgagcagatgtgtgtaaggcctggtgtggtctagaaatgggtgtgggtcctccatgctgtctcgcctgccttccaagtccccatcctagggaacaggacagaaggtggtctatcccctgcctggtgtttgattgggtgttgggggtctggctgtgccaagctggatggaaccttcgaaactcagccacctacctcatttctcagaaggggagacagaagcccagacactcaaggatttggctatagtcacagagaaaggggtctccctcatggtgccatttctttctgtagattcttgcacccaccctcagcgggtcactgggtgtcccccagcccctgatgatgtgatccctgattcaccttgcatgtgggctgtaggaggctgcagggtgtcagctggcagcttcacagcgggcaccctttctgggggctcaacctgtgggccccaacctccatagcccctaccctggctctgtcttcatgaggtaaccctatgtgttcaccgcatgtggtcattttcttagagcttacacgtctattcatctgcaaagcaggcagggcaaagtgactcccctctgtttttacagatgaggacactgaggcctggagggggaggactgatgccttaggtcacttggggagtcaggcaaagctgggaccaaaggccccatggagccgaatatgacctagtccctgctgagaaactctccaagccctcccaacccctgaccccctcagggtggggcaggagaggcagcagcatgcctctggctgtcaggttcagccaggctgagcctcagtgcccccacctggatctagggggaaggggcaaggtgggacttaaaggtctcgaaggttcttctggttctaacatcctgtgattgattgtccctaaatctctgacccctgtcaatcactgtgggtgatggggcacttgctggcctgtctgtactcatgtgtctagctttagggagacaggttgggggtagggccctaactccactagagaaagggggactggagggtgcagtcagagtgtccaccattaatctgtcccagtgaggcccttcccagcctttgttagagtgggtcttgctgagctgctcagagagggccctaggtcatgatagggtcacagcagttggggcaaggagtagaaggcctggtgctctgacagagttgctgatccagcacatgccacatgccttggggtgcttggctctgcaccttttttactgcagggggctgccagctgtgacaccctggcccctgcctctcctgatggcccctccccaccccaaggtcctggaccaagacacagacgccattgcagtccatgtagtcagagtgctgacctgcatcatgagtgactccccctcggccaaggtgaggctgctgcactgcagctttagtaggggtgcggggtggagttcaactgaccatatccccagaacaggcctggccggtggccataagcatcctgctccctggagcaaagcaggcgagctgggaggtgactgccctgccctaaagctcactgggcaggtgtggtcgccagtctgtcctgggagctgcatcttctctgtcagggctggatggggaatggacacttgtaggcccacctccatctacagccttctgagatgtactcacgtcccccccatccctctgcagcccactgcccaccagcactgtcacccagaggcagagctacgcaagggaaccccaaaacatgatgcccctccagagtttccagggggtctgagtttgccctccggcccatgtatgtgttcacttcttccccatactaccttacacaggaggtgtttaaggagcgcatcggctaccctcacctgcaggaggttctgcagagccatggtccccccacccatcggctgttgcaagagctgctcaacatggtgagggaaggggcttgggaccagggtcccaaaggcaaccagaactgagtcagggttaccacagatggtgagctctccaccctgggggaccgtattgactgcggccagtacatactgttacctgtagcctggccatgtctgttagtgtcactggaatgaggattctggccctgtaggggtcctggaagcaactgcatgtgagcaagccccaggattatcttaggaacatgcagttaggggttaggccaacccaggctgaaaactaaggttgagggattaacaatgctgaaggactcttagtagtagtgactgtcatctgtgcccctctgactttcctgagcctcacacacaacctgtgggcaggatggagtagatcatgttgctgactgctgccgtaggcaagtaaatggagccagaaagtcccactgttgacagggtgccacagctgaccagggactgtcattctctccacccacaggctgtggagggtgaccacagcatgtgcccacctccaccaatccgcaacgagcagccggtactggtgctggcgcagtggctgccgtcattgcccaccgctgagctgcggctcttcctagcgcaacgcctcaggtggctctgtgacagctgccctgccagccgtgccacctgtgtgcaggcaggcctggtgggctgcctgttggagacactcagcacagggctagccctggaggcccgctgccaagagcagctgctggcactgctacaagcactgggccgtgtatcaataaggcccatggagctgcgtcacctgctgcgcccccggccaggattggactcggaaccaggcggagctgaggctggaaaggcccgacacgcaggtgctgtcatccgcacattatcaggcatggccaggcaccagggtcctgcacgtgctctgcgctactttgacctcacgcccagcatggcgggcatcatggtaccccctgtacagcgatggccagggcctggcttcacctttcatgcctggctctgtctgcaccctatggatacagcacctacccctgcccccacccgaccactccagcgaaagcagctgtacaggtgggtgactgccaggggccagggacctcctgccagggtgagcaggaacaagcagacataactggcttgcctgcccccagcttctttaccagcagcggctcagggtttgaggccttcttcacggcggccgggaccctggtggtggctgtgtgcacacggaaggagtatttgaccatgagtttgcccgaagtgtcctttgccgactctgcctgggtgagaccccatccttctcatgtggcccagtagagagaggggtgctgagtcccaagtatggcctaatgtgaggcttctgttctagcactgcgtggctatcgtccatgtgcctgggcgccggcccttcagccagaacctggtccatgtctacaaagacggccatctggtcaagacagcaccccttcgctgcccctccctcagtgaggtgtgccaagcaaggtttggggaggccttgggtagatgggaggacttggaacacagtgggcaggtgtagcctggagcccttgtgtcccgtgctgccccacaggcctgactttagccactggggtccatgcagccatgggggtcactgtgaggaactggttgtaggcggagccccaggttctgctgtgacctgaccgctcccccaaccccggccccacagcctttctcctcctgctgtatcggctccgctggataccgcacaacgaccaccaccacagggctgcccacaccaccagtccccgccaccctggcctacactcaccccgccctcacccgctcccagtcagtcccagcctccacagggcttggctgggggtccgggctggtggcccccctgcaggagggcagcatcgactctaccctcgcaggcacccaggacactcggtggggcagccccacatccctggagggtgagctgggggctgtggccatctttcacgaagccctgcaggcgacggctctgaggaccctgtgcaccctgggtatgcagcattctccatctctgccacagccccaggccagaagctaggggtccggggggagaaggcatctctgggggtctctcctgtggtcaggcagtctctggatggggtttggccagaggcctagcaaggtctgaagccccctgcccacctcccagggcccaatgagacggcacccttcaagcctgagggggagctgcatgagctcagcaccaggctgctcctccattactcacctcaggtatttgggggccccaggggagtggttggctcgactgtgctacttccccggctcccacactctgcctgccaccccctcctccctctgaccctggctgcctgcccattcccctatccctaggcttgtaagaacaacatctgcctggacctgtcccccagtcatgggcttgatgggcgcctgacgggccacagagtggagacctgggatgtgaaggtctgtgagcacgtgtgggtggtgtgtgcaggaggcatgaatatggggcacatgtgtgttcggagtcagctggggagcagcgctgtgcctggggaggatttggacagtccagctcaagagagcaaaacttcctttctgggtggtctgctggggtggagtagggcaggaaactggctggaaggtccccctcactgccatcctccttcccccaggatgtggtgaactgcgttgggggtatgggtgccctgctgcccctgctggagcgagtagctgcacagcccaaagaggctgaagcaggtccagctgaaacgcatgacctcgtgggtcctgaactgacctctggtcacaacacccagggcctggttctcccattgggtaaatcttcaggtaagtgttcctggtgcctatgttgtggagagggaatcttggcatggtaggggggtggaatgcccaaggtctcctggccactggcaggcccttgacacacatctgtccccttcctgatggctggcagaggaacggatggagaggaacgcagtggctgcttttctgctgatgctgcggaacttccttcagggtcacatggtgaaccaagagagcctggtgcagtgccaggggcctgccatcatcggggccctcctgcgaaaggtggggcccggtgggacaggcatgggggttaggggtatggtcagcctgtctgaccgaggggactgagtggggaaccctgtcagtcatgaagaacctcctgggagagttgccacttgagtggggcctgaaaggccgagcagggttgggtctggaggatctggggaaaggcccagcacaggtcggggcagggacccgcacagcaggcaggaggcttgcgtgtcagaggcggcaggaagcccccaaagggttctgagcaggctggtggccatgtttgtggccgtcatggctgtgcagggaagagtggcagctgaaaagctcagacagcagacaggcagagcctgagccctcactccagctcctgtcttatcccaggtcccaagctgggccatggacatgaacgtgctcatgtccgcccagctgctgatggagcaggtggcagctgagggcagcgggcccctcctgtacctactctaccagcatttgctcttcaactttcacctctggaccctcagtgacttcgccgtgcgcctcggtaggtgtgaggacctgagcaaggggccggccatagggcagctgagcactgagaagttagaactctgctctgggggatctgagggactcacctgttaggaatccagaatgccatggggcggctgaggggactatgaccctgccctggaagtctgacaggcacatggccctggcctggaggatctgaagggcccagctcagcctagtggcctgagccctctgctcattcccgctcaggtcacatccagtacatgtccagcatagttcgggagcacagacagaagctgcggaagaagtacggcgtccagtttatcttggatgctctgcgcacccactacaggtgaggccagtggggccagatgggccatggggggctgacacagtggcctccggccttggggactgggcggtgcgcttccctgactcacctgcccaccctctctccccgcctttctttgggacctggctgggtgtgcctactgacctgccagcccgcagcgggagcgccccctggctgctgacgacctacgcaccgtgcagacctccctcctgggcctggcgagggagttcctggtgcggagtctctcagcagatgacgtgcaggtcacgcagaccatgctgagctttttggcggccacaggcgatgacggtcaggtaggctggaggttggggagcgggaggcttgggtgaggggagtgggggcccgacacagtgtgagaccctgcatccccaggcggtgggtgcgctggacctgctgctggccctgctgcacggttccctggtgcaggagtccttggctgtctttctgttggagccagggaacctcgaagtgctactggccctgctagtgcggccagggtcactgcccctgctgcccgatcgagtctgcaaggtacacccagcccaccccctcccctggcatcccattcactggggcccctgcctggggttcagggaggtacagcaggccttgggccagcggatgaagctgccttcaagggcctcttgagccacacacctgcacggtgacttcccctcctacagtaactccttccacatgatgacagtcctccgatgacccccacacagatcctgcgcagactgcagcagaatgagcggctacctgagcggagccgccagcgcctccggctgcgggagtgtggtctccagggtctggttgcctgcttgcctgaggggactgtttccccccagctctgccagggcctctacaagctgttcctgggggcaggtacaacctggttaaggccaagtggagggggtgacatgtcagaaaaacagggcaggcaggccggaagaaggaagatagtggcataggggccagggctgggccctgccctttctagtctggtcagtccctcaggtccccccaacccatccccccagattgcctgaacctctcagatctgctggctgtggtacagctgtccctccaggctgacctcagcgttcgcctagacatctgtcgccaggtgagcatgagaggtaaaagctttgggggagggggagggtggcttctaccctctggccttccaccttgcctgtctcatgaggggtctctggagccctcctctgcaaaggccctggatgagggtctggagcaggcagttggatgcgtcctcacttgctgtgctctcgcctgcagcttttccacctcatctacggacagccagatgtagtgcggcttctggcccgacaggctggctggcaagatgtgctgacccggctatatgtcctggaggctgccacagccggcagcccccctccgtcttccccagagtcacctacctcccccaagccagccccacccaagccacccactgagtcacctgctgagccttcagatgtcttcctgccctcagaggccccctgccctgaccctgatggcttttaccatgctctctccccattctgcacgccctttgacctgggcctggaacggtctagtgtaggatcaggcaacactgctggtggtggcggcagcagtgggactcttactccagccagccagcccggcactccttcgccactggatgggccgcggccctttcctgctgctcctggccgccacagctccagtctctccaatgtgctggaggacggcagcctcccggagcccaccattagcggggatgatacctcgaacaccagcaacccacaggtgaggtgggcccaccctctgccactgcatggtacccaagggaggacacttctggtacacagggctggcagtgtagcctctccaaaggtgtggccctgtctgaccagggttgcagccactggtcaggcctattgctgtcccctcatagctctcatctgcagttgtgttcccagagggctcctggaacagggtgagtcatgatgagccacagtgggtgacaccagccaggcttcagaagggccctcaagagagcctgtagggcagacacctcacagggtccaagggcagcaaactccaaaggccctgccctgggcttctgggtttggggatgggcctctgcttgttctatgtgaactgcctcatctcctcttgggagtctggcaagaccccaggattctgcctggaactcaggtagtagttgagacccctataccattcttccaggcccttagtgccaggctcactgttagccaaatgctctgactcctgggtggctaccccaggaggggtgctgagtggggatgggtgggcgtcagcctgattccctcccttagccgcccacaacccacgcccacaccacccacctgtgcccacagcaaacctctgaggaagagttgtgcaatctgctcaccaacgtgctgttctcggtgacgtggcgtggcgtggaaggcagcgatgaggctgcctggcgggagcgtggccaggttttctcagtgctcacccagctgggggcctcagccacacttgtgcgcccaccagactgcatcaagcgcaggtgagagggaaagtctggagggggaggggcttcaggaagcctcgggggaaggagagaagatagtcaggtagacccttgagttccccactcacccgccagcctcctggagatgatgctggagtcagccctgaccgacatcaaagaggcccccgtgggggtcctggccagcctcacccagcaagcgctttggctgctgcgtctgctgcaggacttcctgtgtgctgaaggccatggtaaccaggaactgtggagtgagaaggtgcgacccctcagagaggcgtgagccacatgaacactcatgttcatgcaagcctgcagggatctggtctgggaggtggatgggtacacgtgcgcaggtgtgggtgcatcagcatgaatgcctgtgagtgtggacttgcctgtgtgcacaaaccctacctggcccccagcgcaaactttactttgctccctttccatggactcctggcctcccctggtgatgtctgttgggaacctgttttctgtggcagctctttgaaggtgtatgcagcctacttgatcgcctgggagcctggccccacctggccaacggcacagctgatctccgtgagatggcgcagattggcctacggcttgtacttggctacatcctgctggaagacccacaggtgagcacagggtgagcatgggggcagggggcgtgtgagatgtcgggagctccaagagtggctgggtgccactcatctctcttgcgcccacagctgcatgcccaggcctacgtgagattgcacatgctgctacagactgcagtgccagcccgccgcgaggaggcctgctatgtgctctccaagctggaggctgcactggggcgggtgctgaacacctcttccttggagtcagccactgatgaggcagggtccccacttgcagctgcagcagctgcagcagctgcagagcgctgctcctggctggtgccactggtgcgcacgctgctagaccgtgcctatgagccgctggggctgcagtggggactgccctccctgccacccaccaatggcagccccaccttctttgaagacttccaggctttttgtgccacacccgaatggcgccacttcatcgacaaacaggtgcctggaggttggggcccaggaagaggagtgggggctggggcccacatcgagcactgttctcctctgcccaatcctccaggtacagccaaccatgtcccagttcgaaatggacacgtatgctaagagccacgaccttatgtcaggtttctggaatgcctgctatgacatgcttatgagcagtgggcagcggcgccagtgggagcgcgcccagagtcgtcgggccttccaggtgtgccacccggggtaagggatgggaaactgctccacacatgcacccaggagatgactgacaatgtggagaaacgggtagggcaggcagcagccaggggactgacctattacccccaccccaggagctggtgctggaacctgcgcagaggcgggcgcgcctggaggggctacgctacacggcagtgctgaagcagcaggcaacgcagcactccatggccctgctgcactggggggcgctgtggcgccagctcgccagcccatgtggggcctgggcgctgaggtgggccgggcttggggcagggtcgctgtggaggggtggggcttgggagggagggagccacctggagccccagactgcctttggggtgaggccagggagggatgggggtgtctacagccttctaccgacccatgacctgggggacattctgcagggacactcccatcccccgctggaaactgtccagcgccgagacatattcacgcatgcgtctgaagctggtgcccaaccatcacttcgaccctcacctggaagccagcgctctccgagacaatctgggtgagggagtgtgctgagatgggtccacccaactcgattgtcccgtctcctgtcctgccttgcttctgctgagtacccttggccccttgcaggtgaggttcccctgacacccaccgaggaggcctcactgcctctggcagtgaccaaagaggccaaagtgagcaccccacccgagttgctgcaggaggaccagctcggcgaggacgagctggctgagctggagaccccgtgagtggggccctggagagattggactggtgtggtgggcaaggggtctgctccagtgtgtgcatgcctctgtgggatcaactccctgagtgtgtcctcttctgctgcccgactacgtccccctgaagggactgtccaaagccagatggtgagtgggagagtctcctaacagggctgagagttgctcttttaacagccaggcacctgaggacagcactgagaaacacaaaccagagcaggaagggggcccagggagtgggcaggggctgggtgaggggagcaggggacaagggttggcatcctggcaaaatattcagaagcccagtgggtggcaggtgggggacaggggctgggaccagtaggttctggaccctaggcagcccctccccatctctgggagtcatgagagtatataccccatgactcaatggcacttggatgccctttgggcttgtgaagaagggggtcccagagcctacagcgtgaggtgggttgctggtctttaggatggaggcagcagaactggatgagcagcgtgagaagctggtgctgtcggccgagtgccagctggtgacggtagtggccgtggtcccagggctgctggaggtcaccacacagaatgtatacttctacgatggcagcactgagcgcgtggaaaccgaggagggtgcgtcctggtggtgtggtttaggaggatggcagggaatggctgagctctgggtggggctggggtgagtgactcccgtacctgctgttcctccccataggcatcggctatgatttccggcgcccactggcccagctgcgtgaggtccacctgcggcgtttcaacctgcgccgttcagcacttgagctcttctttatcgatcaggccaactacttcctcaacttcccatgcaaggtgggcacgaccccagtctcatctcctagccagactcccagaccccagcctggccccatcccaccccatacccaggtacggaaccaggtgtactcgtggctcctgcgcctacggcccccctctcaaggctacctaagcagccgctccccccaggagatgctgcgtgcctcaggccttacccaggtgagagccctgggtgtgagggatgtgaagtcgggaccctgaatcacggggcagtgctggacagcccacctggctcacatcttgtctgcccctgtccccagaaatgggtacagcgtgagatatccaacttcgagtacttgatgcaactcaacaccattgcggggcggacctacaatgacctgtctcagtaccctgtggtgagggtcccactctgcacccctccacccctgcccctctgacctgtcagcccttggttcccccaagtgtaggtacctgccagtgggccaagctctgagcttggtcaagggtagatgtgccaatgaagacctggcctctgttccctgccaacccccagaggtccccagcctcactcccttcccctccctgcctagcctctattcctcaaaaggaatcctgttccaggacactctgtccttctcccctgtgacccctctaagtggtgctcccccaacctgtgggcaggctctgtgcccgccttcttgagggtgtgggcagggcagggtgggctggtaggccatcagggccctcatgcagcccctgctcgggtgggtggccagttcccctgggtcctgcaggactacgtgtccccaaccctggacctcagcaacccagccgtcttccgggacctgtctaagcccatcggtgtggtgaaccccaagcatgcccagctcgtgagggagaagtgagcatgtgggcagggctgggctcagcgggtagggaaaggcgaggggagggcttctgctgacacgtccaactgtggccccaggtatgaaagctttgaggacccagcagggaccattgacaagttccactatggcacccactactccaatgcagcaggcgtgatgcactacctcatccgcgtggagcccttcacctccctgcacgtccagctgcaaagtggccggtgcggcccaggggctggtgggcagactagggggcagataaggggaggaggctggtcctccccacatcctgggcccacccctggctcccttcttccctccagccacagcatctccctccctgtctccattctccccacctcaccttggccccgtgcccctcccccagctttgactgctccgaccggcagttccactcggtggcggcagcctggcaggcacgcctggagagccctgccgatgtgaaggagctcatcccggaattcttctactttcctgacttcctggagaaccagaacggtaggtgtgaggtgctcacactggagcgggcaggtgtagggatggagagcagatggtggagtggccagggggcagtcgggatggacagggagacagctgacccagtcctctgtgccaggttttgacctgggctgtctccagctgaccaacgagaaggtaggcgatgtggtgctacccccgtgggccagctctcctgaggacttcatccagcagcaccgccaggctctggtgaggaaggaaccacaggcaaacggcaggcagccggggttctgaagatcatggggggtcagctgtccctgcactgattgctgcctccctactctcaggagtcggagtatgtgtctgcacacctacacgagtggatcgacctcatctttggctacaagcagcgggggccagccgccgaggaggccctcaatgtcttctattactgcacctatgagggtgggcagtgcgctggactccagtcagggccaggacaagatcaggtcgggtggatgcagagggcacgcagggagccctgactgctctgcctgccttcccaggggctgtagacctggaccatgtgacagatgagcgggaacggaaggctctggagggcattatcagcaactttgggcagactccctgtcagctgctgaaggtaaggccagcttagaggatagtggccagggatgcccatgccatggtgctgaccagccacttacccacaggagccacatccaactcggctctcagctgaggaagcagcccatcgccttgcacgcctggacactaactcacctagcatcttccagcacctggacgaactcaaggcattcttcgcagaggtgaaaggaagacaagacctcaactttatattctgtgaaatgggtttaaccccactgtccttaccaaccacgtggggcagatgggaatcctaatcaaggtcactgatttcaaggcaccttagaaaatgagctaaacatgggaagagtatgggggcaggaggggtgccttcttcatcagggccaggataaagtgtcgactcaacaagctctgaaagccttagggagatcaggagggagatctgtccttggaccccttccatcgccttcctagacaggaacattcctgaatgttgcccccaggcctgactttttttttaggtttccctctcttcctgcctttgggctagggggacaaggaataacagggtgagaggaccaagttgaaactaagtgtgatactctggaagcatcttccatgtctgtcccagcttctcacccactttctgagatgccctcctaaagtctctgcctgtttcttggagggaacctctgcatctgtgacacctactctatgacccctggggactgacagtaaaggaagggatgatgcttcagggagcagatagtgtaatctgatagtactcaggcatagctaggcctgcccttgcccctgcaggttgtcagtgatggtgtacccctggtgctagccctggtcccccaccggcagccccactccttcatcacccagggttccccagacctgttggtaagtgcattgtgcagagccccagctcagctccactcccccttgcctctgccagaaacccacctctgccccctcctgcctgcaggtgactgtgagtgccagtgggctgctgggcacccacagctggttgccctatgaccgcaacataagcaactacttcagcttcagcaaagaccccaccatgggcagccacaagtaggacagagggctgtgggtggggtgggctacaaatgccctgcacccggaattattcccctccctaatcagaatgtaggccagctgcaggggaaaggtctggccaggctccctgagggcctgggtctcttccatgtggcctggcctcacttgctatccccctcactgggtcaggacgcagcgactgctgagtggcccgtgggtgccaggcagtggtgtgagtggacaagcactggcagtggccccggatggaaagctgctattcagcggtggccactgggatggcagcctgcgggtgactgcactaccccgtggcaagctgttgagccagctcagctgccaccttggtatgaacagccttggagctggggagaatgaggcacacaggtatggggccgggttctgaggctggccagggcggatgtgactcctccgttctgcctgtaccctccccttcccatgcagatgtagtaacctgccttgcactggacacctgtggcatctacctcatctcaggctcccgggacaccacgtgcatggtgtggcggctcctgcatcaggtgtgcctcgtgggcagctctgtggggcccccgtagcccagacctgcagcccatccgtccctcagtggccttccagtcctgtcctcctctagtcttggacaaggccttcatttcctgagcctcaggggacagtcctaagccaaccctggtcctccacagggtggtctgtcagtaggcctggcaccaaagcctgtgcaggtcctgtatgggcatggggctgcagtgagctgtgtggccatcagcactgaacttgacatggctgtgtctggatctgaggtgtgtgtatgcatgtgccctggggagggtgagtttcctgggcaatccccctggagcccagactcctgcccaggaccctaagttgccttcctgcaggatggaactgtgatcatacacactgtacgccgcggacagtttgtagcggcactacggcctctgggtgccacattccctggacctattttccacctggcattggggtccgaaggccagattgtggtacagagctcagcgtgggaacgtcctggggcccaggtatggggaaggggtgcccagcaaagatggaggggcagttgggatcctgtccttgctgacactccctgcttcctccaggtcacctactccttgcacctgtattcagtcaatgggaagttgcgggcttcactgcccctggcagagcagcctacagccctgacggtgacagaggactttgtgttgctgggcaccgcccagtgcgccctgcacatcctccaactaaacacgtaagccccccatttatgggttcatggcccctgaaggtggtggtcattggtgtaggataaaggccctaggaacccacacaccatacatgtttgtgggcacatatttcaaggtttgttacctgtcccttcatcttcccatggggaggtcttgccctgggcctccgcttagccacagttgtgggagatttctttgtgtataagaatttcaatttaaccatccttaaaatgaggacagagagggtatatgggataagggatatctgctggtcgcaaagcccccttgcagtcgcaagttggtgtatatcccctctcccttccagactgctcccggccgcgcctcccttgcccatgaaggtggccatccgcagcgtggccgtgaccaaggagcgcagccacgtgctggtgggcctggaggatggcaagctcatcgtggtggtcgcggggcagccctctgaggtgaggatggggcgggggtggggaggcccctcgaacggggcggggcgtggcgcggcgatcccagctgatcctactcaacccttacgcccaccaggtgcgcagcagccagttcgcgcggaagctgtggcggtcctcgcggcgcatctcccaggtgtcctcgggagagacggaatacaaccctactgaggcgcgctgaacctggccagtccggctgctcgggccccgcccccggcaggcctggcccgggaggccccgcccagaagtcggcgggaacaccccggggtgggcagcccaggggggtgagcggggcccaccctgcccagctcagggattggcgggcgatgttaccccctcagggattggcgggcggaagtcccgcccctcgccggctgaggggccgccctgagggccagcactggcgtctgcggccgcagcagcactttttgcacagtctggggcggggttccccggcttccaagtcgctgtttcgtcaaagcacgagggccgcctgtggccttaattcctaacggcggccccggttctcccttctcggcaataaaccaggcctagttttgtagct

SEQ ID NO: 12952 - DNA, 8605 bp, Homo sapiens
acaccaaagttttcctggcagcgcctagacctgggcttagccactgcccctcttgcccatggaaccagctctggggcctggggtccagaaggacctgggttacctgcagcagtggctgaaggcctttgtaggtgccttcaagaagagcatctcactgtcctctctggagccacgaaggccagaggaggcaggtgcagaggtcccgctgctaccactggatgagctgcatgtgctggccgaacagctgcaccaggctgacctggagcaagccctcctgctgctcaagctcttcatcattctctgcaggaacctggagaacatagaggcaggccggggccaagtgctagtgccccgagtgctggcactgttgaccaagttggtggcggagctgaaaggatgcccaccaccccagggccgaggcacgcagttggagaatgtggccctacatgctctgcttctctgcgagggcctctttgacccttaccaaacctggcggcgccagcgcagtggggaagtcatcagctccaaggagaagagcaaatacaagttccctcctgctgctttgccccaggaattcagcgccttcttccaagagagcctacagaatgcagaccacttgcctcccatactgctgttacgtctcatccacctcttctgcgccgtcctcgctggaggaaaggagaacgggcagatggctgtaagtgatggctctgtgaagggcctgctgagtgtggtgcggggctggagccgtgggccagccccggacccgtgcctagtgccactggctctagaggcactggtaggtgcagtccatgtcttgcatgccagccgcgcacctcctcgtggcccagagcttcgtgccctgcttgagagctacttccatgtccttaatgctgactggccagctggtctgagctcaggccccgaagaggcccttgtcaccctccgggtcagcatgctcgacgccatccccatgatgctggcatgtgaagaccggccagtgctgcaagccaccttcctcagcaacaattgctttgaacacctcactcggctcattcagaacagcaaggtcctggaccaagacacagacgccattgcagtccatgtagtcagagtgctgacctgcatcatgagtgactccccctcggccaaggaggtgtttaaggagcgcatcggctaccctcacctgcaggaggttctgcagagccatggtccccccacccatcggctgttgcaagagctgctcaacatggctgtggagggtgaccacagcatgtgcccacctccaccaatccgcaacgagcagccggtactggtgctggcgcagtggctgccgtcattgcccaccgctgagctgcggctcttcctagcgcaacgcctcaggtggctctgtgacagctgccctgccagccgtgccacctgtgtgcaggcaggcctggtgggctgcctgttggagacactcagcacagggctagccctggaggcccgctgccaagagcagctgctggcactgctacaagcactgggccgtgtatcaataaggcccatggagctgcgtcacctgctgcgcccccggccaggattggactcggaaccaggcggagctgaggctggaaaggcccgacacgcaggtgctgtcatccgcacattatcaggcatggccaggcaccagggtcctgcacgtgctctgcgctactttgacctcacgcccagcatggcgggcatcatggtaccccctgtacagcgatggccagggcctggcttcacctttcatgcctggctctgtctgcaccctatggatacagcacctacccctgcccccacccgaccactccagcgaaagcagctgtacagcttctttaccagcagcggctcagggtttgaggccttcttcacggcggccgggaccctggtggtggctgtgtgcacacggaaggagtatttgaccatgagtttgcccgaagtgtcctttgccgactctgcctggcactgcgtggctatcgtccatgtgcctgggcgccggcccttcagccagaacctggtccatgtctacaaagacggccatctggtcaagacagcaccccttcgctgcccctccctcagtgagcctttctcctcctgctgtatcggctccgctggataccgcacaacgaccaccaccacagggctgcccacaccaccagtccccgccaccctggcctacactcaccccgccctcacccgctcccagtcagtcccagcctccacagggcttggctgggggtccgggctggtggcccccctgcaggagggcagcatcgactctaccctcgcaggcacccaggacactcggtggggcagccccacatccctggagggtgagctgggggctgtggccatctttcacgaagccctgcaggcgacggctctgaggaccctgtgcaccctggggcccaatgagacggcacccttcaagcctgagggggagctgcatgagctcagcaccaggctgctcctccattactcacctcaggcttgtaagaacaacatctgcctggacctgtcccccagtcatgggcttgatgggcgcctgacgggccacagagtggagacctgggatgtgaaggatgtggtgaactgcgttgggggtatgggtgccctgctgcccctgctggagcgagtagctgcacagcccaaagaggctgaagcaggtccagctgaaacgcatgacctcgtgggtcctgaactgacctctggtcacaacacccagggcctggttctcccattgggtaaatcttcagaggaacggatggagaggaacgcagtggctgcttttctgctgatgctgcggaacttccttcagggtcacatggtgaaccaagagagcctggtgcagtgccaggggcctgccatcatcggggccctcctgcgaaaggtcccaagctgggccatggacatgaacgtgctcatgtccgcccagctgctgatggagcaggtggcagctgagggcagcgggcccctcctgtacctactctaccagcatttgctcttcaactttcacctctggaccctcagtgacttcgccgtgcgcctcggtcacatccagtacatgtccagcatagttcgggagcacagacagaagctgcggaagaagtacggcgtccagtttatcttggatgctctgcgcacccactacagcccgcagcgggagcgccccctggctgctgacgacctacgcaccgtgcagacctccctcctgggcctggcgagggagttcctggtgcggagtctctcagcagatgacgtgcaggtcacgcagaccatgctgagctttttggcggccacaggcgatgacggtcaggcggtgggtgcgctggacctgctgctggccctgctgcacggttccctggtgcaggagtccttggctgtctttctgttggagccagggaacctcgaagtgctactggccctgctagtgcggccagggtcactgcccctgctgcccgatcgagtctgcaagatcctgcgcagactgcagcagaatgagcggctacctgagcggagccgccagcgcctccggctgcgggagtgtggtctccagggtctggttgcctgcttgcctgaggggactgtttccccccagctctgccagggcctctacaagctgttcctgggggcagattgcctgaacctctcagatctgctggctgtggtacagctgtccctccaggctgacctcagcgttcgcctagacatctgtcgccagcttttccacctcatctacggacagccagatgtagtgcggcttctggcccgacaggctggctggcaagatgtgctgacccggctatatgtcctggaggctgccacagccggcagcccccctccgtcttccccagagtcacctacctcccccaagccagccccacccaagccacccactgagtcacctgctgagccttcagatgtcttcctgccctcagaggccccctgccctgaccctgatggcttttaccatgctctctccccattctgcacgccctttgacctgggcctggaacggtctagtgtaggatcaggcaacactgctggtggtggcggcagcagtgggactcttactccagccagccagcccggcactccttcgccactggatgggccgcggccctttcctgctgctcctggccgccacagctccagtctctccaatgtgctggaggacggcagcctcccggagcccaccattagcggggatgatacctcgaacaccagcaacccacagcaaacctctgaggaagagttgtgcaatctgctcaccaacgtgctgttctcggtgacgtggcgtggcgtggaaggcagcgatgaggctgcctggcgggagcgtggccaggttttctcagtgctcacccagctgggggcctcagccacacttgtgcgcccaccagactgcatcaagcgcagcctcctggagatgatgctggagtcagccctgaccgacatcaaagaggcccccgtgggggtcctggccagcctcacccagcaagcgctttggctgctgcgtctgctgcaggacttcctgtgtgctgaaggccatggtaaccaggaactgtggagtgagaagctctttgaaggtgtatgcagcctacttgatcgcctgggagcctggccccacctggccaacggcacagctgatctccgtgagatggcgcagattggcctacggcttgtacttggctacatcctgctggaagacccacagctgcatgcccaggcctacgtgagattgcacatgctgctacagactgcagtgccagcccgccgcgaggaggcctgctatgtgctctccaagctggaggctgcactggggcgggtgctgaacacctcttccttggagtcagccactgatgaggcagggtccccacttgcagctgcagcagctgcagcagctgcagagcgctgctcctggctggtgccactggtgcgcacgctgctagaccgtgcctatgagccgctggggctgcagtggggactgccctccctgccacccaccaatggcagccccaccttctttgaagacttccaggctttttgtgccacacccgaatggcgccacttcatcgacaaacaggtacagccaaccatgtcccagttcgaaatggacacgtatgctaagagccacgaccttatgtcaggtttctggaatgcctgctatgacatgcttatgagcagtgggcagcggcgccagtgggagcgcgcccagagtcgtcgggccttccaggagctggtgctggaacctgcgcagaggcgggcgcgcctggaggggctacgctacacggcagtgctgaagcagcaggcaacgcagcactccatggccctgctgcactggggggcgctgtggcgccagctcgccagcccatgtggggcctgggcgctgagggacactcccatcccccgctggaaactgtccagcgccgagacatattcacgcatgcgtctgaagctggtgcccaaccatcacttcgaccctcacctggaagccagcgctctccgagacaatctgggtgaggttcccctgacacccaccgaggaggcctcactgcctctggcagtgaccaaagaggccaaagtgagcaccccacccgagttgctgcaggaggaccagctcggcgaggacgagctggctgagctggagaccccgatggaggcagcagaactggatgagcagcgtgagaagctggtgctgtcggccgagtgccagctggtgacggtagtggccgtggtcccagggctgctggaggtcaccacacagaatgtatacttctacgatggcagcactgagcgcgtggaaaccgaggagggcatcggctatgatttccggcgcccactggcccagctgcgtgaggtccacctgcggcgtttcaacctgcgccgttcagcacttgagctcttctttatcgatcaggccaactacttcctcaacttcccatgcaaggtgggcacgaccccagtctcatctcctagccagactcccagaccccagcctggccccatcccaccccatacccaggtacggaaccaggtgtactcgtggctcctgcgcctacggcccccctctcaaggctacctaagcagccgctccccccaggagatgctgcgtgcctcaggccttacccagaaatgggtacagcgtgagatatccaacttcgagtacttgatgcaactcaacaccattgcggggcggacctacaatgacctgtctcagtaccctgtgttcccctgggtcctgcaggactacgtgtccccaaccctggacctcagcaacccagccgtcttccgggacctgtctaagcccatcggtgtggtgaaccccaagcatgcccagctcgtgagggagaagtatgaaagctttgaggacccagcagggaccattgacaagttccactatggcacccactactccaatgcagcaggcgtgatgcactacctcatccgcgtggagcccttcacctccctgcacgtccagctgcaaagtggccgctttgactgctccgaccggcagttccactcggtggcggcagcctggcaggcacgcctggagagccctgccgatgtgaaggagctcatcccggaattcttctactttcctgacttcctggagaaccagaacggttttgacctgggctgtctccagctgaccaacgagaaggtaggcgatgtggtgctacccccgtgggccagctctcctgaggacttcatccagcagcaccgccaggctctggagtcggagtatgtgtctgcacacctacacgagtggatcgacctcatctttggctacaagcagcgggggccagccgccgaggaggccctcaatgtcttctattactgcacctatgagggggctgtagacctggaccatgtgacagatgagcgggaacggaaggctctggagggcattatcagcaactttgggcagactccctgtcagctgctgaaggagccacatccaactcggctctcagctgaggaagcagcccatcgccttgcacgcctggacactaactcacctagcatcttccagcacctggacgaactcaaggcattcttcgcagaggttgtcagtgatggtgtacccctggtgctagccctggtcccccaccggcagccccactccttcatcacccagggttccccagacctgttggtgactgtgagtgccagtgggctgctgggcacccacagctggttgccctatgaccgcaacataagcaactacttcagcttcagcaaagaccccaccatgggcagccacaagacgcagcgactgctgagtggcccgtgggtgccaggcagtggtgtgagtggacaagcactggcagtggccccggatggaaagctgctattcagcggtggccactgggatggcagcctgcgggtgactgcactaccccgtggcaagctgttgagccagctcagctgccaccttgatgtagtaacctgccttgcactggacacctgtggcatctacctcatctcaggctcccgggacaccacgtgcatggtgtggcggctcctgcatcagggtggtctgtcagtaggcctggcaccaaagcctgtgcaggtcctgtatgggcatggggctgcagtgagctgtgtggccatcagcactgaacttgacatggctgtgtctggatctgaggatggaactgtgatcatacacactgtacgccgcggacagtttgtagcggcactacggcctctgggtgccacattccctggacctattttccacctggcattggggtccgaaggccagattgtggtacagagctcagcgtgggaacgtcctggggcccaggtcacctactccttgcacctgtattcagtcaatgggaagttgcgggcttcactgcccctggcagagcagcctacagccctgacggtgacagaggactttgtgttgctgggcaccgcccagtgcgccctgcacatcctccaactaaacacactgctcccggccgcgcctcccttgcccatgaaggtggccatccgcagcgtggccgtgaccaaggagcgcagccacgtgctggtgggcctggaggatggcaagctcatcgtggtggtcgcggggcagccctctgaggtgcgcagcagccagttcgcgcggaagctgtggcggtcctcgcggcgcatctcccaggtgtcctcgggagagacggaatacaaccctactgaggcgcgctgaacctggccagtccggctgctcgggccccgcccccggcaggcctggcccgggaggccccgcccagaagtcggcgggaacaccccggggtgggcagcccaggggggtgagcggggcccaccctgcccagctcagggattggcgggcgatgttaccccctcagggattggcgggcggaagtcccgcccctcgccggctgaggggccgccctgagggccagcactggcgtctgcggccgcagcagcactttttgcacagtctggggcggggttccccggcttccaagtcgctgtttcgtcaaagcacgagggccgcctgtggccttaattcctaacggcggccccggttctcccttctcggcaataaaccaggcctagttttgtagct

SEQ ID NO: 12953 - DNA, 868 bp, Homo sapiens
ctcaggtatttgggggccccaggggagtggttggctcgactgtgctacttccccggctcccacactctgcctgccaccccctcctccctctgaccctggctgcctgcccattcccctatccctaggcttgtaagaacaacatctgcctggacctgtcccccagtcatgggcttgatgggcgcctgacgggccacagagtggagacctgggatgtgaaggtctgtgagcacgtgtgggtggtgtgtgcaggaggcatgaatatggggcacatgtgtgttcggagtcagctggggagcagcgctgtgcctggggaggatttggacagtccagctcaagagagcaaaacttcctttctgggtggtctgctggggtggagtagggcaggaaactggctggaaggtccccctcactgccatcctccttcccccaggatgtggtgaactgcgttgggggtatgggtgccctgctgcccctgctggagcgagtagctgcacagcccaaagaggctgaagcaggtccagctgaaacgcatgacctcgtgggtcctgaactgacctctggtcacaacacccagggcctggttctcccattgggtaaatcttcaggtaagtgttcctggtgcctatgttgtggagagggaatcttggcatggtaggggggtggaatgcccaaggtctcctggccactggcaggcccttgacacacatctgtccccttcctgatggctggcagaggaacggatggagaggaacgcagtggctgcttttctgctgatgctgcggaacttccttcagggtcacatggtgaaccaagagagcctggtgcagtgccaggggcctgccatcatcggggccctcctgcgaaaggt

SEQ ID NO: 12954 - DNA, 529 bp, Homo sapiens
ctcaggtatttgggggccccaggggagtggttggctcgactgtgctacttccccggctcccacactctgcctgccaccccctcctccctctgaccctggctgcctgcccattcccctatccctaggcttgtaagaacaacatctgcctggacctgtcccccagtcatgggcttgatgggcgcctgacgggccacagagtggagacctgggatgtgaaggatgtggtgaactgcgttgggggtatgggtgccctgctgcccctgctggagcgagtagctgcacagcccaaagaggctgaagcaggtccagctgaaacgcatgacctcgtgggtcctgaactgacctctggtcacaacacccagggcctggttctcccattgggtaaatcttcagaggaacggatggagaggaacgcagtggctgcttttctgctgatgctgcggaacttccttcagggtcacatggtgaaccaagagagcctggtgcagtgccaggggcctgccatcatcggggccctcctgcgaaaggt

SEQ ID NO: 12955 - DNA, 655 bp, Homo sapiens
tctggtcagtccctcaggtccccccaacccatccccccagattgcctgaacctctcagatctgctggctgtggtacagctgtccctccaggctgacctcagcgttcgcctagacatctgtcgccaggtgagcatgagaggtaaaagctttgggggagggggagggtggcttctaccctctggccttccaccttgcctgtctcatgaggggtctctggagccctcctctgcaaaggccctggatgagggtctggagcaggcagttggatgcgtcctcacttgctgtgctctcgcctgcagcttttccacctcatctacggacagccagatgtagtgcggcttctggcccgacaggctggctggcaagatgtgctgacccggctatatgtcctggaggctgccacagccggcagcccccctccgtcttccccagagtcacctacctcccccaagccagccccacccaagccacccactgagtcacctgctgagccttcagatgtcttcctgccctcagaggccccctgccctgaccctgatggcttttaccatgctctctccccattctgcacgccctttgacctgggcctggaacggtctagtgtaggatcaggcaacactgctggtggtggcggcagcagtgggactcttactcc

SEQ ID NO: 12956 - DNA, 482 bp, Homo sapiens
tctggtcagtccctcaggtccccccaacccatccccccagattgcctgaacctctcagatctgctggctgtggtacagctgtccctccaggctgacctcagcgttcgcctagacatctgtcgccagcttttccacctcatctacggacagccagatgtagtgcggcttctggcccgacaggctggctggcaagatgtgctgacccggctatatgtcctggaggctgccacagccggcagcccccctccgtcttccccagagtcacctacctcccccaagccagccccacccaagccacccactgagtcacctgctgagccttcagatgtcttcctgccctcagaggccccctgccctgaccctgatggcttttaccatgctctctccccattctgcacgccctttgacctgggcctggaacggtctagtgtaggatcaggcaacactgctggtggtggcggcagcagtgggactcttactcc

SEQ ID NO: 12957 - DNA, 10233 bp, Homo sapiens
ctctttctcctccacgtggggacgcaggatggcggcagcagtgccggtgggtgtgcgtggatgggggcggggggcgtcgccgcggggcgctagggcccgggtccctgaggcctgagagaggcgaagtggggcccttctgggcgggcgaccagactgactcccgccccacttgctcgcgcaggacgaggcggtggcgcgcgatgtgcagcggttgctagtgcagttccaggatgagggcgggcagctgctgggttccccgttcgacgtgcccgtggacatcaccccggacaggctgcagctcgtgtgcaacgcgctactggcccaggtaagtggctggccagggcggcctcgcatctccacccccgggcggatgcggtgggggaatcatattaccgagggtctgcggttcatggtcccccgctaacggactgtggtgacccacctggcgtgagctcccacctatgtcagagatggaatcagtggcatagcgctttacacgccaaccaaaggggtccacctgcggagaggggcctagctttgaacgcaccggatgctgtatttcattgattctttgtcacagtcccccagtctgggacacgttaatatccccattttacagcgtggcccggagggactcagtattttgcacgatgctatgtagtaggtagcagatttggaattggaacccaaaactatccgaatacccatgcttttatttatttatttatttaccttttttttttttttttttgagacggagtctcactttgtcgccaggctggcaagctggagtgtagtggcgtgatctctgctcactgcaatctctgcctcccaggttcaagcgattctcctgcctcagcctcccgagtagctgggactacaggcgcgcgccaccacacccagctaatttttgtatttttagtggggactgggtttcaccacgttggccaggatggtctcgatctcttgacctcgtgatcctcccgccttggcctccaaagtgctggggattactggcgtgagccaccgcacccggcctttgcttttaacctttaagccagtgtgtttactgaagagctgccctggggacaggggaggtccttaaaattgcagttcctggaccccatcccagccttactaaaccaaactctgggatgaagcagaaagtctacattttttaacaggcgttttgggagctttttacacaaatatagtgtagtgtggtagtttgggaaacactgcataatgctatatgctaatcctatcttggacgtaaagaacctgaattaatcattggcaataggacattgaactaattacttagttgttctgagcctctgcttttgaaaactgtcagtgggaatattagtatctacttcccacggttgttatgagatgcagataaagaatttcaggccgggtgcagtggcttatgcctgtaatcccagtactttgggaggctgaggtgggcagatcactagaggtcaggagttcgagaccagcttagccaatatggcgaaaacagtctctactgaaaatacaaaaattagccaggcgtggtggcaggcgcctgtagtcccagctcctcgggaggctgaagcaggagaattgcttgaacccaggaggcagaggttgcagtgagctgagatctcaccactgcactccagcctgagtaacagaacgagactccatctcaaaaaaaaaagaaaaaagaatttccaagtgctgtgtaagtgtcctgcaactgctgttcagtgacttaaaaggtcttgctaggctgggcacagtggctcacgcctgtaatcccagcactttgggaggccgaggcaggtggatcacctgaggtcaggagcttgagaccagcctggccaatgtggcgaaaccccgtatctactaaaaatataaaacttagccaggcgtggtgatgggtgcctgtaatcccagctactcgggaggctgaggcaggagaatctcttgaacccaggacgcggaggttgcagtgagcagagattgctccactgcactccagcctgggtgacagagcgagactcttgtctcaaaaataaataaataaataaataaaaggtcttgctcaatgggcaatgatgggggtatccctagcacgatggctgaaaagaagaagcttcacctcccacagctcagtggggagcatccctggcagagggtgcccctgcacatccattgttgcgggtttgtcctttaccattgtccttcaggaggatcccctgccactggctttctttgtccacgatgctgagatcgtctcctcactggggaagacgttggagtcccaggcagtggagacagagaaggtcctagacatcatctaccagccacaggctatcttcagagtccgggctgtgactcgctgcaccagctccttggagggtcacagtgaggcagtcatttctgtggccttcagccctacgggaaagtaaggacagctgcagactcatggagggggtatgtgggggtgcagtctttgcctggtttggggagggtctcccagagttataattgatggggcctcagggctgcctaccatagacccaagctctggactcagcttgcaattaagggacttcctcagtagggcatggtccccaaaggctgcttaaggacccctgccttggacaaacctctcctagacttgatttttcaagatctgagctgtgtgacttgtataaatcacttaacctttccgagttaatttttcatctgtgaaactgggattagttgcttctctcaaacttagaaaggtaatgagaagcttcaaaagctggttatagctgtggagaggaaagaaatggcctcctgatgtattctcccagaggacagcatcagtattgtctttctcccttccaggggcgaggaaagagtccagttccatattctattcacagaaagtgattgaataggtggcacaaatgcacatgtgcagtgtcaagcatcctctcttcttccccaggtacctggccagtggctctggagacaccaccgtgcgcttctgggatctcagcacagagacaccacatttcacatgcaagggtcagtatgcaattagccatttagggggtcttctttttttttgagacaaggtcttgctctgttgaccaggatggagtacagtggtgcagtcacagctcacttgaactcctgggctcaagccttgaactcctgggttcaagcagtccccctacttcagcctccagagtagctgggatgacaggcacttgccatcacacctggctcgttttttgttttcatacagatgagggtctcactttgcagattacaaccccttaatatccagttggcggctgtctgttcctaggtagagaccatgtccttgagcccagccagccacttagacacaagcagaaactgcaccaaggagtcaatatgggacatggtgagaggctgactgactgctaccaaggagaacctggtttaaatcctgcctctgccacagtggttttcaaacttgagcacaaatcagaattgccccgcctcaggggcttgttaaaatgcagattgctggccaggcgtggtggcccacacctgtaatcccagcacttcgggaggccaaggcaggcagatcacttgaggtcaggagtttgagaccagcctcgccaacacagtgaaaccccatctctactaaaactacaaaaattagccgggcatggtggcgtgtgcttgtaatcccagccactggggaggctgaggcagaagaattgctcgaatctaggaggcggaggttgcagtgagccgagatggcaccactgcactccagcctgggtgatggagtgtgactccatgaaagaaagagagagagagaaaagagaagagagaaaaaaatacagattgctgggccccacccccagaggtttagttctattgggcctggggtagggcctgggaatctgcatttctaacaagttcccaggagatgctgatgctgctgctctgacgaccacacttgaagaaccactgctataccacagattagttaagtgaccttgtgtgtgtagggcatgttccctttctaagcttcaattttctcatctggaaaatggggatgataattcttgctttgctccatagcttagagctcttgtgagaaataacaagggatgacatgtacaaaaacacttcatagcatgtgtcacataaggagtcattagagagtgatggtgttatccatgcagcaagatgcagagctctaacacttggggtgcattctatccatccccagaaagcctcatcgctccttttgttcaatcattcatttattcaaatggttaaggagtacctggcacctgacaggcactgctgggcacttgggataaagacagatgtagtcccttatttctccctcctctgctttcttaggacacagacactgggtccttagtatatcctggtctccagatggcaggaagctggcctcaggctgcaagaatggccaggtaggtagttctcagggtaactaggcagagactcaagggggccttcctaggagacagttcagaatcaggttcaggagtctttggggagggttgggtgggaagtggtaggcagggattttggtggagccagagacctgttggggaggattattcagtgagcttctgtccttcagattctcctctgggacccaagcacagggaagcaggtgggcaggaccctcgctggccacagcaagtggatcacaggcctgagctgggagcccctccatgcgtaagtgacactgacggagctgggacaaatgagccaggggatcaaagccatcccctttccctgcccaatgcatagaagttttacgtgaggggacaagatgggcagcctgaatgaccgtgatggcttggcaggcatgggagaagggtctcgggcagacctgcattgctgcttgggagaggctctcatcacagggtctgctggttgcagtcaccttgcagtgcagccgggtcttggtgtcagaaaagctgtcaaaagattgtccatggcctttaagttgggaatggggaggtgccatgggcacacagatgttgccaggtcacagatgaggtcacatctcccttctctccaggaaccctgagtgccgctatgtggccagcagctccaaggatggcagtgtgcggatctgggacacaactgcaggccgctgtgagcgcatcctcaccgggcacacccagtcggtcacctgtctccggtggggaggggacgggcttctctactctgcctcccaggaccgcaccatcaaagtctggagagctcatgacgtaagtgctgggagggttcagaaaccagtccagaaaatcgcaagtcacaagatgctggcactcagaatgaccttgacatcagcgagtccagtgtttcccagatgtgtgctgggagccctggtctagggaggtgttttgggaatgaggagttctgtggttggtgctgcaccatagtggagattgcagagtccccatgagatcgtcacactctggaaattcctcctgtaggacagctgttgggctttatcagatctaccatatcccaaatgtattggacaggagccgtttactctgacatccctaactcctcttccatgaaacattttcatgatctggactccattttacaagtggggagagacttgaccccagaggggtagtttgattaagatcacaatgcatgagtgatgatgattattagtcttgtaccacctgtctcctggggctaatcgcccaggcgtggggaggagtgtgtgtgtctgacctgactcgctctcccgtagggtgtgctgtgccggactctgcaaggccacggccactgggtgaacaccatggccctcagcactgactatgccctgcgcactggggcctttgaacctgctgaggcctcagttaatccccaagacctccaaggatcctgtgagtgattgggagaaggaagagcgggggctgattgggaaggagccagttctcaagcttaatggggagtgtttgctctttgtgttggattttcttatcggccttcttcctcatctccttttctcccctccggtacctggtcacagtgcaggagttgaaggagagggctctgagccgatacaacctcgtgcgggtgagtgtgtgccagccacgtgcacccctagctctgtaccagtccttagccaatcactaaaaccctctcagacccttctcccttctagacccagctcagaatgtacctattccaaaaagttgttcttcataatcctagtttgcaatcctaaaatactaatgtgctagagatcattttatttcgttttttgtttagtttatttgcttgtctatttattacatttccaacatgcttcttttttactttaatttgttgtttaagattgttcacacattcacgttcaaaaaatacaaaaggtagatcgcggagtctcccgtctctattgtagcatccagtgccaccagtatcctgaatcaccttccagagatttaatatacagacacgtgtctatatacagtatatatgtataagcacacacacacatgcatacatacataaaatccttcttttaacacattattttgtgcctttttctgtaattatgtatcttaaaatttttttctacatgcatgtagagtttctttttccttttggatgaagtgacttgcctggggtcacatgcgagtgagtggccaagccagtcctcattgctcctagcgctggcctctctctgtccctggcattgagtaatcagggtgtatgcttgctgccaaagtcgggccctcctccttctttctgagaccacacccaacacagtgtgctttctgcctcccctagggccagggtccagagaggctggtgtctggctccgacgacttcaccttattcctgtggtccccagcagaggacaaaaagcctctcactcggatgacaggacaccaagctctcatcaaccaggtgctcttctctcctgactcccgcatcgtggctagtgcctcctttgacaagtccatcaagctgtgggatggcaggacgggcaagtgagtaggggtgggtactgcttctctgtaaggagtgaatggtgggaggggcttggcactgccacttactagctgtatggccttggcaggtgtttggattttctaagccactgtttcctctttggtaatatgcagaccccctacctctcagctttgttacaaggtgtttgtttgtttgtttgtttttagagatgactttcactctgtcacctggtgttcaagtggctcgagtgcagcggcacgatcttggctcattacaacctctgcttcctgggttcaagtgattctcctgcctcagcctcccaggtagctgggattacaggcctccgccaccgtgcctggctaatttttgtatttttagttgagacggggtttcaccatgttgactaggctggtcttgaactcctgagctcaagtgatccaactgcctcggcctcccaaagtgctgggattacaggtgtgagccgccatgcccagcctagttacacggatttaatgagacagtatgtttaggacccgcactaagtggtcactaaaaatgctagttcaggctgggcgtggtggctcatgcccataatcccaggagtttgggaggccaaggcaggcagatcacctgagttcaggagttcgagactagcctggccaacatggcaaaaccctgtctctactaaaaatacaaaaattagccaggcatagtggcacgtgcctataatcccagttaccccggaggctgaggcaggagaatcatttgaacttgggaggcaaaggttgcagtgagtcgagttcacaccactgtactccagcctgggcaacagagtgatactgtgtctcaaaaaaaaaaaaatgctagtttatgtcttaggagagaagtgatcttagagctagctgctgaagaggtagggctgtagccctggagaaggtgaagtggtggtaggtaggcttgtggtacaattgttacttggccctcctcaaagtgtgggccacagaccagcggcatcagcatcacctgggagcttgatagaaatgcagagtcctggccccaactcagaccttgtggatctgattcttcattttaacaaagttaccaggtgactctgctacccactcaagtatgggaacccttggtgtgatgaggcacagtgctcttggggttaatcggattagaggagaggcaaaggcacaggcaagggggagaaaaagagccagggaaaccttgttagggctgaaggggggacctctgcgttagtgacgtcactgtgttttcacacagcaaccctttaagataggtaattgggttcctttttaaaataaggaaaatgagtctcagagaggcctgatggtttgtccaaagagaaacagctagactgtgttgacgtgaaagttcagtgggcccactgttactccatgccacctgtcagcaggcacttgctgtttggggggatgacaggcagatgggctaagcagatggccacgttggagtctaaggcatgcaaagttgtgcaggtatggagggcaagcaagaggcatgctagaagctactcatttggagaagttttacaaattgtaatgactggtaatgattaaaaatggtctgggatggggaccaggcagtgtgattttgtaaaggttcccaggtatttctaacagacagccgaggttgagaaccactgccatgagcgtaggggacccttcagacgtgttgaaagatgtaactcagactaaaatccatcatcgtcttctcctggaccaggtacctggcttccctacgcggccacgtggctgccgtgtaccagattgcgtggtcagctgacagtcggctcctggtcagcggcagcagtgacagcacactgaaggtgtgggatgtgaaggcccagaagctggccatggacctgcccggccacgcggatgaggtagggccaaccctcaggcaaaggagggactgggattggagcctggctggctgtctccctctcaccaccccacctgccttcctctgcctccctttaggtatatgctgttgactggagtccagatggccagagagtggcaagtggtgggaaggacaaatgcctccggatgtgagtgtgggggaagtggtggttggcatacacagccctcctacccctaaggtccttctgtgcacactttcccttacagcatagaattccgcagggccgtccaggtgctcagactgtcttgaggaggcgtgtggagccagattctcagtgggcaagtgggagggccacaagtgggagggccaccggaacaacagaggccacaggacacctcgtagagggcgcgtccaggtctttctgtcagtgggcaagtgggagggccaccggaacaacaggggccacaggacaccttgtagagggcgcatccaggtctttctgtcactagacttcagagtcgcaagacctgagttcaaatcctggttctgccatggagtaatcacagagaacttggttaatcagtctcttgggaattatcaaaccttcacagacaggatcaaaaataggagggtcaacactctggaagacaaagtgttgtgtgcttataagggattgtgactgtttgctggtgggcatcccgagggccaggccctgggtggaggtcctggtggcagcaggcagtgagtgggcagcctgagtttgggtgggcagagcagggacggtcacctggctcttggtgactctgagggtggaccacaggccgtccgtctgttgacactgggattatatgacggcctccctttcctaaggtggaatccccatcctgacacccttcccttctccacagatggaggagatgagacggcccgaagttctctctgacccccacctcgactcggcctctgccagctgccttccctgccagagaacaaaggctgagatggcagtgcacacaccctccccaccagtggggacctgagaatgcgtgtggcctgctgtcctcgatagaccggaatggggttttcccacagatccccgcctgtggcacaccccagagccagaaatcgaaggtcacaggaagttgtcactgaacttggcccgtgtctgctactctgtaccttgctggtacagacaggggtggtgggcagccaggctctatgagtgggcccctagtgtcagctctgtacagggtcagatcccaggttctatgaccaaataagtaactt

SEQ ID NO: 12958 - DNA, 1726 bp, Homo sapiens
ctctttctcctccacgtggggacgcaggatggcggcagcagtgccggacgaggcggtggcgcgcgatgtgcagcggttgctagtgcagttccaggatgagggcgggcagctgctgggttccccgttcgacgtgcccgtggacatcaccccggacaggctgcagctcgtgtgcaacgcgctactggcccaggaggatcccctgccactggctttctttgtccacgatgctgagatcgtctcctcactggggaagacgttggagtcccaggcagtggagacagagaaggtcctagacatcatctaccagccacaggctatcttcagagtccgggctgtgactcgctgcaccagctccttggagggtcacagtgaggcagtcatttctgtggccttcagccctacgggaaagtacctggccagtggctctggagacaccaccattctcctctgggacccaagcacagggaagcaggtgggcaggaccctcgctggccacagcaagtggatcacaggcctgagctgggagcccctccatgcgaaccctgagtgccgctatgtggccagcagctccaaggatggcagtgtgcggatctgggacacaactgcaggccgctgtgagcgcatcctcaccgggcacacccagtcggtcacctgtctccggtggggaggggacgggcttctctactctgcctcccaggaccgcaccatcaaagtctggagagctcatgacggtgtgctgtgccggactctgcaaggccacggccactgggtgaacaccatggccctcagcactgactatgccctgcgcactggggcctttgaacctgctgaggcctcagttaatccccaagacctccaaggatccttgcaggagttgaaggagagggctctgagccgatacaacctcgtgcggggccagggtccagagaggctggtgtctggctccgacgacttcaccttattcctgtggtccccagcagaggacaaaaagcctctcactcggatgacaggacaccaagctctcatcaaccaggtgctcttctctcctgactcccgcatcgtggctagtgcctcctttgacaagtccatcaagctgtgggatggcaggacgggcaagtacctggcttccctacgcggccacgtggctgccgtgtaccagattgcgtggtcagctgacagtcggctcctggtcagcggcagcagtgacagcacactgaaggtgtgggatgtgaaggcccagaagctggccatggacctgcccggccacgcggatgaggtatatgctgttgactggagtccagatggccagagagtggcaagtggtgggaaggacaaatgcctccggatatggaggagatgagacggcccgaagttctctctgacccccacctcgactcggcctctgccagctgccttccctgccagagaacaaaggctgagatggcagtgcacacaccctccccaccagtggggacctgagaatgcgtgtggcctgctgtcctcgatagaccggaatggggttttcccacagatccccgcctgtggcacaccccagagccagaaatcgaaggtcacaggaagttgtcactgaacttggcccgtgtctgctactctgtaccttgctggtacagacaggggtggtgggcagccaggctctatgagtgggcccctagtgtcagctctgtacagggtcagatcccaggttctatgaccaaataagtaactt

SEQ ID NO: 12959 - DNA, 13574 bp, Homo sapiens
ctctttctcctccacgtggggacgcaggatggcggcagcagtgccggtgggtgtgcgtggatgggggcggggggcgtcgccgcggggcgctagggcccgggtccctgaggcctgagagaggcgaagtggggcccttctgggcgggcgaccagactgactcccgccccacttgctcgcgcaggacgaggcggtggcgcgcgatgtgcagcggttgctagtgcagttccaggatgagggcgggcagctgctgggttccccgttcgacgtgcccgtggacatcaccccggacaggctgcagctcgtgtgcaacgcgctactggcccaggtaagtggctggccagggcggcctcgcatctccacccccgggcggatgcggtgggggaatcatattaccgagggtctgcggttcatggtcccccgctaacggactgtggtgacccacctggcgtgagctcccacctatgtcagagatggaatcagtggcatagcgctttacacgccaaccaaaggggtccacctgcggagaggggcctagctttgaacgcaccggatgctgtatttcattgattctttgtcacagtcccccagtctgggacacgttaatatccccattttacagcgtggcccggagggactcagtattttgcacgatgctatgtagtaggtagcagatttggaattggaacccaaaactatccgaatacccatgcttttatttatttatttatttaccttttttttttttttttttgagacggagtctcactttgtcgccaggctggcaagctggagtgtagtggcgtgatctctgctcactgcaatctctgcctcccaggttcaagcgattctcctgcctcagcctcccgagtagctgggactacaggcgcgcgccaccacacccagctaatttttgtatttttagtggggactgggtttcaccacgttggccaggatggtctcgatctcttgacctcgtgatcctcccgccttggcctccaaagtgctggggattactggcgtgagccaccgcacccggcctttgcttttaacctttaagccagtgtgtttactgaagagctgccctggggacaggggaggtccttaaaattgcagttcctggaccccatcccagccttactaaaccaaactctgggatgaagcagaaagtctacattttttaacaggcgttttgggagctttttacacaaatatagtgtagtgtggtagtttgggaaacactgcataatgctatatgctaatcctatcttggacgtaaagaacctgaattaatcattggcaataggacattgaactaattacttagttgttctgagcctctgcttttgaaaactgtcagtgggaatattagtatctacttcccacggttgttatgagatgcagataaagaatttcaggccgggtgcagtggcttatgcctgtaatcccagtactttgggaggctgaggtgggcagatcactagaggtcaggagttcgagaccagcttagccaatatggcgaaaacagtctctactgaaaatacaaaaattagccaggcgtggtggcaggcgcctgtagtcccagctcctcgggaggctgaagcaggagaattgcttgaacccaggaggcagaggttgcagtgagctgagatctcaccactgcactccagcctgagtaacagaacgagactccatctcaaaaaaaaaagaaaaaagaatttccaagtgctgtgtaagtgtcctgcaactgctgttcagtgacttaaaaggtcttgctaggctgggcacagtggctcacgcctgtaatcccagcactttgggaggccgaggcaggtggatcacctgaggtcaggagcttgagaccagcctggccaatgtggcgaaaccccgtatctactaaaaatataaaacttagccaggcgtggtgatgggtgcctgtaatcccagctactcgggaggctgaggcaggagaatctcttgaacccaggacgcggaggttgcagtgagcagagattgctccactgcactccagcctgggtgacagagcgagactcttgtctcaaaaataaataaataaataaataaaaggtcttgctcaatgggcaatgatgggggtatccctagcacgatggctgaaaagaagaagcttcacctcccacagctcagtggggagcatccctggcagagggtgcccctgcacatccattgttgcgggtttgtcctttaccattgtccttcaggaggatcccctgccactggctttctttgtccacgatgctgagatcgtctcctcactggggaagacgttggagtcccaggcagtggagacagagaaggtcctagacatcatctaccagccacaggctatcttcagagtccgggctgtgactcgctgcaccagctccttggagggtcacagtgaggcagtcatttctgtggccttcagccctacgggaaagtaaggacagctgcagactcatggagggggtatgtgggggtgcagtctttgcctggtttggggagggtctcccagagttataattgatggggcctcagggctgcctaccatagacccaagctctggactcagcttgcaattaagggacttcctcagtagggcatggtccccaaaggctgcttaaggacccctgccttggacaaacctctcctagacttgatttttcaagatctgagctgtgtgacttgtataaatcacttaacctttccgagttaatttttcatctgtgaaactgggattagttgcttctctcaaacttagaaaggtaatgagaagcttcaaaagctggttatagctgtggagaggaaagaaatggcctcctgatgtattctcccagaggacagcatcagtattgtctttctcccttccaggggcgaggaaagagtccagttccatattctattcacagaaagtgattgaataggtggcacaaatgcacatgtgcagtgtcaagcatcctctcttcttccccaggtacctggccagtggctctggagacaccaccgtgcgcttctgggatctcagcacagagacaccacatttcacatgcaagggtcagtatgcaattagccatttagggggtcttctttttttttgagacaaggtcttgctctgttgaccaggatggagtacagtggtgcagtcacagctcacttgaactcctgggctcaagccttgaactcctgggttcaagcagtccccctacttcagcctccagagtagctgggatgacaggcacttgccatcacacctggctcgttttttgttttcatacagatgagggtctcactttgcagattacaaccccttaatatccagttggcggctgtctgttcctaggtagagaccatgtccttgagcccagccagccacttagacacaagcagaaactgcaccaaggagtcaatatgggacatggtgagaggctgactgactgctaccaaggagaacctggtttaaatcctgcctctgccacagtggttttcaaacttgagcacaaatcagaattgccccgcctcaggggcttgttaaaatgcagattgctggccaggcgtggtggcccacacctgtaatcccagcacttcgggaggccaaggcaggcagatcacttgaggtcaggagtttgagaccagcctcgccaacacagtgaaaccccatctctactaaaactacaaaaattagccgggcatggtggcgtgtgcttgtaatcccagccactggggaggctgaggcagaagaattgctcgaatctaggaggcggaggttgcagtgagccgagatggcaccactgcactccagcctgggtgatggagtgtgactccatgaaagaaagagagagagagaaaagagaagagagaaaaaaatacagattgctgggccccacccccagaggtttagttctattgggcctggggtagggcctgggaatctgcatttctaacaagttcccaggagatgctgatgctgctgctctgacgaccacacttgaagaaccactgctataccacagattagttaagtgaccttgtgtgtgtagggcatgttccctttctaagcttcaattttctcatctggaaaatggggatgataattcttgctttgctccatagcttagagctcttgtgagaaataacaagggatgacatgtacaaaaacacttcatagcatgtgtcacataaggagtcattagagagtgatggtgttatccatgcagcaagatgcagagctctaacacttggggtgcattctatccatccccagaaagcctcatcgctccttttgttcaatcattcatttattcaaatggttaaggagtacctggcacctgacaggcactgctgggcacttgggataaagacagatgtagtcccttatttctccctcctctgctttcttaggacacagacactgggtccttagtatatcctggtctccagatggcaggaagctggcctcaggctgcaagaatggccaggtaggtagttctcagggtaactaggcagagactcaagggggccttcctaggagacagttcagaatcaggttcaggagtctttggggagggttgggtgggaagtggtaggcagggattttggtggagccagagacctgttggggaggattattcagtgagcttctgtccttcagattctcctctgggacccaagcacagggaagcaggtgggcaggaccctcgctggccacagcaagtggatcacaggcctgagctgggagcccctccatgcgtaagtgacactgacggagctgggacaaatgagccaggggatcaaagccatcccctttccctgcccaatgcatagaagttttacgtgaggggacaagatgggcagcctgaatgaccgtgatggcttggcaggcatgggagaagggtctcgggcagacctgcattgctgcttgggagaggctctcatcacagggtctgctggttgcagtcaccttgcagtgcagccgggtcttggtgtcagaaaagctgtcaaaagattgtccatggcctttaagttgggaatggggaggtgccatgggcacacagatgttgccaggtcacagatgaggtcacatctcccttctctccaggaaccctgagtgccgctatgtggccagcagctccaaggatggcagtgtgcggatctgggacacaactgcaggccgctgtgagcgcatcctcaccgggcacacccagtcggtcacctgtctccggtggggaggggacgggcttctctactctgcctcccaggaccgcaccatcaaagtctggagagctcatgacgtaagtgctgggagggttcagaaaccagtccagaaaatcgcaagtcacaagatgctggcactcagaatgaccttgacatcagcgagtccagtgtttcccagatgtgtgctgggagccctggtctagggaggtgttttgggaatgaggagttctgtggttggtgctgcaccatagtggagattgcagagtccccatgagatcgtcacactctggaaattcctcctgtaggacagctgttgggctttatcagatctaccatatcccaaatgtattggacaggagccgtttactctgacatccctaactcctcttccatgaaacattttcatgatctggactccattttacaagtggggagagacttgaccccagaggggtagtttgattaagatcacaatgcatgagtgatgatgattattagtcttgtaccacctgtctcctggggctaatcgcccaggcgtggggaggagtgtgtgtgtctgacctgactcgctctcccgtagggtgtgctgtgccggactctgcaaggccacggccactgggtgaacaccatggccctcagcactgactatgccctgcgcactggggcctttgaacctgctgaggcctcagttaatccccaagacctccaaggatcctgtgagtgattgggagaaggaagagcgggggctgattgggaaggagccagttctcaagcttaatggggagtgtttgctctttgtgttggattttcttatcggccttcttcctcatctccttttctcccctccggtacctggtcacagtgcaggagttgaaggagagggctctgagccgatacaacctcgtgcgggtgagtgtgtgccagccacgtgcacccctagctctgtaccagtccttagccaatcactaaaaccctctcagacccttctcccttctagacccagctcagaatgtacctattccaaaaagttgttcttcataatcctagtttgcaatcctaaaatactaatgtgctagagatcattttatttcgttttttgtttagtttatttgcttgtctatttattacatttccaacatgcttcttttttactttaatttgttgtttaagattgttcacacattcacgttcaaaaaatacaaaaggtagatcgcggagtctcccgtctctattgtagcatccagtgccaccagtatcctgaatcaccttccagagatttaatatacagacacgtgtctatatacagtatatatgtataagcacacacacacatgcatacatacataaaatccttcttttaacacattattttgtgcctttttctgtaattatgtatcttaaaatttttttctacatgcatgtagagtttctttttccttttggatgaagtgacttgcctggggtcacatgcgagtgagtggccaagccagtcctcattgctcctagcgctggcctctctctgtccctggcattgagtaatcagggtgtatgcttgctgccaaagtcgggccctcctccttctttctgagaccacacccaacacagtgtgctttctgcctcccctagggccagggtccagagaggctggtgtctggctccgacgacttcaccttattcctgtggtccccagcagaggacaaaaagcctctcactcggatgacaggacaccaagctctcatcaaccaggtgctcttctctcctgactcccgcatcgtggctagtgcctcctttgacaagtccatcaagctgtgggatggcaggacgggcaagtgagtaggggtgggtactgcttctctgtaaggagtgaatggtgggaggggcttggcactgccacttactagctgtatggccttggcaggtgtttggattttctaagccactgtttcctctttggtaatatgcagaccccctacctctcagctttgttacaaggtgtttgtttgtttgtttgtttttagagatgactttcactctgtcacctggtgttcaagtggctcgagtgcagcggcacgatcttggctcattacaacctctgcttcctgggttcaagtgattctcctgcctcagcctcccaggtagctgggattacaggcctccgccaccgtgcctggctaatttttgtatttttagttgagacggggtttcaccatgttgactaggctggtcttgaactcctgagctcaagtgatccaactgcctcggcctcccaaagtgctgggattacaggtgtgagccgccatgcccagcctagttacacggatttaatgagacagtatgtttaggacccgcactaagtggtcactaaaaatgctagttcaggctgggcgtggtggctcatgcccataatcccaggagtttgggaggccaaggcaggcagatcacctgagttcaggagttcgagactagcctggccaacatggcaaaaccctgtctctactaaaaatacaaaaattagccaggcatagtggcacgtgcctataatcccagttaccccggaggctgaggcaggagaatcatttgaacttgggaggcaaaggttgcagtgagtcgagttcacaccactgtactccagcctgggcaacagagtgatactgtgtctcaaaaaaaaaaaaatgctagtttatgtcttaggagagaagtgatcttagagctagctgctgaagaggtagggctgtagccctggagaaggtgaagtggtggtaggtaggcttgtggtacaattgttacttggccctcctcaaagtgtgggccacagaccagcggcatcagcatcacctgggagcttgatagaaatgcagagtcctggccccaactcagaccttgtggatctgattcttcattttaacaaagttaccaggtgactctgctacccactcaagtatgggaacccttggtgtgatgaggcacagtgctcttggggttaatcggattagaggagaggcaaaggcacaggcaagggggagaaaaagagccagggaaaccttgttagggctgaaggggggacctctgcgttagtgacgtcactgtgttttcacacagcaaccctttaagataggtaattgggttcctttttaaaataaggaaaatgagtctcagagaggcctgatggtttgtccaaagagaaacagctagactgtgttgacgtgaaagttcagtgggcccactgttactccatgccacctgtcagcaggcacttgctgtttggggggatgacaggcagatgggctaagcagatggccacgttggagtctaaggcatgcaaagttgtgcaggtatggagggcaagcaagaggcatgctagaagctactcatttggagaagttttacaaattgtaatgactggtaatgattaaaaatggtctgggatggggaccaggcagtgtgattttgtaaaggttcccaggtatttctaacagacagccgaggttgagaaccactgccatgagcgtaggggacccttcagacgtgttgaaagatgtaactcagactaaaatccatcatcgtcttctcctggaccaggtacctggcttccctacgcggccacgtggctgccgtgtaccagattgcgtggtcagctgacagtcggctcctggtcagcggcagcagtgacagcacactgaaggtgtgggatgtgaaggcccagaagctggccatggacctgcccggccacgcggatgaggtagggccaaccctcaggcaaaggagggactgggattggagcctggctggctgtctccctctcaccaccccacctgccttcctctgcctccctttaggtatatgctgttgactggagtccagatggccagagagtggcaagtggtgggaaggacaaatgcctccggatgtgagtgtgggggaagtggtggttggcatacacagccctcctacccctaaggtccttctgtgcacactttcccttacagcatagaattccgcagggccgtccaggtgctcagactgtcttgaggaggcgtgtggagccagattctcagtgggcaagtgggagggccacaagtgggagggccaccggaacaacagaggccacaggacacctcgtagagggcgcgtccaggtctttctgtcagtgggcaagtgggagggccaccggaacaacaggggccacaggacaccttgtagagggcgcatccaggtctttctgtcactagacttcagagtcgcaagacctgagttcaaatcctggttctgccatggagtaatcacagagaacttggttaatcagtctcttgggaattatcaaaccttcacagacaggatcaaaaataggagggtcaacactctggaagacaaagtgttgtgtgcttataagggattgtgactgtttgctggtgggcatcccgagggccaggccctgggtggaggtcctggtggcagcaggcagtgagtgggcagcctgagtttgggtgggcagagcagggacggtcacctggctcttggtgactctgagggtggaccacaggccgtccgtctgttgacactgggattatatgacggcctccctttcctaaggtggaatccccatcctgacacccttcccttctccacagatggaggagatgagacggcccgaagttctctctgacccccacctcgactcggcctctgccagctgccttccctgccagagaacaaaggctgagatggcagtgcacacaccctccccaccagtggggacctgagaatgcgtgtggcctgctgtcctcgatagaccggaatggggttttcccacagatccccgcctgtggcacaccccagagccagaaatcgaaggtcacaggaagttgtcactgaacttggcccgtgtctgctactctgtaccttgctggtacagacaggggtggtgggcagccaggctctatgagtgggcccctagtgtcagctctgtacagggtcagatcccaggttctatgaccaaataagtaacttaagttttgtgtgttgggttctaattccttgtcctagaatccccatgactcaatcaaggactgtgctaaatgagattgtccagcccccgcccttgcactggactacgccaaaaccacactgaccaggcacttgccttccctctcttcccccgtgttggtaagagagaggccagttgtgatagtggccaaggagaatctagggctgtattgttgtccactgcagtaggcaccggccacatgtgactgctggcatgaaatagaagtgcagttcctccatcgcactgggtaaggcctccagtattggacagcacacagaaaggttttcatcatcaagagagttctgctggtcagccctgctccaggggatgcctctgccttcgcatagcacactgcttgaggccctgccaggcaccaagcactgccctgggcccatgggatagagcggggaaggtgatggctcttccagaggattccctcagatggggaggcagcagtatgagctctgagcagaagtgggtattgttgatacagaggaagttctttgccacgagaactttcaagcagtgaaaggaattcccatcaggactcagaccccaggccgagatcttgccctgaatgtaccctgcctctgctttctcctgcatcccatgctaagcagggtcatggtctgaactactcagattggatttccaaaccatccttgtataaactgctcagaactagcatcttgctccttcttaccctcctccacccttgtctgtgcttttgggttttgcgcgtcacctagctgtggtgcttggcctccaccttgcacatatctgcagtgaggctacataagaagcgaacaaaactatcagccactgagctccttggtgccagctgtttgtctgctgtgctctcagactgcaccaggcctggaaggttctcaagctccaaaacttttgatgaggaaacaacataagaaatgattagcccatgccctcacatctagtaagagaaagctgggattaaaccaggccctgccccaaagcttattgtgcactttgtaccacatccctccgtccagagctcaagctagtttgacagttcatgggccaccacgtctgtccatgacagctatttctgtatttttctggtgtaagagccttttagtcttagagcaccagtctccctgttcccctaccccgccccactggggaaggggtgatggcagcatcctattgcctagctgcctgttttctatctccccacccatgtagactctgtcctggtggaagctaggaggtgggtgccagccagcccatctgaggctgtctgcagcataaagcagactttagggtgctggatgacctgcagttctttaatgagggacctagacccagcccagatttggaggaggagggagtctagcagctgtgggcagtggctgagcctggcatggcctggcctgagatgcctccaggtgaatggggcccctatgtagccttggccccagcccaggggtggggtgcccataccactctgccagaccccgggcccgcagggtgctggtggtatggtaggtctcatggctctggtttctgagggcctggggttgaagctgaaagtaggtgaggggtgtcctggggccctcccccttaacagggaaataggtattccagatcctccagcctccgcatctcctccggcccgatggacacgatcttttgccggggttccttgcgccgcacggtgatctggatggggtagttctcaggaaagctgctgaagtcagtggccagggttgcaaactgaagtgaaacaagaaaacccttcagagttccttcccagatctgaacctggctctctctctgtctctatcaccccttttttttctgtctgctgactcagaccttaaacagccttatccaacctagccattgacgcaggaaacaggtgcaaagatgcatgactcaagcctgtacctcctcattatgggatatttccaaccaaagggctgtctgtactcaggcctctatacccccatacccctaccccatacccaggctgttcccttcttcgtccccctttagcctcttgtcttccctatttctttcaatgcccttgacttcccagcctactcacaatcatgggcactgaattgcagagtctaaaaaccaatggctttggaaggggaacattatagtgatgttgaaaaatacattcgtttgcattcctagtgggccccagagtggcttaatccttaaacctcccagaagcatgcattctggaattgatgcttcttgacccaggcagaaggaaagctagccagatgagtcatgtgggcataggggtgttcccaacctccaaagccctggttccctggctttggacttctctccacccccaaggcccctcttttcccagggctcactttgtagggcttgcaccacttccccaccccagctgtgttggctgcacggacactgaggcagtaacacgtgttaggctttagctccatcagcttgacagtagtgcccaaaatcttgttgaagatccatggacgattctttgcctcgggcaactcattctcctgtgtcttggccacctcctgtaacaggagctggtagaaactgaccggctgcttgcccaaggcgtaggtccaggaaatctaggggaagagagagccccgaggcttcctcagatatgtcctgtccttcctgtcccttcaccctcccaactggggtcaggacgtcccatgcccatcccctgctcctgctggggcccaggcaggtcagatggaaggtgcaaggtactgcagcactgagtgtggaacccctgccccgaagcatgtactactctcctgggcagccccacccactttagggtacaccctcattccatatttcttatacgccaggggtcctcaacccttgggccaccaactgatagcagtccatggcctgttaggaactggatagcacagcaggaggagattggtgggcgagcaagcgaagcttcatctgtatttacagctgctccccacggctcagggtaccacctgagctctgcctcctgtcagatcagcagaggcattagattcccataggcacgtgaaccctattgtgaattgtatgggagggatctaagttgaatgctccttatgagaatctaatgcctgatgatctgtcattgtctcccatcacccccaaatgggaccctctcgttgcaggaaaacaagctcagggctcccacagtttctacattatggtgagttgtataattatttcattatatattacaatgtaataataatagaaataaagtacacaataaatgtaatatgcttgactcatcctgaaa

SEQ ID NO: 12960 - DNA, 5193 bp, Homo sapiens
ctctttctcctccacgtggggacgcaggatggcggcagcagtgccggacgaggcggtggcgcgcgatgtgcagcggttgctagtgcagttccaggatgagggcgggcagctgctgggttccccgttcgacgtgcccgtggacatcaccccggacaggctgcagctcgtgtgcaacgcgctactggcccaggaggatcccctgccactggctttctttgtccacgatgctgagatcgtctcctcactggggaagacgttggagtcccaggcagtggagacagagaaggtcctagacatcatctaccagccacaggctatcttcagagtccgggctgtgactcgctgcaccagctccttggagggtcacagtgaggcagtcatttctgtggccttcagccctacgggaaagtacctggccagtggctctggagacaccaccgtgcgcttctgggatctcagcacagagacaccacatttcacatgcaagggacacagacactgggtccttagtatatcctggtctccagatggcaggaagctggcctcaggctgcaagaatggccagattctcctctgggacccaagcacagggaagcaggtgggcaggaccctcgctggccacagcaagtggatcacaggcctgagctgggagcccctccatgcgaaccctgagtgccgctatgtggccagcagctccaaggatggcagtgtgcggatctgggacacaactgcaggccgctgtgagcgcatcctcaccgggcacacccagtcggtcacctgtctccggtggggaggggacgggcttctctactctgcctcccaggaccgcaccatcaaagtctggagagctcatgacggtgtgctgtgccggactctgcaaggccacggccactgggtgaacaccatggccctcagcactgactatgccctgcgcactggggcctttgaacctgctgaggcctcagttaatccccaagacctccaaggatccttgcaggagttgaaggagagggctctgagccgatacaacctcgtgcggggccagggtccagagaggctggtgtctggctccgacgacttcaccttattcctgtggtccccagcagaggacaaaaagcctctcactcggatgacaggacaccaagctctcatcaaccaggtgctcttctctcctgactcccgcatcgtggctagtgcctcctttgacaagtccatcaagctgtgggatggcaggacgggcaagtacctggcttccctacgcggccacgtggctgccgtgtaccagattgcgtggtcagctgacagtcggctcctggtcagcggcagcagtgacagcacactgaaggtgtgggatgtgaaggcccagaagctggccatggacctgcccggccacgcggatgaggtatatgctgttgactggagtccagatggccagagagtggcaagtggtgggaaggacaaatgcctccggatatggaggagatgagacggcccgaagttctctctgacccccacctcgactcggcctctgccagctgccttccctgccagagaacaaaggctgagatggcagtgcacacaccctccccaccagtggggacctgagaatgcgtgtggcctgctgtcctcgatagaccggaatggggttttcccacagatccccgcctgtggcacaccccagagccagaaatcgaaggtcacaggaagttgtcactgaacttggcccgtgtctgctactctgtaccttgctggtacagacaggggtggtgggcagccaggctctatgagtgggcccctagtgtcagctctgtacagggtcagatcccaggttctatgaccaaataagtaacttaagttttgtgtgttgggttctaattccttgtcctagaatccccatgactcaatcaaggactgtgctaaatgagattgtccagcccccgcccttgcactggactacgccaaaaccacactgaccaggcacttgccttccctctcttcccccgtgttggtaagagagaggccagttgtgatagtggccaaggagaatctagggctgtattgttgtccactgcagtaggcaccggccacatgtgactgctggcatgaaatagaagtgcagttcctccatcgcactgggtaaggcctccagtattggacagcacacagaaaggttttcatcatcaagagagttctgctggtcagccctgctccaggggatgcctctgccttcgcatagcacactgcttgaggccctgccaggcaccaagcactgccctgggcccatgggatagagcggggaaggtgatggctcttccagaggattccctcagatggggaggcagcagtatgagctctgagcagaagtgggtattgttgatacagaggaagttctttgccacgagaactttcaagcagtgaaaggaattcccatcaggactcagaccccaggccgagatcttgccctgaatgtaccctgcctctgctttctcctgcatcccatgctaagcagggtcatggtctgaactactcagattggatttccaaaccatccttgtataaactgctcagaactagcatcttgctccttcttaccctcctccacccttgtctgtgcttttgggttttgcgcgtcacctagctgtggtgcttggcctccaccttgcacatatctgcagtgaggctacataagaagcgaacaaaactatcagccactgagctccttggtgccagctgtttgtctgctgtgctctcagactgcaccaggcctggaaggttctcaagctccaaaacttttgatgaggaaacaacataagaaatgattagcccatgccctcacatctagtaagagaaagctgggattaaaccaggccctgccccaaagcttattgtgcactttgtaccacatccctccgtccagagctcaagctagtttgacagttcatgggccaccacgtctgtccatgacagctatttctgtatttttctggtgtaagagccttttagtcttagagcaccagtctccctgttcccctaccccgccccactggggaaggggtgatggcagcatcctattgcctagctgcctgttttctatctccccacccatgtagactctgtcctggtggaagctaggaggtgggtgccagccagcccatctgaggctgtctgcagcataaagcagactttagggtgctggatgacctgcagttctttaatgagggacctagacccagcccagatttggaggaggagggagtctagcagctgtgggcagtggctgagcctggcatggcctggcctgagatgcctccaggtgaatggggcccctatgtagccttggccccagcccaggggtggggtgcccataccactctgccagaccccgggcccgcagggtgctggtggtatggtaggtctcatggctctggtttctgagggcctggggttgaagctgaaagtaggtgaggggtgtcctggggccctcccccttaacagggaaataggtattccagatcctccagcctccgcatctcctccggcccgatggacacgatcttttgccggggttccttgcgccgcacggtgatctggatggggtagttctcaggaaagctgctgaagtcagtggccagggttgcaaactgaagtgaaacaagaaaacccttcagagttccttcccagatctgaacctggctctctctctgtctctatcaccccttttttttctgtctgctgactcagaccttaaacagccttatccaacctagccattgacgcaggaaacaggtgcaaagatgcatgactcaagcctgtacctcctcattatgggatatttccaaccaaagggctgtctgtactcaggcctctatacccccatacccctaccccatacccaggctgttcccttcttcgtccccctttagcctcttgtcttccctatttctttcaatgcccttgacttcccagcctactcacaatcatgggcactgaattgcagagtctaaaaaccaatggctttggaaggggaacattatagtgatgttgaaaaatacattcgtttgcattcctagtgggccccagagtggcttaatccttaaacctcccagaagcatgcattctggaattgatgcttcttgacccaggcagaaggaaagctagccagatgagtcatgtgggcataggggtgttcccaacctccaaagccctggttccctggctttggacttctctccacccccaaggcccctcttttcccagggctcactttgtagggcttgcaccacttccccaccccagctgtgttggctgcacggacactgaggcagtaacacgtgttaggctttagctccatcagcttgacagtagtgcccaaaatcttgttgaagatccatggacgattctttgcctcgggcaactcattctcctgtgtcttggccacctcctgtaacaggagctggtagaaactgaccggctgcttgcccaaggcgtaggtccaggaaatctaggggaagagagagccccgaggcttcctcagatatgtcctgtccttcctgtcccttcaccctcccaactggggtcaggacgtcccatgcccatcccctgctcctgctggggcccaggcaggtcagatggaaggtgcaaggtactgcagcactgagtgtggaacccctgccccgaagcatgtactactctcctgggcagccccacccactttagggtacaccctcattccatatttcttatacgccaggggtcctcaacccttgggccaccaactgatagcagtccatggcctgttaggaactggatagcacagcaggaggagattggtgggcgagcaagcgaagcttcatctgtatttacagctgctccccacggctcagggtaccacctgagctctgcctcctgtcagatcagcagaggcattagattcccataggcacgtgaaccctattgtgaattgtatgggagggatctaagttgaatgctccttatgagaatctaatgcctgatgatctgtcattgtctcccatcacccccaaatgggaccctctcgttgcaggaaaacaagctcagggctcccacagtttctacattatggtgagttgtataattatttcattatatattacaatgtaataataatagaaataaagtacacaataaatgtaatatgcttgactcatcctgaaa

SEQ ID NO: 12961 - DNA, 13532 bp, Homo sapiens
ggacgcaggatggcggcagcagtgccggtgggtgtgcgtggatgggggcggggggcgtcgccgcggggcgctagggcccgggtccctgaggcctgagagaggcgaagtggggcccttctgggcgggcgaccagactgactcccgccccacttgctcgcgcaggacgaggcggtggcgcgcgatgtgcagcggttgctagtgcagttccaggatgagggcgggcagctgctgggttccccgttcgacgtgcccgtggacatcaccccggacaggctgcagctcgtgtgcaacgcgctactggcccaggtaagtggctggccagggcggcctcgcatctccacccccgggcggatgcggtgggggaatcatattaccgagggtctgcggttcatggtcccccgctaacggactgtggtgacccacctggcgtgagctcccacctatgtcagagatggaatcagtggcatagcgctttacacgccaaccaaaggggtccacctgcggagaggggcctagctttgaacgcaccggatgctgtatttcattgattctttgtcacagtcccccagtctgggacacgttaatatccccattttacagcgtggcccggagggactcagtattttgcacgatgctatgtagtaggtagcagatttggaattggaacccaaaactatccgaatacccatgcttttatttatttatttatttaccttttttttttttttttttgagacggagtctcactttgtcgccaggctggcaagctggagtgtagtggcgtgatctctgctcactgcaatctctgcctcccaggttcaagcgattctcctgcctcagcctcccgagtagctgggactacaggcgcgcgccaccacacccagctaatttttgtatttttagtggggactgggtttcaccacgttggccaggatggtctcgatctcttgacctcgtgatcctcccgccttggcctccaaagtgctggggattactggcgtgagccaccgcacccggcctttgcttttaacctttaagccagtgtgtttactgaagagctgccctggggacaggggaggtccttaaaattgcagttcctggaccccatcccagccttactaaaccaaactctgggatgaagcagaaagtctacattttttaacaggcgttttgggagctttttacacaaatatagtgtagtgtggtagtttgggaaacactgcataatgctatatgctaatcctatcttggacgtaaagaacctgaattaatcattggcaataggacattgaactaattacttagttgttctgagcctctgcttttgaaaactgtcagtgggaatattagtatctacttcccacggttgttatgagatgcagataaagaatttcaggccgggtgcagtggcttatgcctgtaatcccagtactttgggaggctgaggtgggcagatcactagaggtcaggagttcgagaccagcttagccaatatggcgaaaacagtctctactgaaaatacaaaaattagccaggcgtggtggcaggcgcctgtagtcccagctcctcgggaggctgaagcaggagaattgcttgaacccaggaggcagaggttgcagtgagctgagatctcaccactgcactccagcctgagtaacagaacgagactccatctcaaaaaaaaaagaaaaaagaatttccaagtgctgtgtaagtgtcctgcaactgctgttcagtgacttaaaaggtcttgctaggctgggcacagtggctcacgcctgtaatcccagcactttgggaggccgaggcaggtggatcacctgaggtcaggagcttgagaccagcctggccaatgtggcgaaaccccgtatctactaaaaatataaaacttagccaggcgtggtgatgggtgcctgtaatcccagctactcgggaggctgaggcaggagaatctcttgaacccaggacgcggaggttgcagtgagcagagattgctccactgcactccagcctgggtgacagagcgagactcttgtctcaaaaataaataaataaataaataaaaggtcttgctcaatgggcaatgatgggggtatccctagcacgatggctgaaaagaagaagcttcacctcccacagctcagtggggagcatccctggcagagggtgcccctgcacatccattgttgcgggtttgtcctttaccattgtccttcaggaggatcccctgccactggctttctttgtccacgatgctgagatcgtctcctcactggggaagacgttggagtcccaggcagtggagacagagaaggtcctagacatcatctaccagccacaggctatcttcagagtccgggctgtgactcgctgcaccagctccttggagggtcacagtgaggcagtcatttctgtggccttcagccctacgggaaagtaaggacagctgcagactcatggagggggtatgtgggggtgcagtctttgcctggtttggggagggtctcccagagttataattgatggggcctcagggctgcctaccatagacccaagctctggactcagcttgcaattaagggacttcctcagtagggcatggtccccaaaggctgcttaaggacccctgccttggacaaacctctcctagacttgatttttcaagatctgagctgtgtgacttgtataaatcacttaacctttccgagttaatttttcatctgtgaaactgggattagttgcttctctcaaacttagaaaggtaatgagaagcttcaaaagctggttatagctgtggagaggaaagaaatggcctcctgatgtattctcccagaggacagcatcagtattgtctttctcccttccaggggcgaggaaagagtccagttccatattctattcacagaaagtgattgaataggtggcacaaatgcacatgtgcagtgtcaagcatcctctcttcttccccaggtacctggccagtggctctggagacaccaccgtgcgcttctgggatctcagcacagagacaccacatttcacatgcaagggtcagtatgcaattagccatttagggggtcttctttttttttgagacaaggtcttgctctgttgaccaggatggagtacagtggtgcagtcacagctcacttgaactcctgggctcaagccttgaactcctgggttcaagcagtccccctacttcagcctccagagtagctgggatgacaggcacttgccatcacacctggctcgttttttgttttcatacagatgagggtctcactttgcagattacaaccccttaatatccagttggcggctgtctgttcctaggtagagaccatgtccttgagcccagccagccacttagacacaagcagaaactgcaccaaggagtcaatatgggacatggtgagaggctgactgactgctaccaaggagaacctggtttaaatcctgcctctgccacagtggttttcaaacttgagcacaaatcagaattgccccgcctcaggggcttgttaaaatgcagattgctggccaggcgtggtggcccacacctgtaatcccagcacttcgggaggccaaggcaggcagatcacttgaggtcaggagtttgagaccagcctcgccaacacagtgaaaccccatctctactaaaactacaaaaattagccgggcatggtggcgtgtgcttgtaatcccagccactggggaggctgaggcagaagaattgctcgaatctaggaggcggaggttgcagtgagccgagatggcaccactgcactccagcctgggtgatggagtgtgactccatgaaagaaagagagagagagaaaagagaagagagaaaaaaatacagattgctgggccccacccccagaggtttagttctattgggcctggggtagggcctgggaatctgcatttctaacaagttcccaggagatgctgatgctgctgctctgacgaccacacttgaagaaccactgctataccacagattagttaagtgaccttgtgtgtgtagggcatgttccctttctaagcttcaattttctcatctggaaaatggggatgataattcttgctttgctccatagcttagagctcttgtgagaaataacaagggatgacatgtacaaaaacacttcatagcatgtgtcacataaggagtcattagagagtgatggtgttatccatgcagcaagatgcagagctctaacacttggggtgcattctatccatccccagaaagcctcatcgctccttttgttcaatcattcatttattcaaatggttaaggagtacctggcacctgacaggcactgctgggcacttgggataaagacagatgtagtcccttatttctccctcctctgctttcttaggacacagacactgggtccttagtatatcctggtctccagatggcaggaagctggcctcaggctgcaagaatggccaggtaggtagttctcagggtaactaggcagagactcaagggggccttcctaggagacagttcagaatcaggttcaggagtctttggggagggttgggtgggaagtggtaggcagggattttggtggagccagagacctgttggggaggattattcagtgagcttctgtccttcagattctcctctgggacccaagcacagggaagcaggtgggcaggaccctcgctggccacagcaagtggatcacaggcctgagctgggagcccctccatgcgtaagtgacactgacggagctgggacaaatgagccaggggatcaaagccatcccctttccctgcccaatgcatagaagttttacgtgaggggacaagatgggcagcctgaatgaccgtgatggcttggcaggcatgggagaagggtctcgggcagacctgcattgctgcttgggagaggctctcatcacagggtctgctggttgcagtcaccttgcagtgcagccgggtcttggtgtcagaaaagctgtcaaaagattgtccatggcctttaagttgggaatggggaggtgccatgggcacacagatgttgccaggtcacagatgaggtcacatctcccttctctccaggaaccctgagtgccgctatgtggccagcagctccaaggatggcagtgtgcggatctgggacacaactgcaggccgctgtgagcgcatcctcaccgggcacacccagtcggtcacctgtctccggtggggaggggacgggcttctctactctgcctcccaggaccgcaccatcaaagtctggagagctcatgacgtaagtgctgggagggttcagaaaccagtccagaaaatcgcaagtcacaagatgctggcactcagaatgaccttgacatcagcgagtccagtgtttcccagatgtgtgctgggagccctggtctagggaggtgttttgggaatgaggagttctgtggttggtgctgcaccatagtggagattgcagagtccccatgagatcgtcacactctggaaattcctcctgtaggacagctgttgggctttatcagatctaccatatcccaaatgtattggacaggagccgtttactctgacatccctaactcctcttccatgaaacattttcatgatctggactccattttacaagtggggagagacttgaccccagaggggtagtttgattaagatcacaatgcatgagtgatgatgattattagtcttgtaccacctgtctcctggggctaatcgcccaggcgtggggaggagtgtgtgtgtctgacctgactcgctctcccgtagggtgtgctgtgccggactctgcaaggccacggccactgggtgaacaccatggccctcagcactgactatgccctgcgcactggggcctttgaacctgctgaggcctcagttaatccccaagacctccaaggatcctgtgagtgattgggagaaggaagagcgggggctgattgggaaggagccagttctcaagcttaatggggagtgtttgctctttgtgttggattttcttatcggccttcttcctcatctccttttctcccctccggtacctggtcacagtgcaggagttgaaggagagggctctgagccgatacaacctcgtgcgggtgagtgtgtgccagccacgtgcacccctagctctgtaccagtccttagccaatcactaaaaccctctcagacccttctcccttctagacccagctcagaatgtacctattccaaaaagttgttcttcataatcctagtttgcaatcctaaaatactaatgtgctagagatcattttatttcgttttttgtttagtttatttgcttgtctatttattacatttccaacatgcttcttttttactttaatttgttgtttaagattgttcacacattcacgttcaaaaaatacaaaaggtagatcgcggagtctcccgtctctattgtagcatccagtgccaccagtatcctgaatcaccttccagagatttaatatacagacacgtgtctatatacagtatatatgtataagcacacacacacatgcatacatacataaaatccttcttttaacacattattttgtgcctttttctgtaattatgtatcttaaaatttttttctacatgcatgtagagtttctttttccttttggatgaagtgacttgcctggggtcacatgcgagtgagtggccaagccagtcctcattgctcctagcgctggcctctctctgtccctggcattgagtaatcagggtgtatgcttgctgccaaagtcgggccctcctccttctttctgagaccacacccaacacagtgtgctttctgcctcccctagggccagggtccagagaggctggtgtctggctccgacgacttcaccttattcctgtggtccccagcagaggacaaaaagcctctcactcggatgacaggacaccaagctctcatcaaccaggtgctcttctctcctgactcccgcatcgtggctagtgcctcctttgacaagtccatcaagctgtgggatggcaggacgggcaagtgagtaggggtgggtactgcttctctgtaaggagtgaatggtgggaggggcttggcactgccacttactagctgtatggccttggcaggtgtttggattttctaagccactgtttcctctttggtaatatgcagaccccctacctctcagctttgttacaaggtgtttgtttgtttgtttgtttttagagatgactttcactctgtcacctggtgttcaagtggctcgagtgcagcggcacgatcttggctcattacaacctctgcttcctgggttcaagtgattctcctgcctcagcctcccaggtagctgggattacaggcctccgccaccgtgcctggctaatttttgtatttttagttgagacggggtttcaccatgttgactaggctggtcttgaactcctgagctcaagtgatccaactgcctcggcctcccaaagtgctgggattacaggtgtgagccgccatgcccagcctagttacacggatttaatgagacagtatgtttaggacccgcactaagtggtcactaaaaatgctagttcaggctgggcgtggtggctcatgcccataatcccaggagtttgggaggccaaggcaggcagatcacctgagttcaggagttcgagactagcctggccaacatggcaaaaccctgtctctactaaaaatacaaaaattagccaggcatagtggcacgtgcctataatcccagttaccccggaggctgaggcaggagaatcatttgaacttgggaggcaaaggttgcagtgagtcgagttcacaccactgtactccagcctgggcaacagagtgatactgtgtctcaaaaaaaaaaaaatgctagtttatgtcttaggagagaagtgatcttagagctagctgctgaagaggtagggctgtagccctggagaaggtgaagtggtggtaggtaggcttgtggtacaattgttacttggccctcctcaaagtgtgggccacagaccagcggcatcagcatcacctgggagcttgatagaaatgcagagtcctggccccaactcagaccttgtggatctgattcttcattttaacaaagttaccaggtgactctgctacccactcaagtatgggaacccttggtgtgatgaggcacagtgctcttggggttaatcggattagaggagaggcaaaggcacaggcaagggggagaaaaagagccagggaaaccttgttagggctgaaggggggacctctgcgttagtgacgtcactgtgttttcacacagcaaccctttaagataggtaattgggttcctttttaaaataaggaaaatgagtctcagagaggcctgatggtttgtccaaagagaaacagctagactgtgttgacgtgaaagttcagtgggcccactgttactccatgccacctgtcagcaggcacttgctgtttggggggatgacaggcagatgggctaagcagatggccacgttggagtctaaggcatgcaaagttgtgcaggtatggagggcaagcaagaggcatgctagaagctactcatttggagaagttttacaaattgtaatgactggtaatgattaaaaatggtctgggatggggaccaggcagtgtgattttgtaaaggttcccaggtatttctaacagacagccgaggttgagaaccactgccatgagcgtaggggacccttcagacgtgttgaaagatgtaactcagactaaaatccatcatcgtcttctcctggaccaggtacctggcttccctacgcggccacgtggctgccgtgtaccagattgcgtggtcagctgacagtcggctcctggtcagcggcagcagtgacagcacactgaaggtgtgggatgtgaaggcccagaagctggccatggacctgcccggccacgcggatgaggtagggccaaccctcaggcaaaggagggactgggattggagcctggctggctgtctccctctcaccaccccacctgccttcctctgcctccctttaggtatatgctgttgactggagtccagatggccagagagtggcaagtggtgggaaggacaaatgcctccggatgtgagtgtgggggaagtggtggttggcatacacagccctcctacccctaaggtccttctgtgcacactttcccttacagcatagaattccgcagggccgtccaggtgctcagactgtcttgaggaggcgtgtggagccagattctcagtgggcaagtgggagggccacaagtgggagggccaccggaacaacagaggccacaggacacctcgtagagggcgcgtccaggtctttctgtcagtgggcaagtgggagggccaccggaacaacaggggccacaggacaccttgtagagggcgcatccaggtctttctgtcactagacttcagagtcgcaagacctgagttcaaatcctggttctgccatggagtaatcacagagaacttggttaatcagtctcttgggaattatcaaaccttcacagacaggatcaaaaataggagggtcaacactctggaagacaaagtgttgtgtgcttataagggattgtgactgtttgctggtgggcatcccgagggccaggccctgggtggaggtcctggtggcagcaggcagtgagtgggcagcctgagtttgggtgggcagagcagggacggtcacctggctcttggtgactctgagggtggaccacaggccgtccgtctgttgacactgggattatatgacggcctccctttcctaaggtggaatccccatcctgacacccttcccttctccacagatggaggagatgagacggcccgaagttctctctgacccccacctcgactcggcctctgccagctgccttccctgccagagaacaaaggctgagatggcagtgcacacaccctccccaccagtggggacctgagaatgcgtgtggcctgctgtcctcgatagaccggaatggggttttcccacagatccccgcctgtggcacaccccagagccagaaatcgaaggtcacaggaagttgtcactgaacttggcccgtgtctgctactctgtaccttgctggtacagacaggggtggtgggcagccaggctctatgagtgggcccctagtgtcagctctgtacagggtcagatcccaggttctatgaccaaataagtaacttaagttttgtgtgttgggttctaattccttgtcctagaatccccatgactcaatcaaggactgtgctaaatgagattgtccagcccccgcccttgcactggactacgccaaaaccacactgaccaggcacttgccttccctctcttcccccgtgttggtaagagagaggccagttgtgatagtggccaaggagaatctagggctgtattgttgtccactgcagtaggcaccggccacatgtgactgctggcatgaaatagaagtgcagttcctccatcgcactgggtaaggcctccagtattggacagcacacagaaaggttttcatcatcaagagagttctgctggtcagccctgctccaggggatgcctctgccttcgcatagcacactgcttgaggccctgccaggcaccaagcactgccctgggcccatgggatagagcggggaaggtgatggctcttccagaggattccctcagatggggaggcagcagtatgagctctgagcagaagtgggtattgttgatacagaggaagttctttgccacgagaactttcaagcagtgaaaggaattcccatcaggactcagaccccaggccgagatcttgccctgaatgtaccctgcctctgctttctcctgcatcccatgctaagcagggtcatggtctgaactactcagattggatttccaaaccatccttgtataaactgctcagaactagcatcttgctccttcttaccctcctccacccttgtctgtgcttttgggttttgcgcgtcacctagctgtggtgcttggcctccaccttgcacatatctgcagtgaggctacataagaagcgaacaaaactatcagccactgagctccttggtgccagctgtttgtctgctgtgctctcagactgcaccaggcctggaaggttctcaagctccaaaacttttgatgaggaaacaacataagaaatgattagcccatgccctcacatctagtaagagaaagctgggattaaaccaggccctgccccaaagcttattgtgcactttgtaccacatccctccgtccagagctcaagctagtttgacagttcatgggccaccacgtctgtccatgacagctatttctgtatttttctggtgtaagagccttttagtcttagagcaccagtctccctgttcccctaccccgccccactggggaaggggtgatggcagcatcctattgcctagctgcctgttttctatctccccacccatgtagactctgtcctggtggaagctaggaggtgggtgccagccagcccatctgaggctgtctgcagcataaagcagactttagggtgctggatgacctgcagttctttaatgagggacctagacccagcccagatttggaggaggagggagtctagcagctgtgggcagtggctgagcctggcatggcctggcctgagatgcctccaggtgaatggggcccctatgtagccttggccccagcccaggggtggggtgcccataccactctgccagaccccgggcccgcagggtgctggtggtatggtaggtctcatggctctggtttctgagggcctggggttgaagctgaaagtaggtgaggggtgtcctggggccctcccccttaacagggaaataggtattccagatcctccagcctccgcatctcctccggcccgatggacacgatcttttgccggggttccttgcgccgcacggtgatctggatggggtagttctcaggaaagctgctgaagtcagtggccagggttgcaaactgaagtgaaacaagaaaacccttcagagttccttcccagatctgaacctggctctctctctgtctctatcaccccttttttttctgtctgctgactcagaccttaaacagccttatccaacctagccattgacgcaggaaacaggtgcaaagatgcatgactcaagcctgtacctcctcattatgggatatttccaaccaaagggctgtctgtactcaggcctctatacccccatacccctaccccatacccaggctgttcccttcttcgtccccctttagcctcttgtcttccctatttctttcaatgcccttgacttcccagcctactcacaatcatgggcactgaattgcagagtctaaaaaccaatggctttggaaggggaacattatagtgatgttgaaaaatacattcgtttgcattcctagtgggccccagagtggcttaatccttaaacctcccagaagcatgcattctggaattgatgcttcttgacccaggcagaaggaaagctagccagatgagtcatgtgggcataggggtgttcccaacctccaaagccctggttccctggctttggacttctctccacccccaaggcccctcttttcccagggctcactttgtagggcttgcaccacttccccaccccagctgtgttggctgcacggacactgaggcagtaacacgtgttaggctttagctccatcagcttgacagtagtgcccaaaatcttgttgaagatccatggacgattctttgcctcgggcaactcattctcctgtgtcttggccacctcctgtaacaggagctggtagaaactgaccggctgcttgcccaaggcgtaggtccaggaaatctaggggaagagagagccccgaggcttcctcagatatgtcctgtccttcctgtcccttcaccctcccaactggggtcaggacgtcccatgcccatcccctgctcctgctggggcccaggcaggtcagatggaaggtgcaaggtactgcagcactgagtgtggaacccctgccccgaagcatgtactactctcctgggcagccccacccactttagggtacaccctcattccatatttcttatacgccaggggtcctcaacccttgggccaccaactgatagcagtccatggcctgttaggaactggatagcacagcaggaggagattggtgggcgagcaagcgaagcttcatctgtatttacagctgctccccacggctcagggtaccacctgagctctgcctcctgtcagatcagcagaggcattagattcccataggcacgtgaaccctattgtgaattgtatgggagggatctaagttgaatgctccttatgagaatctaatgcctgatgatctgtcattgtctcccatcacccccaaatgggaccctctcgttgcaggaaaacaagctcagggctcccacagtttctacattatggtgagttgtataattatttcattatatattacaatgtaataataatagaaataaagtacacaataaatgt

SEQ ID NO: 12962 - DNA, 5286 bp, Homo sapiens
ggacgcaggatggcggcagcagtgccggtgggtgtgcgtggatgggggcggggggcgtcgccgcggggcgctagggcccgggtccctgaggcctgagagaggcgaagtggggcccttctgggcgggcgaccagactgactcccgccccacttgctcgcgcaggacgaggcggtggcgcgcgatgtgcagcggttgctagtgcagttccaggatgagggcgggcagctgctgggttccccgttcgacgtgcccgtggacatcaccccggacaggctgcagctcgtgtgcaacgcgctactggcccaggaggatcccctgccactggctttctttgtccacgatgctgagatcgtctcctcactggggaagacgttggagtcccaggcagtggagacagagaaggtcctagacatcatctaccagccacaggctatcttcagagtccgggctgtgactcgctgcaccagctccttggagggtcacagtgaggcagtcatttctgtggccttcagccctacgggaaagtacctggccagtggctctggagacaccaccgtgcgcttctgggatctcagcacagagacaccacatttcacatgcaagggacacagacactgggtccttagtatatcctggtctccagatggcaggaagctggcctcaggctgcaagaatggccagattctcctctgggacccaagcacagggaagcaggtgggcaggaccctcgctggccacagcaagtggatcacaggcctgagctgggagcccctccatgcgaaccctgagtgccgctatgtggccagcagctccaaggatggcagtgtgcggatctgggacacaactgcaggccgctgtgagcgcatcctcaccgggcacacccagtcggtcacctgtctccggtggggaggggacgggcttctctactctgcctcccaggaccgcaccatcaaagtctggagagctcatgacggtgtgctgtgccggactctgcaaggccacggccactgggtgaacaccatggccctcagcactgactatgccctgcgcactggggcctttgaacctgctgaggcctcagttaatccccaagacctccaaggatccttgcaggagttgaaggagagggctctgagccgatacaacctcgtgcggggccagggtccagagaggctggtgtctggctccgacgacttcaccttattcctgtggtccccagcagaggacaaaaagcctctcactcggatgacaggacaccaagctctcatcaaccaggtgctcttctctcctgactcccgcatcgtggctagtgcctcctttgacaagtccatcaagctgtgggatggcaggacgggcaagtacctggcttccctacgcggccacgtggctgccgtgtaccagattgcgtggtcagctgacagtcggctcctggtcagcggcagcagtgacagcacactgaaggtgtgggatgtgaaggcccagaagctggccatggacctgcccggccacgcggatgaggtatatgctgttgactggagtccagatggccagagagtggcaagtggtgggaaggacaaatgcctccggatatggaggagatgagacggcccgaagttctctctgacccccacctcgactcggcctctgccagctgccttccctgccagagaacaaaggctgagatggcagtgcacacaccctccccaccagtggggacctgagaatgcgtgtggcctgctgtcctcgatagaccggaatggggttttcccacagatccccgcctgtggcacaccccagagccagaaatcgaaggtcacaggaagttgtcactgaacttggcccgtgtctgctactctgtaccttgctggtacagacaggggtggtgggcagccaggctctatgagtgggcccctagtgtcagctctgtacagggtcagatcccaggttctatgaccaaataagtaacttaagttttgtgtgttgggttctaattccttgtcctagaatccccatgactcaatcaaggactgtgctaaatgagattgtccagcccccgcccttgcactggactacgccaaaaccacactgaccaggcacttgccttccctctcttcccccgtgttggtaagagagaggccagttgtgatagtggccaaggagaatctagggctgtattgttgtccactgcagtaggcaccggccacatgtgactgctggcatgaaatagaagtgcagttcctccatcgcactgggtaaggcctccagtattggacagcacacagaaaggttttcatcatcaagagagttctgctggtcagccctgctccaggggatgcctctgccttcgcatagcacactgcttgaggccctgccaggcaccaagcactgccctgggcccatgggatagagcggggaaggtgatggctcttccagaggattccctcagatggggaggcagcagtatgagctctgagcagaagtgggtattgttgatacagaggaagttctttgccacgagaactttcaagcagtgaaaggaattcccatcaggactcagaccccaggccgagatcttgccctgaatgtaccctgcctctgctttctcctgcatcccatgctaagcagggtcatggtctgaactactcagattggatttccaaaccatccttgtataaactgctcagaactagcatcttgctccttcttaccctcctccacccttgtctgtgcttttgggttttgcgcgtcacctagctgtggtgcttggcctccaccttgcacatatctgcagtgaggctacataagaagcgaacaaaactatcagccactgagctccttggtgccagctgtttgtctgctgtgctctcagactgcaccaggcctggaaggttctcaagctccaaaacttttgatgaggaaacaacataagaaatgattagcccatgccctcacatctagtaagagaaagctgggattaaaccaggccctgccccaaagcttattgtgcactttgtaccacatccctccgtccagagctcaagctagtttgacagttcatgggccaccacgtctgtccatgacagctatttctgtatttttctggtgtaagagccttttagtcttagagcaccagtctccctgttcccctaccccgccccactggggaaggggtgatggcagcatcctattgcctagctgcctgttttctatctccccacccatgtagactctgtcctggtggaagctaggaggtgggtgccagccagcccatctgaggctgtctgcagcataaagcagactttagggtgctggatgacctgcagttctttaatgagggacctagacccagcccagatttggaggaggagggagtctagcagctgtgggcagtggctgagcctggcatggcctggcctgagatgcctccaggtgaatggggcccctatgtagccttggccccagcccaggggtggggtgcccataccactctgccagaccccgggcccgcagggtgctggtggtatggtaggtctcatggctctggtttctgagggcctggggttgaagctgaaagtaggtgaggggtgtcctggggccctcccccttaacagggaaataggtattccagatcctccagcctccgcatctcctccggcccgatggacacgatcttttgccggggttccttgcgccgcacggtgatctggatggggtagttctcaggaaagctgctgaagtcagtggccagggttgcaaactgaagtgaaacaagaaaacccttcagagttccttcccagatctgaacctggctctctctctgtctctatcaccccttttttttctgtctgctgactcagaccttaaacagccttatccaacctagccattgacgcaggaaacaggtgcaaagatgcatgactcaagcctgtacctcctcattatgggatatttccaaccaaagggctgtctgtactcaggcctctatacccccatacccctaccccatacccaggctgttcccttcttcgtccccctttagcctcttgtcttccctatttctttcaatgcccttgacttcccagcctactcacaatcatgggcactgaattgcagagtctaaaaaccaatggctttggaaggggaacattatagtgatgttgaaaaatacattcgtttgcattcctagtgggccccagagtggcttaatccttaaacctcccagaagcatgcattctggaattgatgcttcttgacccaggcagaaggaaagctagccagatgagtcatgtgggcataggggtgttcccaacctccaaagccctggttccctggctttggacttctctccacccccaaggcccctcttttcccagggctcactttgtagggcttgcaccacttccccaccccagctgtgttggctgcacggacactgaggcagtaacacgtgttaggctttagctccatcagcttgacagtagtgcccaaaatcttgttgaagatccatggacgattctttgcctcgggcaactcattctcctgtgtcttggccacctcctgtaacaggagctggtagaaactgaccggctgcttgcccaaggcgtaggtccaggaaatctaggggaagagagagccccgaggcttcctcagatatgtcctgtccttcctgtcccttcaccctcccaactggggtcaggacgtcccatgcccatcccctgctcctgctggggcccaggcaggtcagatggaaggtgcaaggtactgcagcactgagtgtggaacccctgccccgaagcatgtactactctcctgggcagccccacccactttagggtacaccctcattccatatttcttatacgccaggggtcctcaacccttgggccaccaactgatagcagtccatggcctgttaggaactggatagcacagcaggaggagattggtgggcgagcaagcgaagcttcatctgtatttacagctgctccccacggctcagggtaccacctgagctctgcctcctgtcagatcagcagaggcattagattcccataggcacgtgaaccctattgtgaattgtatgggagggatctaagttgaatgctccttatgagaatctaatgcctgatgatctgtcattgtctcccatcacccccaaatgggaccctctcgttgcaggaaaacaagctcagggctcccacagtttctacattatggtgagttgtataattatttcattatatattacaatgtaataataatagaaataaagtacacaataaatgt

SEQ ID NO: 12963 - DNA, 4924 bp, Homo sapiens
gcagctccaaggatggcagtgtgcggatctgggacacaactgcaggccgctgtgagcgcatcctcaccgggcacacccagtcggtcacctgtctccggtggggaggggacgggcttctctactctgcctcccaggaccgcaccatcaaagtctggagagctcatgacgtaagtgctgggagggttcagaaaccagtccagaaaatcgcaagtcacaagatgctggcactcagaatgaccttgacatcagcgagtccagtgtttcccagatgtgtgctgggagccctggtctagggaggtgttttgggaatgaggagttctgtggttggtgctgcaccatagtggagattgcagagtccccatgagatcgtcacactctggaaattcctcctgtaggacagctgttgggctttatcagatctaccatatcccaaatgtattggacaggagccgtttactctgacatccctaactcctcttccatgaaacattttcatgatctggactccattttacaagtggggagagacttgaccccagaggggtagtttgattaagatcacaatgcatgagtgatgatgattattagtcttgtaccacctgtctcctggggctaatcgcccaggcgtggggaggagtgtgtgtgtctgacctgactcgctctcccgtagggtgtgctgtgccggactctgcaaggccacggccactgggtgaacaccatggccctcagcactgactatgccctgcgcactggggcctttgaacctgctgaggcctcagttaatccccaagacctccaaggatcctgtgagtgattgggagaaggaagagcgggggctgattgggaaggagccagttctcaagcttaatggggagtgtttgctctttgtgttggattttcttatcggccttcttcctcatctccttttctcccctccggtacctggtcacagtgcaggagttgaaggagagggctctgagccgatacaacctcgtgcgggtgagtgtgtgccagccacgtgcacccctagctctgtaccagtccttagccaatcactaaaaccctctcagacccttctcccttctagacccagctcagaatgtacctattccaaaaagttgttcttcataatcctagtttgcaatcctaaaatactaatgtgctagagatcattttatttcgttttttgtttagtttatttgcttgtctatttattacatttccaacatgcttcttttttactttaatttgttgtttaagattgttcacacattcacgttcaaaaaatacaaaaggtagatcgcggagtctcccgtctctattgtagcatccagtgccaccagtatcctgaatcaccttccagagatttaatatacagacacgtgtctatatacagtatatatgtataagcacacacacacatgcatacatacataaaatccttcttttaacacattattttgtgcctttttctgtaattatgtatcttaaaatttttttctacatgcatgtagagtttctttttccttttggatgaagtgacttgcctggggtcacatgcgagtgagtggccaagccagtcctcattgctcctagcgctggcctctctctgtccctggcattgagtaatcagggtgtatgcttgctgccaaagtcgggccctcctccttctttctgagaccacacccaacacagtgtgctttctgcctcccctagggccagggtccagagaggctggtgtctggctccgacgacttcaccttattcctgtggtccccagcagaggacaaaaagcctctcactcggatgacaggacaccaagctctcatcaaccaggtgctcttctctcctgactcccgcatcgtggctagtgcctcctttgacaagtccatcaagctgtgggatggcaggacgggcaagtgagtaggggtgggtactgcttctctgtaaggagtgaatggtgggaggggcttggcactgccacttactagctgtatggccttggcaggtgtttggattttctaagccactgtttcctctttggtaatatgcagaccccctacctctcagctttgttacaaggtgtttgtttgtttgtttgtttttagagatgactttcactctgtcacctggtgttcaagtggctcgagtgcagcggcacgatcttggctcattacaacctctgcttcctgggttcaagtgattctcctgcctcagcctcccaggtagctgggattacaggcctccgccaccgtgcctggctaatttttgtatttttagttgagacggggtttcaccatgttgactaggctggtcttgaactcctgagctcaagtgatccaactgcctcggcctcccaaagtgctgggattacaggtgtgagccgccatgcccagcctagttacacggatttaatgagacagtatgtttaggacccgcactaagtggtcactaaaaatgctagttcaggctgggcgtggtggctcatgcccataatcccaggagtttgggaggccaaggcaggcagatcacctgagttcaggagttcgagactagcctggccaacatggcaaaaccctgtctctactaaaaatacaaaaattagccaggcatagtggcacgtgcctataatcccagttaccccggaggctgaggcaggagaatcatttgaacttgggaggcaaaggttgcagtgagtcgagttcacaccactgtactccagcctgggcaacagagtgatactgtgtctcaaaaaaaaaaaaatgctagtttatgtcttaggagagaagtgatcttagagctagctgctgaagaggtagggctgtagccctggagaaggtgaagtggtggtaggtaggcttgtggtacaattgttacttggccctcctcaaagtgtgggccacagaccagcggcatcagcatcacctgggagcttgatagaaatgcagagtcctggccccaactcagaccttgtggatctgattcttcattttaacaaagttaccaggtgactctgctacccactcaagtatgggaacccttggtgtgatgaggcacagtgctcttggggttaatcggattagaggagaggcaaaggcacaggcaagggggagaaaaagagccagggaaaccttgttagggctgaaggggggacctctgcgttagtgacgtcactgtgttttcacacagcaaccctttaagataggtaattgggttcctttttaaaataaggaaaatgagtctcagagaggcctgatggtttgtccaaagagaaacagctagactgtgttgacgtgaaagttcagtgggcccactgttactccatgccacctgtcagcaggcacttgctgtttggggggatgacaggcagatgggctaagcagatggccacgttggagtctaaggcatgcaaagttgtgcaggtatggagggcaagcaagaggcatgctagaagctactcatttggagaagttttacaaattgtaatgactggtaatgattaaaaatggtctgggatggggaccaggcagtgtgattttgtaaaggttcccaggtatttctaacagacagccgaggttgagaaccactgccatgagcgtaggggacccttcagacgtgttgaaagatgtaactcagactaaaatccatcatcgtcttctcctggaccaggtacctggcttccctacgcggccacgtggctgccgtgtaccagattgcgtggtcagctgacagtcggctcctggtcagcggcagcagtgacagcacactgaaggtgtgggatgtgaaggcccagaagctggccatggacctgcccggccacgcggatgaggtagggccaaccctcaggcaaaggagggactgggattggagcctggctggctgtctccctctcaccaccccacctgccttcctctgcctccctttaggtatatgctgttgactggagtccagatggccagagagtggcaagtggtgggaaggacaaatgcctccggatgtgagtgtgggggaagtggtggttggcatacacagccctcctacccctaaggtccttctgtgcacactttcccttacagcatagaattccgcagggccgtccaggtgctcagactgtcttgaggaggcgtgtggagccagattctcagtgggcaagtgggagggccacaagtgggagggccaccggaacaacagaggccacaggacacctcgtagagggcgcgtccaggtctttctgtcagtgggcaagtgggagggccaccggaacaacaggggccacaggacaccttgtagagggcgcatccaggtctttctgtcactagacttcagagtcgcaagacctgagttcaaatcctggttctgccatggagtaatcacagagaacttggttaatcagtctcttgggaattatcaaaccttcacagacaggatcaaaaataggagggtcaacactctggaagacaaagtgttgtgtgcttataagggattgtgactgtttgctggtgggcatcccgagggccaggccctgggtggaggtcctggtggcagcaggcagtgagtgggcagcctgagtttgggtgggcagagcagggacggtcacctggctcttggtgactctgagggtggaccacaggccgtccgtctgttgacactgggattatatgacggcctccctttcctaaggtggaatccccatcctgacacccttcccttctccacagatggaggagatgagacggcccgaagttctctctgacccccacctcgactcggcctctgccagctgccttccctgccagagaacaaaggctgagatggcagtgcacacaccctccccaccagtggggacctgagaatgcgtgtggcctgctgtcctcgatagaccggaatggggttttcccacagatccccgcctgtggcacacccc

SEQ ID NO: 12964 - DNA, 1107 bp, Homo sapiens
gcagctccaaggatggcagtgtgcggatctgggacacaactgcaggccgctgtgagcgcatcctcaccgggcacacccagtcggtcacctgtctccggtggggaggggacgggcttctctactctgcctcccaggaccgcaccatcaaagtctggagagctcatgacggtgtgctgtgccggactctgcaaggccacggccactgggtgaacaccatggccctcagcactgactatgccctgcgcactggggcctttgaacctgctgaggcctcagttaatccccaagacctccaaggatccttgcaggagttgaaggagagggctctgagccgatacaacctcgtgcggggccagggtccagagaggctggtgtctggctccgacgacttcaccttattcctgtggtccccagcagaggacaaaaagcctctcactcggatgacaggacaccaagctctcatcaaccaggtgctcttctctcctgactcccgcatcgtggctagtgcctcctttgacaagtccatcaagctgtgggatggcaggacgggcaaagatgactttcactctgtcacctggtgttcaagtggctcgagtgcagcggcacgatcttggctcattacaacctctgcttcctgggttcaagtgattctcctgcctcagcctcccaggtacctggcttccctacgcggccacgtggctgccgtgtaccagattgcgtggtcagctgacagtcggctcctggtcagcggcagcagtgacagcacactgaaggtgtgggatgtgaaggcccagaagctggccatggacctgcccggccacgcggatgaggtatatgctgttgactggagtccagatggccagagagtggcaagtggtgggaaggacaaatgcctccggatatggaggagatgagacggcccgaagttctctctgacccccacctcgactcggcctctgccagctgccttccctgccagagaacaaaggctgagatggcagtgcacacaccctccccaccagtggggacctgagaatgcgtgtggcctgctgtcctcgatagaccggaatggggttttcccacagatccccgcctgtggcacacccc

SEQ ID NO: 12965 - DNA, 5245 bp, Homo sapiens
ctcctccacgtggggacgcaggatggcggcagcagtgccggtgggtgtgcgtggatgggggcggggggcgtcgccgcggggcgctagggcccgggtccctgaggcctgagagaggcgaagtggggcccttctgggcgggcgaccagactgactcccgccccacttgctcgcgcaggacgaggcggtggcgcgcgatgtgcagcggttgctagtgcagttccaggatgagggcgggcagctgctgggttccccgttcgacgtgcccgtggacatcaccccggacaggctgcagctcgtgtgcaacgcgctactggcccaggtaagtggctggccagggcggcctcgcatctccacccccgggcggatgcggtgggggaatcatattaccgagggtctgcggttcatggtcccccgctaacggactgtggtgacccacctggcgtgagctcccacctatgtcagagatggaatcagtggcatagcgctttacacgccaaccaaaggggtccacctgcggagaggggcctagctttgaacgcaccggatgctgtatttcattgattctttgtcacagtcccccagtctgggacacgttaatatccccattttacagcgtggcccggagggactcagtattttgcacgatgctatgtagtaggtagcagatttggaattggaacccaaaactatccgaatacccatgcttttatttatttatttatttaccttttttttttttttttttgagacggagtctcactttgtcgccaggctggcaagctggagtgtagtggcgtgatctctgctcactgcaatctctgcctcccaggttcaagcgattctcctgcctcagcctcccgagtagctgggactacaggcgcgcgccaccacacccagctaatttttgtatttttagtggggactgggtttcaccacgttggccaggatggtctcgatctcttgacctcgtgatcctcccgccttggcctccaaagtgctggggattactggcgtgagccaccgcacccggcctttgcttttaacctttaagccagtgtgtttactgaagagctgccctggggacaggggaggtccttaaaattgcagttcctggaccccatcccagccttactaaaccaaactctgggatgaagcagaaagtctacattttttaacaggcgttttgggagctttttacacaaatatagtgtagtgtggtagtttgggaaacactgcataatgctatatgctaatcctatcttggacgtaaagaacctgaattaatcattggcaataggacattgaactaattacttagttgttctgagcctctgcttttgaaaactgtcagtgggaatattagtatctacttcccacggttgttatgagatgcagataaagaatttcaggccgggtgcagtggcttatgcctgtaatcccagtactttgggaggctgaggtgggcagatcactagaggtcaggagttcgagaccagcttagccaatatggcgaaaacagtctctactgaaaatacaaaaattagccaggcgtggtggcaggcgcctgtagtcccagctcctcgggaggctgaagcaggagaattgcttgaacccaggaggcagaggttgcagtgagctgagatctcaccactgcactccagcctgagtaacagaacgagactccatctcaaaaaaaaaagaaaaaagaatttccaagtgctgtgtaagtgtcctgcaactgctgttcagtgacttaaaaggtcttgctaggctgggcacagtggctcacgcctgtaatcccagcactttgggaggccgaggcaggtggatcacctgaggtcaggagcttgagaccagcctggccaatgtggcgaaaccccgtatctactaaaaatataaaacttagccaggcgtggtgatgggtgcctgtaatcccagctactcgggaggctgaggcaggagaatctcttgaacccaggacgcggaggttgcagtgagcagagattgctccactgcactccagcctgggtgacagagcgagactcttgtctcaaaaataaataaataaataaataaaaggtcttgctcaatgggcaatgatgggggtatccctagcacgatggctgaaaagaagaagcttcacctcccacagctcagtggggagcatccctggcagagggtgcccctgcacatccattgttgcgggtttgtcctttaccattgtccttcaggaggatcccctgccactggctttctttgtccacgatgctgagatcgtctcctcactggggaagacgttggagtcccaggcagtggagacagagaaggtcctagacatcatctaccagccacaggctatcttcagagtccgggctgtgactcgctgcaccagctccttggagggtcacagtgaggcagtcatttctgtggccttcagccctacgggaaagtaaggacagctgcagactcatggagggggtatgtgggggtgcagtctttgcctggtttggggagggtctcccagagttataattgatggggcctcagggctgcctaccatagacccaagctctggactcagcttgcaattaagggacttcctcagtagggcatggtccccaaaggctgcttaaggacccctgccttggacaaacctctcctagacttgatttttcaagatctgagctgtgtgacttgtataaatcacttaacctttccgagttaatttttcatctgtgaaactgggattagttgcttctctcaaacttagaaaggtaatgagaagcttcaaaagctggttatagctgtggagaggaaagaaatggcctcctgatgtattctcccagaggacagcatcagtattgtctttctcccttccaggggcgaggaaagagtccagttccatattctattcacagaaagtgattgaataggtggcacaaatgcacatgtgcagtgtcaagcatcctctcttcttccccaggtacctggccagtggctctggagacaccaccgtgcgcttctgggatctcagcacagagacaccacatttcacatgcaagggtcagtatgcaattagccatttagggggtcttctttttttttgagacaaggtcttgctctgttgaccaggatggagtacagtggtgcagtcacagctcacttgaactcctgggctcaagccttgaactcctgggttcaagcagtccccctacttcagcctccagagtagctgggatgacaggcacttgccatcacacctggctcgttttttgttttcatacagatgagggtctcactttgcagattacaaccccttaatatccagttggcggctgtctgttcctaggtagagaccatgtccttgagcccagccagccacttagacacaagcagaaactgcaccaaggagtcaatatgggacatggtgagaggctgactgactgctaccaaggagaacctggtttaaatcctgcctctgccacagtggttttcaaacttgagcacaaatcagaattgccccgcctcaggggcttgttaaaatgcagattgctggccaggcgtggtggcccacacctgtaatcccagcacttcgggaggccaaggcaggcagatcacttgaggtcaggagtttgagaccagcctcgccaacacagtgaaaccccatctctactaaaactacaaaaattagccgggcatggtggcgtgtgcttgtaatcccagccactggggaggctgaggcagaagaattgctcgaatctaggaggcggaggttgcagtgagccgagatggcaccactgcactccagcctgggtgatggagtgtgactccatgaaagaaagagagagagagaaaagagaagagagaaaaaaatacagattgctgggccccacccccagaggtttagttctattgggcctggggtagggcctgggaatctgcatttctaacaagttcccaggagatgctgatgctgctgctctgacgaccacacttgaagaaccactgctataccacagattagttaagtgaccttgtgtgtgtagggcatgttccctttctaagcttcaattttctcatctggaaaatggggatgataattcttgctttgctccatagcttagagctcttgtgagaaataacaagggatgacatgtacaaaaacacttcatagcatgtgtcacataaggagtcattagagagtgatggtgttatccatgcagcaagatgcagagctctaacacttggggtgcattctatccatccccagaaagcctcatcgctccttttgttcaatcattcatttattcaaatggttaaggagtacctggcacctgacaggcactgctgggcacttgggataaagacagatgtagtcccttatttctccctcctctgctttcttaggacacagacactgggtccttagtatatcctggtctccagatggcaggaagctggcctcaggctgcaagaatggccaggtaggtagttctcagggtaactaggcagagactcaagggggccttcctaggagacagttcagaatcaggttcaggagtctttggggagggttgggtgggaagtggtaggcagggattttggtggagccagagacctgttggggaggattattcagtgagcttctgtccttcagattctcctctgggacccaagcacagggaagcaggtgggcaggaccctcgctggccacagcaagtggatcacaggcctgagctgggagcccctccatgcgtaagtgacactgacggagctgggacaaatgagccaggggatcaaagccatcccctttccctgcccaatgcatagaagttttacgtgaggggacaagatgggcagcctgaatgaccgtgatggcttggcaggcatgggagaagggtctcgggcagacctgcattgctgcttgggagaggctctcatcacagggtctgctggttgcagtcaccttgcagtgcagccgggtcttggtgtcagaaaagctgtcaaaagattgtccatggcctttaagttgggaatggggaggtgccatgggcacacagatgttgccaggtcacagatgaggtcacatctcccttctctccaggaaccctgagtgccgctatgtggccagcagctccaaggatggcagtgtgcggatctgggacacaactgcaggccgctgtgagcgcatcctcaccgggcacacccagtcggtcacctgtctccggtggggaggggacgggct

SEQ ID NO: 12966 - DNA, 580 bp, Homo sapiens
ctcctccacgtggggacgcaggatggcggcagcagtgccggacgaggcggtggcgcgcgatgtgcagcggttgctagtgcagttccaggatgagggcgggcagctgctgggttccccgttcgacgtgcccgtggacatcaccccggacaggctgcagctcgtgtgcaacgcgctactggcccaggtacctggccagtggctctggagacaccaccgtgcgcttctgggatctcagcacagagacaccacatttcacatgcaagggacacagacactgggtccttagtatatcctggtctccagatggcaggaagctggcctcaggctgcaagaatggccagattctcctctgggacccaagcacagggaagcaggtgggcaggaccctcgctggccacagcaagtggatcacaggcctgagctgggagcccctccatgcgaaccctgagtgccgctatgtggccagcagctccaaggatggcagtgtgcggatctgggacacaactgcaggccgctgtgagcgcatcctcaccgggcacacccagtcggtcacctgtctccggtggggaggggacgggct

SEQ ID NO: 12967 - DNA, 5938 bp, Homo sapiens
gctctttctcctccacgtggggacgcaggatggcggcagcagtgccggtgggtgtgcgtggatgggggcggggggcgtcgccgcggggcgctagggcccgggtccctgaggcctgagagaggcgaagtggggcccttctgggcgggcgaccagactgactcccgccccacttgctcgcgcaggacgaggcggtggcgcgcgatgtgcagcggttgctagtgcagttccaggatgagggcgggcagctgctgggttccccgttcgacgtgcccgtggacatcaccccggacaggctgcagctcgtgtgcaacgcgctactggcccaggtaagtggctggccagggcggcctcgcatctccacccccgggcggatgcggtgggggaatcatattaccgagggtctgcggttcatggtcccccgctaacggactgtggtgacccacctggcgtgagctcccacctatgtcagagatggaatcagtggcatagcgctttacacgccaaccaaaggggtccacctgcggagaggggcctagctttgaacgcaccggatgctgtatttcattgattctttgtcacagtcccccagtctgggacacgttaatatccccattttacagcgtggcccggagggactcagtattttgcacgatgctatgtagtaggtagcagatttggaattggaacccaaaactatccgaatacccatgcttttatttatttatttatttaccttttttttttttttttttgagacggagtctcactttgtcgccaggctggcaagctggagtgtagtggcgtgatctctgctcactgcaatctctgcctcccaggttcaagcgattctcctgcctcagcctcccgagtagctgggactacaggcgcgcgccaccacacccagctaatttttgtatttttagtggggactgggtttcaccacgttggccaggatggtctcgatctcttgacctcgtgatcctcccgccttggcctccaaagtgctggggattactggcgtgagccaccgcacccggcctttgcttttaacctttaagccagtgtgtttactgaagagctgccctggggacaggggaggtccttaaaattgcagttcctggaccccatcccagccttactaaaccaaactctgggatgaagcagaaagtctacattttttaacaggcgttttgggagctttttacacaaatatagtgtagtgtggtagtttgggaaacactgcataatgctatatgctaatcctatcttggacgtaaagaacctgaattaatcattggcaataggacattgaactaattacttagttgttctgagcctctgcttttgaaaactgtcagtgggaatattagtatctacttcccacggttgttatgagatgcagataaagaatttcaggccgggtgcagtggcttatgcctgtaatcccagtactttgggaggctgaggtgggcagatcactagaggtcaggagttcgagaccagcttagccaatatggcgaaaacagtctctactgaaaatacaaaaattagccaggcgtggtggcaggcgcctgtagtcccagctcctcgggaggctgaagcaggagaattgcttgaacccaggaggcagaggttgcagtgagctgagatctcaccactgcactccagcctgagtaacagaacgagactccatctcaaaaaaaaaagaaaaaagaatttccaagtgctgtgtaagtgtcctgcaactgctgttcagtgacttaaaaggtcttgctaggctgggcacagtggctcacgcctgtaatcccagcactttgggaggccgaggcaggtggatcacctgaggtcaggagcttgagaccagcctggccaatgtggcgaaaccccgtatctactaaaaatataaaacttagccaggcgtggtgatgggtgcctgtaatcccagctactcgggaggctgaggcaggagaatctcttgaacccaggacgcggaggttgcagtgagcagagattgctccactgcactccagcctgggtgacagagcgagactcttgtctcaaaaataaataaataaataaataaaaggtcttgctcaatgggcaatgatgggggtatccctagcacgatggctgaaaagaagaagcttcacctcccacagctcagtggggagcatccctggcagagggtgcccctgcacatccattgttgcgggtttgtcctttaccattgtccttcaggaggatcccctgccactggctttctttgtccacgatgctgagatcgtctcctcactggggaagacgttggagtcccaggcagtggagacagagaaggtcctagacatcatctaccagccacaggctatcttcagagtccgggctgtgactcgctgcaccagctccttggagggtcacagtgaggcagtcatttctgtggccttcagccctacgggaaagtaaggacagctgcagactcatggagggggtatgtgggggtgcagtctttgcctggtttggggagggtctcccagagttataattgatggggcctcagggctgcctaccatagacccaagctctggactcagcttgcaattaagggacttcctcagtagggcatggtccccaaaggctgcttaaggacccctgccttggacaaacctctcctagacttgatttttcaagatctgagctgtgtgacttgtataaatcacttaacctttccgagttaatttttcatctgtgaaactgggattagttgcttctctcaaacttagaaaggtaatgagaagcttcaaaagctggttatagctgtggagaggaaagaaatggcctcctgatgtattctcccagaggacagcatcagtattgtctttctcccttccaggggcgaggaaagagtccagttccatattctattcacagaaagtgattgaataggtggcacaaatgcacatgtgcagtgtcaagcatcctctcttcttccccaggtacctggccagtggctctggagacaccaccgtgcgcttctgggatctcagcacagagacaccacatttcacatgcaagggtcagtatgcaattagccatttagggggtcttctttttttttgagacaaggtcttgctctgttgaccaggatggagtacagtggtgcagtcacagctcacttgaactcctgggctcaagccttgaactcctgggttcaagcagtccccctacttcagcctccagagtagctgggatgacaggcacttgccatcacacctggctcgttttttgttttcatacagatgagggtctcactttgcagattacaaccccttaatatccagttggcggctgtctgttcctaggtagagaccatgtccttgagcccagccagccacttagacacaagcagaaactgcaccaaggagtcaatatgggacatggtgagaggctgactgactgctaccaaggagaacctggtttaaatcctgcctctgccacagtggttttcaaacttgagcacaaatcagaattgccccgcctcaggggcttgttaaaatgcagattgctggccaggcgtggtggcccacacctgtaatcccagcacttcgggaggccaaggcaggcagatcacttgaggtcaggagtttgagaccagcctcgccaacacagtgaaaccccatctctactaaaactacaaaaattagccgggcatggtggcgtgtgcttgtaatcccagccactggggaggctgaggcagaagaattgctcgaatctaggaggcggaggttgcagtgagccgagatggcaccactgcactccagcctgggtgatggagtgtgactccatgaaagaaagagagagagagaaaagagaagagagaaaaaaatacagattgctgggccccacccccagaggtttagttctattgggcctggggtagggcctgggaatctgcatttctaacaagttcccaggagatgctgatgctgctgctctgacgaccacacttgaagaaccactgctataccacagattagttaagtgaccttgtgtgtgtagggcatgttccctttctaagcttcaattttctcatctggaaaatggggatgataattcttgctttgctccatagcttagagctcttgtgagaaataacaagggatgacatgtacaaaaacacttcatagcatgtgtcacataaggagtcattagagagtgatggtgttatccatgcagcaagatgcagagctctaacacttggggtgcattctatccatccccagaaagcctcatcgctccttttgttcaatcattcatttattcaaatggttaaggagtacctggcacctgacaggcactgctgggcacttgggataaagacagatgtagtcccttatttctccctcctctgctttcttaggacacagacactgggtccttagtatatcctggtctccagatggcaggaagctggcctcaggctgcaagaatggccaggtaggtagttctcagggtaactaggcagagactcaagggggccttcctaggagacagttcagaatcaggttcaggagtctttggggagggttgggtgggaagtggtaggcagggattttggtggagccagagacctgttggggaggattattcagtgagcttctgtccttcagattctcctctgggacccaagcacagggaagcaggtgggcaggaccctcgctggccacagcaagtggatcacaggcctgagctgggagcccctccatgcgtaagtgacactgacggagctgggacaaatgagccaggggatcaaagccatcccctttccctgcccaatgcatagaagttttacgtgaggggacaagatgggcagcctgaatgaccgtgatggcttggcaggcatgggagaagggtctcgggcagacctgcattgctgcttgggagaggctctcatcacagggtctgctggttgcagtcaccttgcagtgcagccgggtcttggtgtcagaaaagctgtcaaaagattgtccatggcctttaagttgggaatggggaggtgccatgggcacacagatgttgccaggtcacagatgaggtcacatctcccttctctccaggaaccctgagtgccgctatgtggccagcagctccaaggatggcagtgtgcggatctgggacacaactgcaggccgctgtgagcgcatcctcaccgggcacacccagtcggtcacctgtctccggtggggaggggacgggcttctctactctgcctcccaggaccgcaccatcaaagtctggagagctcatgacgtaagtgctgggagggttcagaaaccagtccagaaaatcgcaagtcacaagatgctggcactcagaatgaccttgacatcagcgagtccagtgtttcccagatgtgtgctgggagccctggtctagggaggtgttttgggaatgaggagttctgtggttggtgctgcaccatagtggagattgcagagtccccatgagatcgtcacactctggaaattcctcctgtaggacagctgttgggctttatcagatctaccatatcccaaatgtattggacaggagccgtttactctgacatccctaactcctcttccatgaaacattttcatgatctggactccattttacaagtggggagagacttgaccccagaggggtagtttgattaagatcacaatgcatgagtgatgatgattattagtcttgtaccacctgtctcctggggctaatcgcccaggcgtggggaggagtgtgtgtgtctgacctgactcgctctcccgtagggtgtgctgtgccggactctgcaaggccacggccactgggtgaacaccatggccctcagcactgactatgccctgcgcactggggcctttgaacctgctgaggcctcagttaatccccaagacctccaagg

SEQ ID NO: 12968 - DNA, 1017 bp, Homo sapiens
gctctttctcctccacgtggggacgcaggatggcggcagcagtgccggacgaggcggtggcgcgcgatgtgcagcggttgctagtgcagttccaggatgagggcgggcagctgctgggttccccgttcgacgtgcccgtggacatcaccccggacaggctgcagctcgtgtgcaacgcgctactggcccaggaggatcccctgccactggctttctttgtccacgatgctgagatcgtctcctcactggggaagacgttggagtcccaggcagtggagacagagaaggtcctagacatcatctaccagccacaggctatcttcagagtccgggctgtgactcgctgcaccagctccttggagggtcacagtgaggcagtcatttctgtggccttcagccctacgggaaagtaaggacagctgcagactcatggagggggtacctggccagtggctctggagacaccaccgtgcgcttctgggatctcagcacagagacaccacatttcacatgcaagggacacagacactgggtccttagtatatcctggtctccagatggcaggaagctggcctcaggctgcaagaatggccagattctcctctgggacccaagcacagggaagcaggtgggcaggaccctcgctggccacagcaagtggatcacaggcctgagctgggagcccctccatgcgaaccctgagtgccgctatgtggccagcagctccaaggatggcagtgtgcggatctgggacacaactgcaggccgctgtgagcgcatcctcaccgggcacacccagtcggtcacctgtctccggtggggaggggacgggcttctctactctgcctcccaggaccgcaccatcaaagtctggagagctcatgacggtgtgctgtgccggactctgcaaggccacggccactgggtgaacaccatggccctcagcactgactatgccctgcgcactggggcctttgaacctgctgaggcctcagttaatccccaagacctccaagg

SEQ ID NO: 12969 - DNA, 5210 bp, Homo sapiens
ggggcgtcgccgcggggcgctagggcccgggtccctgaggcctgagagaggcgaagtggggcccttctgggcgggcgaccagactgactcccgccccacttgctcgcgcaggacgaggcggtggcgcgcgatgtgcagcggttgctagtgcagttccaggatgagggcgggcagctgctgggttccccgttcgacgtgcccgtggacatcaccccggacaggctgcagctcgtgtgcaacgcgctactggcccaggtaagtggctggccagggcggcctcgcatctccacccccgggcggatgcggtgggggaatcatattaccgagggtctgcggttcatggtcccccgctaacggactgtggtgacccacctggcgtgagctcccacctatgtcagagatggaatcagtggcatagcgctttacacgccaaccaaaggggtccacctgcggagaggggcctagctttgaacgcaccggatgctgtatttcattgattctttgtcacagtcccccagtctgggacacgttaatatccccattttacagcgtggcccggagggactcagtattttgcacgatgctatgtagtaggtagcagatttggaattggaacccaaaactatccgaatacccatgcttttatttatttatttatttaccttttttttttttttttttgagacggagtctcactttgtcgccaggctggcaagctggagtgtagtggcgtgatctctgctcactgcaatctctgcctcccaggttcaagcgattctcctgcctcagcctcccgagtagctgggactacaggcgcgcgccaccacacccagctaatttttgtatttttagtggggactgggtttcaccacgttggccaggatggtctcgatctcttgacctcgtgatcctcccgccttggcctccaaagtgctggggattactggcgtgagccaccgcacccggcctttgcttttaacctttaagccagtgtgtttactgaagagctgccctggggacaggggaggtccttaaaattgcagttcctggaccccatcccagccttactaaaccaaactctgggatgaagcagaaagtctacattttttaacaggcgttttgggagctttttacacaaatatagtgtagtgtggtagtttgggaaacactgcataatgctatatgctaatcctatcttggacgtaaagaacctgaattaatcattggcaataggacattgaactaattacttagttgttctgagcctctgcttttgaaaactgtcagtgggaatattagtatctacttcccacggttgttatgagatgcagataaagaatttcaggccgggtgcagtggcttatgcctgtaatcccagtactttgggaggctgaggtgggcagatcactagaggtcaggagttcgagaccagcttagccaatatggcgaaaacagtctctactgaaaatacaaaaattagccaggcgtggtggcaggcgcctgtagtcccagctcctcgggaggctgaagcaggagaattgcttgaacccaggaggcagaggttgcagtgagctgagatctcaccactgcactccagcctgagtaacagaacgagactccatctcaaaaaaaaaagaaaaaagaatttccaagtgctgtgtaagtgtcctgcaactgctgttcagtgacttaaaaggtcttgctaggctgggcacagtggctcacgcctgtaatcccagcactttgggaggccgaggcaggtggatcacctgaggtcaggagcttgagaccagcctggccaatgtggcgaaaccccgtatctactaaaaatataaaacttagccaggcgtggtgatgggtgcctgtaatcccagctactcgggaggctgaggcaggagaatctcttgaacccaggacgcggaggttgcagtgagcagagattgctccactgcactccagcctgggtgacagagcgagactcttgtctcaaaaataaataaataaataaataaaaggtcttgctcaatgggcaatgatgggggtatccctagcacgatggctgaaaagaagaagcttcacctcccacagctcagtggggagcatccctggcagagggtgcccctgcacatccattgttgcgggtttgtcctttaccattgtccttcaggaggatcccctgccactggctttctttgtccacgatgctgagatcgtctcctcactggggaagacgttggagtcccaggcagtggagacagagaaggtcctagacatcatctaccagccacaggctatcttcagagtccgggctgtgactcgctgcaccagctccttggagggtcacagtgaggcagtcatttctgtggccttcagccctacgggaaagtaaggacagctgcagactcatggagggggtatgtgggggtgcagtctttgcctggtttggggagggtctcccagagttataattgatggggcctcagggctgcctaccatagacccaagctctggactcagcttgcaattaagggacttcctcagtagggcatggtccccaaaggctgcttaaggacccctgccttggacaaacctctcctagacttgatttttcaagatctgagctgtgtgacttgtataaatcacttaacctttccgagttaatttttcatctgtgaaactgggattagttgcttctctcaaacttagaaaggtaatgagaagcttcaaaagctggttatagctgtggagaggaaagaaatggcctcctgatgtattctcccagaggacagcatcagtattgtctttctcccttccaggggcgaggaaagagtccagttccatattctattcacagaaagtgattgaataggtggcacaaatgcacatgtgcagtgtcaagcatcctctcttcttccccaggtacctggccagtggctctggagacaccaccgtgcgcttctgggatctcagcacagagacaccacatttcacatgcaagggtcagtatgcaattagccatttagggggtcttctttttttttgagacaaggtcttgctctgttgaccaggatggagtacagtggtgcagtcacagctcacttgaactcctgggctcaagccttgaactcctgggttcaagcagtccccctacttcagcctccagagtagctgggatgacaggcacttgccatcacacctggctcgttttttgttttcatacagatgagggtctcactttgcagattacaaccccttaatatccagttggcggctgtctgttcctaggtagagaccatgtccttgagcccagccagccacttagacacaagcagaaactgcaccaaggagtcaatatgggacatggtgagaggctgactgactgctaccaaggagaacctggtttaaatcctgcctctgccacagtggttttcaaacttgagcacaaatcagaattgccccgcctcaggggcttgttaaaatgcagattgctggccaggcgtggtggcccacacctgtaatcccagcacttcgggaggccaaggcaggcagatcacttgaggtcaggagtttgagaccagcctcgccaacacagtgaaaccccatctctactaaaactacaaaaattagccgggcatggtggcgtgtgcttgtaatcccagccactggggaggctgaggcagaagaattgctcgaatctaggaggcggaggttgcagtgagccgagatggcaccactgcactccagcctgggtgatggagtgtgactccatgaaagaaagagagagagagaaaagagaagagagaaaaaaatacagattgctgggccccacccccagaggtttagttctattgggcctggggtagggcctgggaatctgcatttctaacaagttcccaggagatgctgatgctgctgctctgacgaccacacttgaagaaccactgctataccacagattagttaagtgaccttgtgtgtgtagggcatgttccctttctaagcttcaattttctcatctggaaaatggggatgataattcttgctttgctccatagcttagagctcttgtgagaaataacaagggatgacatgtacaaaaacacttcatagcatgtgtcacataaggagtcattagagagtgatggtgttatccatgcagcaagatgcagagctctaacacttggggtgcattctatccatccccagaaagcctcatcgctccttttgttcaatcattcatttattcaaatggttaaggagtacctggcacctgacaggcactgctgggcacttgggataaagacagatgtagtcccttatttctccctcctctgctttcttaggacacagacactgggtccttagtatatcctggtctccagatggcaggaagctggcctcaggctgcaagaatggccaggtaggtagttctcagggtaactaggcagagactcaagggggccttcctaggagacagttcagaatcaggttcaggagtctttggggagggttgggtgggaagtggtaggcagggattttggtggagccagagacctgttggggaggattattcagtgagcttctgtccttcagattctcctctgggacccaagcacagggaagcaggtgggcaggaccctcgctggccacagcaagtggatcacaggcctgagctgggagcccctccatgcgtaagtgacactgacggagctgggacaaatgagccaggggatcaaagccatcccctttccctgcccaatgcatagaagttttacgtgaggggacaagatgggcagcctgaatgaccgtgatggcttggcaggcatgggagaagggtctcgggcagacctgcattgctgcttgggagaggctctcatcacagggtctgctggttgcagtcaccttgcagtgcagccgggtcttggtgtcagaaaagctgtcaaaagattgtccatggcctttaagttgggaatggggaggtgccatgggcacacagatgttgccaggtcacagatgaggtcacatctcccttctctccaggaaccctgagtgccgctatgtggccagcagctccaaggatggcagtgtgcggatctgggacacaactgcaggccgctgtgagcgcatcctcaccgggcacacccagtcggtcacctgtctccggtggggaggggacgggcttctctactctgcctcccaggaccgcacca

SEQ ID NO: 12970 - DNA, 800 bp, Homo sapiens
ggggcgtcgccgcggggcgctagggcccgggtccctgaggcctgagagaggcgaagtggggcccttctgggcgggcgaccagactgactcccgccccacttgctcgcgcaggacgaggcggtggcgcgcgatgtgcagcggttgctagtgcagttccaggatgagggcgggcagctgctgggttccccgttcgacgtgcccgtggacatcaccccggacaggctgcagctcgtgtgcaacgcgctactggcccaggaggatcccctgccactggctttctttgtccacgatgctgagatcgtctcctcactggggaagacgttggagtcccaggcagtggagacagagaaggtcctagacatcatctaccagccacaggctatcttcagagtccgggctgtgactcgctgcaccagctccttggagggtcacagtgaggcagtcatttctgtggccttcagccctacgggaaagtacctggccagtggctctggagacaccaccgtgcgcttctgggatctcagcacagagacaccacatttcacatgcaagggacacagacactgggtccttagtatatcctggtctccagatggcaggaagctggcctcaggctgcaagaatggccaggaaccctgagtgccgctatgtggccagcagctccaaggatggcagtgtgcggatctgggacacaactgcaggccgctgtgagcgcatcctcaccgggcacacccagtcggtcacctgtctccggtggggaggggacgggcttctctactctgcctcccaggaccgcacca

SEQ ID NO: 12971 - DNA, 6822 bp, Homo sapiens
gcagcagccgccagttccatgcactggcggagcagctctaggcggcggcttctactttcagtttcgtgcagagcgcggaggagccgcgagcgctgagggagtctgcactatggaaacaacctgtcaatccagctcaaggcacacatagcccagacacccatgagaccctctccgtggggaccctagagcacctatcatgaacgaggagaccaaggctggctcctcatggaccccgttggcctccagctcggcaacaagaacctgtggagctgtcttgtgaggctgctcaccaaagacccagaatggctgaacgccaagatgaagttcttcctccccaacacggacctggattccaggaacgagaccttggaccctgaacagagagtcatcctgcaactcaacaagctgcatgtccagggttcggacacctggcagtctttcattcattgtgtgtgcatgcagctggaggtgcctctggacctggaggtgctgctgctgagtacttttggctatgatgatgggttcaccagccagctgggagctgaggggaaaagccaacctgaatctcagctccaccatggcctgaagcgcccacatcagagctgtgggtcctcaccccgccggaagcagtgcaagaagcagcagctagagttggccaagaagtacctgcagctcctgcggacctctgcccagcagcgctacaggagccaaatccctgggtcagggcagccccacgccttccaccaggtctatgtccctccaatcctgcgccgggccacagcatccttagacactccggagggggccattatgggggacgtcaaggtggaagatggtgctgacgtgagcatctcggacctcttcaacaccagggttaacaagggcccgagggtgaccgtgcttttggggaaggctggcatgggcaagaccacgctggcccaccggctctgccagaagtgggcagagggccatctgaactgtttccaggccctgttcctttttgaattccgccagctcaacttgatcacgaggttcctgacaccgtccgagctcctttttgatctgtacctgagccctgaatcggaccacgacactgtcttccagtacctggagaagaacgctgaccaagtcctgctgatctttgatgggctagatgaggccctccagcctatgggtcctgatggcccaggcccagtcctcacccttttctcccatctctgcaatgggaccctcctgcctggctgccgggtgatggctacctcccgtccagggaagctgcctgcctgcctgcctgcagaggcagccatggtccacatgttgggctttgatgggccacgggtggaagaatatgtgaatcacttcttcagcgcccagccatcgcgggagggggccctggtggagttacagacaaatggacgtctccgaagcctgtgtgcggtgcccgcactgtgccaagtcgcctgtctctgcctccaccatctgcttcctgaccacgccccaggccagtctgtggccctcctgcccaacatgactcagctctatatgcagatggtgctcgccctcagcccccctgggcacttgcccacctcgtccctactggacctgggggaggtggccctgaggggcctggagacagggaaggttatcttctatgcaaaagatattgctccacccttgatagcttttggggccactcacagcctgctgacttccttctgcgtctgcacaggccctgggcaccagcagacaggctatgctttcacccacctcagcctgcaggagtttcttgctgccctgcacctgatggccagccccaaggtgaacaaagacacacttacccagtatgttaccctccattcccgctgggtacagcggaccaaagctagactgggcctctcagaccacctccccaccttcctggcgggcctggcatcctgcacctgccgccccttccttagccacctggcgcagggcaatgaggactgtgtgggtgccaagcaggctgctgtagtgcaggtgttgaagaagttggccacccgcaagctcacagggccaaaggttgtagagctgtgtcactgtgtggatgagacacaggagcctgagctggccagtctcaccgcacaaagcctcccctatcaactgcccttccacaatttcccactgacctgcaccgacctggccaccctgaccaacatcctagagcacagggaggcccccatccacctggattttgatggctgtcccctggagccccactgccctgaggctctggtaggctgtgggcagatagagaatctcagctttaagagcaggaagtgtggggatgcctttgcagaagccctctccaggagcttgccgacaatggggaggctgcagatgctggggttagcaggaagtaaaatcactgcccgaggcatcagccacctggtgaaagctttgcctctctgtccacagctgaaagaagtcagttttcgggacaaccagctcagtgaccaggtggtgctgaacattgtggaggttctccctcacctaccacggctccggaagcttgacctgagcagcaacagcatctgcgtgtcaaccctactctgcttggcaagggtggcagtcacgtgtcctaccgtcaggatgcttcaggccagggaggcggacctcatcttccttctttccccgcccacagagacaactgcagagctacaaagagctccagacctgcaggaaagtgacggccagaggaaaggggctcagagcagaagcttgacgctcaggctgcagaagtgtcagctccaggtccacgatgcggaggccctcatagccctgctccaggaaggccctcacctggaggaagtggacctctcagggaaccagctggaagatgaaggctgtcggctgatggcagaggctgcatcccagctgcacatcgccaggaagctggacctcagtaacaacgggctttctgtggccggggtgcattgtgtgctgagggccgtgagtgcgtgctggaccctggcagagctgcacatcagcctgcagcacaaaactgtgatcttcatgtttgcccaggagccagaggagcagaaggggccccaggagagggctgcatttcttgacagcctcatgctccagatgccctctgagctgcctctgagctcccgaaggatgaggctgacacattgtggcctccaagaaaagcacctagagcagctctgcaaggctctgggaggaagctgccacctcggtcacctccacctcgacttctcaggcaatgctctgggggatgaaggtgcagcccggctggctcagctgctcccagggctgggagctctgcagtccttgaacctcagtgagaacggtttgtccctggatgccgtgttgggtttggttcggtgcttctccactctgcagtggctcttccgcttggacatcagctttgaaagccaacacatcctcctgagaggggacaagacaagcagggatatgtgggccactggatctttgccagacttcccagctgcagccaagttcttagggttccgtcagcgctgcatccccaggagcctctgcctcagtgagtgtcctctggagcccccaagcctcacccgcctctgtgccactctgaaggactgcccgggacccctggaactgcaattgtcctgtgagttcctgagtgaccagagcctggagactctactggactgcttacctcaactccctcagctgagcctgctgcagctgagccagacgggactgtccccgaaaagccccttcctgctggccaacaccttaagcctgtgtccacgggttaaaaaggtggatctcaggtccctgcaccatgcaactttgcacttcagatccaacgaggaggaggaaggcgtgtgctgtggcaggttcacaggctgcagcctcagccaggagcacgtagagtcactctgctggttgctgagcaagtgtaaagacctcagccaggtggatctctcagcaaacctgctgggcgacagcggactcagatgccttctggaatgtctgccgcaggtgcccatctccggtttgcttgatctgagtcacaacagcatttctcaggaaagtgccctgtacctgctggagacactgccctcctgcccacgtgtccgggaggcctcagtgaacctgggctctgagcagagcttccggattcacttctccagagaggaccaggctgggaagacactcaggctaagtgagtgcagcttccggccagagcacgtgtccaggctggccaccggcttgagcaagtccctgcagctgacggagctcacgctgacccagtgctgcctgggccagaagcagctggccatcctcctgagcttggtggggcgacccgcagggctgttcagcctcagggtgcaggagccgtgggcggacagagccagggttctctccctgttagaagtctgcgcccaggcctcaggcagtgtcactgaaatcagcatctccgagacccagcagcagctctgtgtccagctggaatttcctcgccaggaagagaatccagaagctgtggcactcaggttggctcactgtgaccttggagcccaccacagccttcttgtcgggcagctgatggagacatgtgccaggctgcagcagctcagcttgtctcaggttaacctctgtgaggacgatgatgccagttccctgctgctgcagagcctcctgctgtccctctctgagctgaagacatttcggctgacctccagctgtgtgagcaccgagggcctcgcccacctggcatctggtctgggccactgccaccacttggaggagctggacttgtctaacaatcaatttgatgaggagggcaccaaggcgctgatgagggcccttgaggggaaatggatgctaaagaggctggacctcagtcaccttctgctgaacagctccaccttggccttgcttactcacagactaagccagatgacctgcctgcagagcctcagactgaacaggaacagtatcggtgatgtcggttgctgccacctttctgaggctctcagggctgccaccagcctagaggagctggacttgagccacaaccagattggagacgctggtgtccagcacttagctaccatcctgcctgggctgccagagctcaggaagatagacctctcagggaatagcatcagctcagccgggggagtgcagttggcagagtctctcgttctttgcaggcgcctggaggagttgatgcttggctgcaatgccctgggggatcccacagccctggggctggctcaggagctgccccagcacctgagggtcctacacctaccattcagccatctgggcccaggtggggccctgagcctggcccaggccctggatggatccccccatttggaagagatcagcttggcggaaaacaacctggctggaggggtcctgcgtttctgtatggagctcccgctgctcagacagatagacctggtttcctgtaagattgacaaccagactgccaagctcctcacctccagcttcacgagctgccctgccctggaagtaatcttgctgtcctggaatctcctcggggatgaggcagctgccgagctggcccaggtgctgccgcagatgggccggctgaagagagtggacctggagaagaatcagatcacagctttgggggcctggctcctggctgaaggactggcccaggggtctagcatccaagtcatccgcctctggaataaccccattccctgcgacatggcccagcacctgaagagccaggagcccaggctggactttgccttctttgacaaccagccccaggccccttggggtacttgatggccccctcaagacctttggaatccagccaagtgatgcacccaaatgatccacctttcgcccactgggataattgactcaggaaagaagagcctcggcagggcgctctgcactccacccaggaggaaggatacgtgtgtcctgctgcagtcctcagggagaacttttttgggaaccaggagctgggtctggacaaaggagtaccctgcattacgtgggatatgtgtgatcaattggggacatgcgacacacaatgagggtgtcatgacaatgcatgacacgtacggttatatgtggcagtgtgaccccttgacatgtggcgttacatgaaagtcagtgtggcacgtgttctgtggcatgggtgctggcatcccaagtagcaggatacatgattgttggtctatatatgacacatgacaaatgtccatgtcacaggactcatggctggccagatgacctcaggctggcccaagatctaatttattaatttttaaagcaaatacatatttatagattgtgtgtatggagcagctaagtcaggaaaagtcttccgcccgagctgggaggggagagtgtccatgcactgaccagtccaggggctcaagggccagggctctggaacaagccagggactcagccattaagtcccctcctgcctcaatcctcagcctacccatctataaacttgatgactcctcccttacttacatactagcttccaaggacaggtggaggtagggccagcctggcgggagtggagaagcccagtctgtcctatgtaagggacaaagccaggtctaatggtactgggtagggggcactgccaagacaataagctaggctactgggtccagctactactttggtgggattcaggtgagtctccatgcacttcacatgttacccagtgttcttgttacttccaaggagaaccaagaatggctctgtcacactcgaagccaggcttgatcaataaacacaatggtattccacgtc

SEQ ID NO: 12972 - DNA, 3939 bp, Homo sapiens
tctctcagcaaacctgctgggcgacagcggactcagatgccttctggaatgtctgccgcaggtgcccatctccggtttgcttgagtaagtggaaagcagcataaaggacagatagcaaggaggaaggctcccctaggccaaaagcatgatgggggctccttctgagggcatcccccagagcaccagaggacaaggactgtggagggcaaggggcaattcttcccttgccttcactcccctggccttgggtcctttcctctgtccctcacacccaccatgggcagatcctccaccaaacacccaagagaggctgtgattcgtggcagggtgacacacccctacagccaaactgacctggggacagggaagcaacattccatccccaaccagctgatgcgggattgcagctgcctggctcctggtccatcccgtccctgaaattcttctgacccaatctgtggaacataaatgtggagatgtccctgtggcaggcaaggggccttaggaagtcatccacatggttgccccatctctcccgtgacctgctggagtgacagccagctccaggacaccacttgttgctaggcaactgagcttcgtgctcgggagtccttgacccatgcggggctagagctgccagcctggccttgccagtgcccagaccccagaccacaggggcagcgggcagggtgagtgcagcgctcaaggactcagggtctggtgccagttctgcctgtgtggggatggtatccttctgggcctcagtgtgtccatctggagaatagatgcttagacatggaggcttctcttcttggaaatgacagctggaagggagatggagggggctgggcagggctccaaggaggtcctgccctcactcccattctcatctccatttcccttctagtctgagtcacaacagcatttctcaggaaagtgccctgtacctgctggagacactgccctcctgcccacgtgtccgggaggcctcagtgaagtaaggggatgttggtccccgaaaagcccctttctgctggccaacaggtgcccctggctgatgatgggagaagcaaggcacccacactttgtggccttccatctgggtggcttggagcaacctctgcctttctctgaatctcagggtttcctgggcatgggatcataatttctatcccctgatgcccgggtgccatggggaccatggaggccatggggtgggaaggccaggtattgccatgctcacagaatgagtttgggggtctcctctggttctgaggcctccatcctcccttgtccttgtgggtgcagccccgcttccctctctgtgccctgtgggtgccctaggtgcctaggaagctggcatgtctgggcaccgtgcttccccaggcccttctctctgcagcctgggctctgagcagagcttccggattcacttctccagagaggaccaggctgggaagacactcaggtaatccctgcagggtgatgggacaggggacagagaggggagaggaggctgaccctatggcggcctccatggccccctcttccctgggccctctcctcctttagagagcagcttcaagctcactgcctgggtctgttcctccagatctgcccccgatgccctggtaactccagtctcagccagggccttggcattgaacttgtgcctcttagcccaccatcctaagcccaactcagcccaacattctcttccttgccatgtcctgactacaggccttgaggcttctgagtgtcacggttaaagattttgaagccaactgaaaataaatccctgatctgccacttaccagctatgtggccctggacaagtaaaatggggataataacacaacctaccccttagggttattgtgaggattaaatgagttaataagtataaagtgccaggaaaaggtctggctcatgggagtgctgtcagcagttattgtaactgttattattattattattattattattattattatcattatcattacccctggtagccctgactcactgccacggccagttcctttacatgtcttacttcagctgtgaacagggcctccaaactgatccctgcatcttatcaggcctcctcccctccattcactccacagcccccagagggatcttcacaacacacatctgacagtgcccctctgctactctgtgcccctcagtggctccccattaaccccagggtgaagttcaaagtccctagcatcttctccctcacagtctgatccaactgtcaccttccaccatgttccttcccacctcccccacaccacacacacgccctacacaccaacccatataccacagatacaccaagcacacccaaacacaccacacagcacgcagcacacacaacacacgcacaccacacagcacacacaacacacaaacgcaccacataccatacacataccacatacacacacatacaccacacacaccacacaatacacacaccccacaaaaacaaaccccccacatacatacctggcacattacaaatacagcacacacaccacataatacctacaaataccacatacacaacacacacacacacacacagttcagccataaccttcactatttgctcctagatcaagccctgcctgaagattctctgcctctgctcacaccgcactcagctcaacattctcttccttgccttttctgagataaaattctcccaatcctttaacacccagctcaaacatcagcccctcctggaagtatcccagcagccctgcctcatcagagtgaactgccccgaggttcactgggccctttcacttggctgggcccgtctgctggccacccagggctgagatgcctggacagcagagccccacggagaatcccaggcacacctccctccccagggagctcagccagtgctggtccgggagagtaaggcagtggttaagagcttggggtctgcagtcagactgacctggatggaaaccagattctgcccttctttcttatctgctgtgtgtccttgggttagtcagtttccccacctctaattggtgctatgagaattaaaggagaccctgcgggtaaggcaggaagtcccatgcacccagaggctggcacagtgcctgacctagagtcagcctccctaaataacttactcctaatactttcttacagggggtgtgggaggttcctccccaaagagacaggaagctcccagagcaggagctgcatatttggcctctcaggccctgctccaggcctttgccctcagaggtgggatgctcccccaataggccctcagggaggctgagatgaagctgagcagcagtgcccacaggcctcacccaggctctgccctggctttctgccctcaggctaagtgagtgcagcttccggccagagcacgtgtccaggctggccaccggcttgagcaagtccctgcagctgacggagctcacgtgagtgacccacccagcccgtgaggacagcagaggggtgggggcaccctgccagagccacctcagtgactgacctctgtctccaggctgacccagtgctgcctgggccagaagcagctggccatcctcctgagcttggtggggcgacccgcagggctgttcagcctcaggtacctcctcccccgctgcctccgggaggggccatggcatgaatgggagcaggggtgggcactggagtaagaggcccccaggatcatggccccagtcatttcctgtacccacaaccctgccatctggaccctgagcaaaccctgtccatctgtcccagagactccacaaggcacacagagaaactgtccttccccacactggaggcctgtgctttgggatttaagaaaaaaagaaagaaagaaagaaagaaggtttcagaggatactgaactgaggacaaaaataaactgaaacgaagttct

SEQ ID NO: 12973 - DNA, 550 bp, Homo sapiens
tctctcagcaaacctgctgggcgacagcggactcagatgccttctggaatgtctgccgcaggtgcccatctccggtttgcttgatctgagtcacaacagcatttctcaggaaagtgccctgtacctgctggagacactgccctcctgcccacgtgtccgggaggcctcagtgaacctgggctctgagcagagcttccggattcacttctccagagaggaccaggctgggaagacactcaggctaagtgagtgcagcttccggccagagcacgtgtccaggctggccaccggcttgagcaagtccctgcagctgacggagctcacgctgacccagtgctgcctgggccagaagcagctggccatcctcctgagcttggtggggcgacccgcagggctgttcagcctcagactccacaaggcacacagagaaactgtccttccccacactggaggcctgtgctttgggatttaagaaaaaaagaaagaaagaaagaaagaaggtttcagaggatactgaactgaggacaaaaataaactgaaacgaagttct

SEQ ID NO: 12974 - DNA, 6724 bp, Homo sapiens
gagtctgcactatggaaacaacctgtcaatccagctcaaggcacacatagcccagacacccatgagaccctctccgtggggaccctagagcacctatcatgaacgaggagaccaaggctggctcctcatggaccccgttggcctccagctcggcaacaagaacctgtggagctgtcttgtgaggctgctcaccaaagacccagaatggctgaacgccaagatgaagttcttcctccccaacacggacctggattccaggaacgagaccttggaccctgaacagagagtcatcctgcaactcaacaagctgcatgtccagggttcggacacctggcagtctttcattcattgtgtgtgcatgcagctggaggtgcctctggacctggaggtgctgctgctgagtacttttggctatgatgatgggttcaccagccagctgggagctgaggggaaaagccaacctgaatctcagctccaccatggcctgaagcgcccacatcagagctgtgggtcctcaccccgccggaagcagtgcaagaagcagcagctagagttggccaagaagtacctgcagctcctgcggacctctgcccagcagcgctacaggagccaaatccctgggtcagggcagccccacgccttccaccaggtctatgtccctccaatcctgcgccgggccacagcatccttagacactccggagggggccattatgggggacgtcaaggtggaagatggtgctgacgtgagcatctcggacctcttcaacaccagggttaacaagggcccgagggtgaccgtgcttttggggaaggctggcatgggcaagaccacgctggcccaccggctctgccagaagtgggcagagggccatctgaactgtttccaggccctgttcctttttgaattccgccagctcaacttgatcacgaggttcctgacaccgtccgagctcctttttgatctgtacctgagccctgaatcggaccacgacactgtcttccagtacctggagaagaacgctgaccaagtcctgctgatctttgatgggctagatgaggccctccagcctatgggtcctgatggcccaggcccagtcctcacccttttctcccatctctgcaatgggaccctcctgcctggctgccgggtgatggctacctcccgtccagggaagctgcctgcctgcctgcctgcagaggcagccatggtccacatgttgggctttgatgggccacgggtggaagaatatgtgaatcacttcttcagcgcccagccatcgcgggagggggccctggtggagttacagacaaatggacgtctccgaagcctgtgtgcggtgcccgcactgtgccaagtcgcctgtctctgcctccaccatctgcttcctgaccacgccccaggccagtctgtggccctcctgcccaacatgactcagctctatatgcagatggtgctcgccctcagcccccctgggcacttgcccacctcgtccctactggacctgggggaggtggccctgaggggcctggagacagggaaggttatcttctatgcaaaagatattgctccacccttgatagcttttggggccactcacagcctgctgacttccttctgcgtctgcacaggccctgggcaccagcagacaggctatgctttcacccacctcagcctgcaggagtttcttgctgccctgcacctgatggccagccccaaggtgaacaaagacacacttacccagtatgttaccctccattcccgctgggtacagcggaccaaagctagactgggcctctcagaccacctccccaccttcctggcgggcctggcatcctgcacctgccgccccttccttagccacctggcgcagggcaatgaggactgtgtgggtgccaagcaggctgctgtagtgcaggtgttgaagaagttggccacccgcaagctcacagggccaaaggttgtagagctgtgtcactgtgtggatgagacacaggagcctgagctggccagtctcaccgcacaaagcctcccctatcaactgcccttccacaatttcccactgacctgcaccgacctggccaccctgaccaacatcctagagcacagggaggcccccatccacctggattttgatggctgtcccctggagccccactgccctgaggctctggtaggctgtgggcagatagagaatctcagctttaagagcaggaagtgtggggatgcctttgcagaagccctctccaggagcttgccgacaatggggaggctgcagatgctggggttagcaggaagtaaaatcactgcccgaggcatcagccacctggtgaaagctttgcctctctgtccacagctgaaagaagtcagttttcgggacaaccagctcagtgaccaggtggtgctgaacattgtggaggttctccctcacctaccacggctccggaagcttgacctgagcagcaacagcatctgcgtgtcaaccctactctgcttggcaagggtggcagtcacgtgtcctaccgtcaggatgcttcaggccagggaggcggacctcatcttccttctttccccgcccacagagacaactgcagagctacaaagagctccagacctgcaggaaagtgacggccagaggaaaggggctcagagcagaagcttgacgctcaggctgcagaagtgtcagctccaggtccacgatgcggaggccctcatagccctgctccaggaaggccctcacctggaggaagtggacctctcagggaaccagctggaagatgaaggctgtcggctgatggcagaggctgcatcccagctgcacatcgccaggaagctggacctcagtaacaacgggctttctgtggccggggtgcattgtgtgctgagggccgtgagtgcgtgctggaccctggcagagctgcacatcagcctgcagcacaaaactgtgatcttcatgtttgcccaggagccagaggagcagaaggggccccaggagagggctgcatttcttgacagcctcatgctccagatgccctctgagctgcctctgagctcccgaaggatgaggctgacacattgtggcctccaagaaaagcacctagagcagctctgcaaggctctgggaggaagctgccacctcggtcacctccacctcgacttctcaggcaatgctctgggggatgaaggtgcagcccggctggctcagctgctcccagggctgggagctctgcagtccttgaacctcagtgagaacggtttgtccctggatgccgtgttgggtttggttcggtgcttctccactctgcagtggctcttccgcttggacatcagctttgaaagccaacacatcctcctgagaggggacaagacaagcagggatatgtgggccactggatctttgccagacttcccagctgcagccaagttcttagggttccgtcagcgctgcatccccaggagcctctgcctcagtgagtgtcctctggagcccccaagcctcacccgcctctgtgccactctgaaggactgcccgggacccctggaactgcaattgtcctgtgagttcctgagtgaccagagcctggagactctactggactgcttacctcaactccctcagctgagcctgctgcagctgagccagacgggactgtccccgaaaagccccttcctgctggccaacaccttaagcctgtgtccacgggttaaaaaggtggatctcaggtccctgcaccatgcaactttgcacttcagatccaacgaggaggaggaaggcgtgtgctgtggcaggttcacaggctgcagcctcagccaggagcacgtagagtcactctgctggttgctgagcaagtgtaaagacctcagccaggtggatctctcagcaaacctgctgggcgacagcggactcagatgccttctggaatgtctgccgcaggtgcccatctccggtttgcttgatctgagtcacaacagcatttctcaggaaagtgccctgtacctgctggagacactgccctcctgcccacgtgtccgggaggcctcagtgaacctgggctctgagcagagcttccggattcacttctccagagaggaccaggctgggaagacactcaggctaagtgagtgcagcttccggccagagcacgtgtccaggctggccaccggcttgagcaagtccctgcagctgacggagctcacgctgacccagtgctgcctgggccagaagcagctggccatcctcctgagcttggtggggcgacccgcagggctgttcagcctcagggtgcaggagccgtgggcggacagagccagggttctctccctgttagaagtctgcgcccaggcctcaggcagtgtcactgaaatcagcatctccgagacccagcagcagctctgtgtccagctggaatttcctcgccaggaagagaatccagaagctgtggcactcaggttggctcactgtgaccttggagcccaccacagccttcttgtcgggcagctgatggagacatgtgccaggctgcagcagctcagcttgtctcaggttaacctctgtgaggacgatgatgccagttccctgctgctgcagagcctcctgctgtccctctctgagctgaagacatttcggctgacctccagctgtgtgagcaccgagggcctcgcccacctggcatctggtctgggccactgccaccacttggaggagctggacttgtctaacaatcaatttgatgaggagggcaccaaggcgctgatgagggcccttgaggggaaatggatgctaaagaggctggacctcagtcaccttctgctgaacagctccaccttggccttgcttactcacagactaagccagatgacctgcctgcagagcctcagactgaacaggaacagtatcggtgatgtcggttgctgccacctttctgaggctctcagggctgccaccagcctagaggagctggacttgagccacaaccagattggagacgctggtgtccagcacttagctaccatcctgcctgggctgccagagctcaggaagatagacctctcagggaatagcatcagctcagccgggggagtgcagttggcagagtctctcgttctttgcaggcgcctggaggagttgatgcttggctgcaatgccctgggggatcccacagccctggggctggctcaggagctgccccagcacctgagggtcctacacctaccattcagccatctgggcccaggtggggccctgagcctggcccaggccctggatggatccccccatttggaagagatcagcttggcggaaaacaacctggctggaggggtcctgcgtttctgtatggagctcccgctgctcagacagatagacctggtttcctgtaagattgacaaccagactgccaagctcctcacctccagcttcacgagctgccctgccctggaagtaatcttgctgtcctggaatctcctcggggatgaggcagctgccgagctggcccaggtgctgccgcagatgggccggctgaagagagtggacctggagaagaatcagatcacagctttgggggcctggctcctggctgaaggactggcccaggggtctagcatccaagtcatccgcctctggaataaccccattccctgcgacatggcccagcacctgaagagccaggagcccaggctggactttgccttctttgacaaccagccccaggccccttggggtacttgatggccccctcaagacctttggaatccagccaagtgatgcacccaaatgatccacctttcgcccactgggataattgactcaggaaagaagagcctcggcagggcgctctgcactccacccaggaggaaggatacgtgtgtcctgctgcagtcctcagggagaacttttttgggaaccaggagctgggtctggacaaaggagtaccctgcattacgtgggatatgtgtgatcaattggggacatgcgacacacaatgagggtgtcatgacaatgcatgacacgtacggttatatgtggcagtgtgaccccttgacatgtggcgttacatgaaagtcagtgtggcacgtgttctgtggcatgggtgctggcatcccaagtagcaggatacatgattgttggtctatatatgacacatgacaaatgtccatgtcacaggactcatggctggccagatgacctcaggctggcccaagatctaatttattaatttttaaagcaaatacatatttatagattgtgtgtatggagcagctaagtcaggaaaagtcttccgcccgagctgggaggggagagtgtccatgcactgaccagtccaggggctcaagggccagggctctggaacaagccagggactcagccattaagtcccctcctgcctcaatcctcagcctacccatctataaacttgatgactcctcccttacttacatactagcttccaaggacaggtggaggtagggccagcctggcgggagtggagaagcccagtctgtcctatgtaagggacaaagccaggtctaatggtactgggtagggggcactgccaagacaataagctaggctactgggtccagctactactttggtgggattcaggtgagtctccatgcacttcacatgttacccagtgttcttgttacttccaaggagaaccaagaatggctctgtcacactcgaagccaggcttgatcaataaacacaatggtattccacgtc

SEQ ID NO: 12975 - DNA, 6673 bp, Homo sapiens
attttttgagacacagtctcactctgtcgcccaggctggagtgcagtggcatgatctcacttcactgcaacctctgcctcctgggttcaagcgattctggtgcctcagccgcccaagtagctgggattacaggtatgcaccaccacgcccagataatttttgtatatttttagtacaaatggggtttcaccatgttggccgggctggtctcgaacccctgacctcaaatgatccacctgcctagactccgaaagtgctgggaatacaggtgtgaaccactgctcccagccccattaaaatttaatttgcaaaataaaagaaagtaaaaacaacatgcaaacaaatacttcccaaggggctaagaccatttgcctcagctatttattgttttttcctacccaggcagagcaaggtcagggctcagtaaagacaataccctgggtttaaggaaaaacctaccatttgcatggatgagaacacatatgcccctgagaactgatctgcgtgaatcagagaatcccacgtgaaagtggcattcagccgggccagcccggagatccctgacacagaggctgaggtgaagcttggcaaagaaatgtagagactcctcctgggccaggggctctggatttgtttccacccagcctgcaagtccctaagtctctggccagtcacagctcactgctggctctcaagttttctcacctggacactggggacaataattcccaccttgctcaccactccccacctgccatgacccccagaagttttgctaccagcatatgaattcctgggcgtgtaaggctttgcaaactgtagagttcttagcacagcacctgcaaaggcctttaagctcctgaaagcctcttggtctattccctgcttttccagactgaacaggaacagtatcggtgatgtcggttgctgccacctttctgaggctctcagggctgccaccagcctagaggagctggagtgagttgcccattctgcccccagacccaggacaattttggccgggaaagatgacaagggcaaggggctacctgagcacgccctttgcttcttcatctcatctccttcacccacttctacactgtgtaaacaacctggggcctagaagcttgggggacccaaagacaggatgtaagagtgtcaattgtagcaagagggatttaggtcagacaatggggagaacatcctaaacagaagccaagggttaggagctgtcactcaacatggggtgatggggctctctgtgtgagtcgaggcccttcctgggacttcagcctccccttctttttctgggagtggggtgtggacaagatgagacggcagaaggctgatgaagctgttttctcccccaagcttgagccacaaccagattggagacgctggtgtccagcacttagctaccatcctgcctgggctgccagagctcaggaagatagagtgagtagccagccctacagaggagggccacaggggtcacacgatggtcctaggagatactggcccctagctgaggccagcatggtaaaatctcccctgcgccaacctcagtgtccaggcagtggggctcggtgacctcctggccctcactgcgggaccttaagccaccccagcccctgctcttctctgggcctttctgcctcattgtctgggtaggtgtgtggtgtcggggggttgtctcttaggccccctgaagcaggggtggcagacccagcagatgtgctggggtgtcggggagagggggcatcagaggacctgatggctgcccccctcccacagcctctcagggaatagcatcagctcagccgggggagtgcagttggcagagtctctcgttctttgcaggcgcctggaggagttgatgtgagtgtctgcccaggtggcctctgccctctgtgccccccaggtccacctggcctcctctcccgcagtgggcacagggcagggcgggggtcccgagtgggcaggcccagtactcaatgctcattcctctcctcttccaggcttggctgcaatgccctgggggatcccacagccctggggctggctcaggagctgccccagcacctgagggtcctacagtgagtggccccctgcccataccatgcagggctggtggggaggagggtcctcgggagcagtgggggggtccaggcccccatcagttgagctgccctgccccaagtcaagcttggcatatacccactctcctgcctgttccttccctgcctctgatgtctgcagcaagaaaatcaggaggcccagcctagtcctggctctgccactggcccctgcctgaccttggccaaacccctgccccttctcagcctcagtttcttcacatgcaaaagaagtacaatgatcccagttcattgtgccctgtgagcgggtccctgagggcgaatgagaaatcctggcagagggcttcgcaggagcacggtgccaatcaacgtggcctcagcacttcacaaatgacctcattgcagccccatggcagcccccagagtcccagagtgctgggaccttgttttttttttttttttttttttttagatggagtctctctctgtcacccaggctggagtgcagtggtgcaacctcggctcactgcaacctccacctcccgggttcaagcaattcttgtgcctcagctaccagagtagctgggattacgagcatgcccaccatgcccagctaatttttgtatttttagtagagacggcatttcaccatattgcccaggctggtcttggactcctggcctcaagtgatccacccacctcagcctccaaaagtgctgggattacaggcgtgagccaccatggctggctggtgctgggacttttatgtgctcccttttccaggcaagggaatgaaggccaggagaggtgtggagaattttccttactcatacacgaaggacccaggtgttgaatttgggatctcagaccccaaagccagggtccttgatacctacccaggtcctgtgtggatggggaattagccagagactgtctacgggctggcactgcagcctgagacaaggctgagggtggggctctggaaacgccagtccctcaggctcctctcaccctctcctctttccccagcctaccattcagccatctgggcccaggtggggccctgagcctggcccaggccctggatggatccccccatttggaagagatcaggtaagtaggggctgcccagcccaggcacggggacagtcctgggcgggtctgggggttcctctcacaggtatctcccctaccctgcagcttggcggaaaacaacctggctggaggggtcctgcgtttctgtatggagctcccgctgctcagacagatagagtaagtagcctcccctgcctgcctaggggaccagtggcaggctgagggcagcccttctctgactgagcctaacacctggggaggcctttgaagtgatagaagccccagggatggtgggggcctggctcaagaaaggaagtctttcctaaaacgcctagcttaccccagaccctggtggctctggaggcaggacctgctagatcccctgactcaaacaacccccatcccatcccatgcccttctccatccccagcctggtttcctgtaagattgacaaccagactgccaagctcctcacctccagcttcacgagctgccctgccctggaagtaatcttgtgagtgattggaagagccctgagctggctgggaaaaggaaaagtcgggaggggtcgggggagttggctccagcctgctgtgtggcctggagctgctcccatcctctctggccagtcctcccatttgtaaatggggaagatcatccttactcagacatcctctcaaagacattttaacacttgagctgcaggtaatgttgggtaaaacagtttaccttcttctgcctttttccccatttgtagattggtgggaggggaggtggaccagatggtctttaaaggtttttggtccaaccttccttttgggaggcaactggatagaccaccttgcctgcttgatgaaacctccatttatgaaccacagttggtagaaacagtggctaaagccaggagaaagccacccccagacctgctggctggccgtgcttggctgtctcttagcaatcagaatcccccagaccttggggctttgcagtgctgcctcatgagtaaactagaattctaggactagcctgggaccctaaccatggtatggaggacaaagctgtttcctaaagaacaggacacaagtgattacgagaagattttagtttgcatcctaaaggtcttaacccttctcattacaccaaagcgaaagtctcagatcagtggtaattcatctttaacacctaacactggattctccctttttaaccaaaagggttaaaaacccaacatcttaggaagggcatatgttccaactagaagttaataccattgtttgtactatatttatttttgtaactaccttctatatggagtctgtaacacaagttttccattgatagtagcaataaaagtttcctttcaagatttttttttttttttttttttgagatggagtctccctctgttacccaggctggagtgcagtggtgcaatctcggctcactgcaacctccacctgccgggttcaagagattctcctgcctcagcctcctgagtagctgggattacaagtgcccaccaccacacccagctaatttttgtatttttagtagagacaggatttcaccatgttggttaggctcgtctcaaacacctgaccttggcctcccaaagtgctgggattacaggcgtgagcaaccacgcccagccaagattaattttttaaagtaagaaaaaagagggggccaatttaaagaaaaatatgatgcatcttaaatacaggaggtacatgtatgtggcaaaaatggcaacatcttgtgaacaacgtcatgattcaaacttgacggggaggggagcagggaggaaggtaacctgcaccctgacgtcttcaggggaggacacacaagcaccctatcaggtggcctctcttgaaaacccttgcccccacgactggcaccctgctttccccattcactgccttgtctccacccctcgacctccttgctctcctgccgctgactttgggacccctaccctgcaggctgtcctggaatctcctcggggatgaggcagctgccgagctggcccaggtgctgccgcagatgggccggctgaagagagtggagtatgaggggccgggggaggaatgggacgggctaaagggggacctacatcccgggaacaccaagaggccactgggtcagtcccctgcctcccagaaagcccttccttgagttgcacactctggcctgttccaagcccctgccaggcttagttccccctgggttctagccttcagccttcctgctgcacctgccaccagtcccctgttgtcttttgggttccctgagaaggtagtgtgggagactgtgtcccctgaccttggcctgaggaagggacctaggaaactctcacacccattctcatggccgtgtttctctttcccctcccctcactgtccactgagaagcctggagaagaatcagatcacagctttgggggcctggctcctggctgaaggactggcccaggggtctagcatccaagtcatccggtaacagaggcctgcaggggcagggatggtgggtgggaggctacaccaacccccagatctaatgggactccctggaggaggcggcagggcctgggctggggattatcaaaggagacttggaccactccaccaagaatttggcagcaagcagacttggatcaaaccccagctctgccacttgccaactgtgtaactttgtagccataactcaacctctctgaaccccaattttctcatctgtgaaatggggatactgatagtatctacctcagagagttgtgaagactaaatgagcatataaagcactgaacccaatgcctggcacatagtaagcacttaaaatggcagctataatcagagccatcacatacagttgtataggttgtgcactgcacaagggcattaaacctaaggggcaccattcacattgtcaacctgctagatttctagcagatgagagtaaagtaccttgttctaccaaaatcatatattatgacaatttcagacagatggaagtaaaacatcttgaagaaagagggtcttttccttatttgcacaaatgtgtcatatgagtgtggccttagctggcatcactatctcccagggaggaaggttgagttggaggactcaggaggcaggtgtggggtacaccctctccctaggtcagctatgctggtctaacacctgcctctgccaggtaactctaggcacagctctacctttttgggcctcagcctcccaatctgcagatacgacagatggcaaagatgggaggatgaatgagtgcctatatctgtgccccacagcctctggaataaccccattccctgcgacatggcccagcacctgaagagccaggagcccaggctggactttgccttctttgacaaccagccccaggccccttggggtacttgatggccccctcaagacctttggaatccagccaagtgatgcacccaaatgatccacctttcgcccactggg

SEQ ID NO: 12976 - DNA, 1051 bp, Homo sapiens
attttttgagacacagtctcactctgtcgcccaggctggagtgcagtggcatgatctcacttcactgcaacctctgcctcctgggttcaagcgattctggtgcctcagccgcccaagtagctgggattacagactgaacaggaacagtatcggtgatgtcggttgctgccacctttctgaggctctcagggctgccaccagcctagaggagctggacttgagccacaaccagattggagacgctggtgtccagcacttagctaccatcctgcctgggctgccagagctcaggaagatagacctctcagggaatagcatcagctcagccgggggagtgcagttggcagagtctctcgttctttgcaggcgcctggaggagttgatgcttggctgcaatgccctgggggatcccacagccctggggctggctcaggagctgccccagcacctgagggtcctacacctaccattcagccatctgggcccaggtggggccctgagcctggcccaggccctggatggatccccccatttggaagagatcagcttggcggaaaacaacctggctggaggggtcctgcgtttctgtatggagctcccgctgctcagacagatagacctggtttcctgtaagattgacaaccagactgccaagctcctcacctccagcttcacgagctgccctgccctggaagtaatcttgctgtcctggaatctcctcggggatgaggcagctgccgagctggcccaggtgctgccgcagatgggccggctgaagagagtggacctggagaagaatcagatcacagctttgggggcctggctcctggctgaaggactggcccaggggtctagcatccaagtcatccgcctctggaataaccccattccctgcgacatggcccagcacctgaagagccaggagcccaggctggactttgccttctttgacaaccagccccaggccccttggggtacttgatggccccctcaagacctttggaatccagccaagtgatgcacccaaatgatccacctttcgcccactggg

SEQ ID NO: 12977 - DNA, 9740 bp, Homo sapiens
atacatgtaattgttgcttaatctattccttgtttgctaagaaagcaggccaccccaggccctccttgccctgaccagtctgggttcttgccactgccagggaagttggtctttgaccattttcaaactgctgcttcctctctgcttccagctttgaaagccaacacatcctcctgagaggggacaagacaagcaggtgaggagggaacgctcggggtgggggagtcccctcccgctctggtccccgtctgttggaggtccccccacccccagacccatgctgaccactcagctctcagttaaaccacccaagtccggcacactaggtttaatcaccacttcagtaaccaccgccccccccataaattgtcagtaatcaactgccctgttttccccttggaaggaggcaatgcagatgggaggaagggagggatatggttgggagaggtcccagagcagggcaggtgcccgcagattgctgctgtgtgggaggagacaggagaacatttgtgcttctgcgtttcggggaattttgtagacccaccgctccatacatgtcactgccctttcacgctctgaaggcaggggccgtgggtgctctgaaaaaacattttccccgtcttcgcagtaaacaaccaatactagtttagctcttcatgatgttcccggctgccctctagtgggaccaggcctcttggcctcacttgggagcagtggcagcggacagggtgggcccatgtgcagctggctgggtggagagagtcacagctagtgtgtcaagaaaaggcactgccgtacagatgggctgtcaggagtcaggggtggctcaagcctgggtggtcttgcttcccaggataggatctctgtttctggggaacccccgggttcttgaggcccaaagaactgacgtacagggaggcagaagtcatgtgatgccaagcagtggtcagagaggctctgtcttgggtcctcctgcctgctcacctggacaggaacaagctgctggcttttctaactcaggcttcccttccctgagcctcagtttccccatctgaacaatgagggactgagctaggatctagtgactgcattgtctctgagatgccttccagccctgactttccaagtctgggagtccaatgtgggtgatctgaactttcctttctaaacgatccccctcctaggggtatatgggctgggctgggagtccgagggggtgatctgaactttcctttctaaatgatccccctcctagggatatgtgggccactggatctttgccagacttcccagctgcagccaagttcttagggttccgtcagcgctgcatccccaggagcctctggtactgtcccagcccttcttgtttgggggtaaccataatagggatgaggcgtcagagggggcagagctggcagggggctagggctggggattgggatagagggaagagagggagtttaagagaaaaggaaaagaaagaggcgtgggtgtgaggggtgctgggagttggggagctctggcccctgacgggcagctcagctggcccatgccccgcattctccttggagagaagattccacatttctgtgaagcaaacagagcagctcagccactccctgcctggggtctccatctgctctgggggacacccactttccagaaagaaaggggttggcctgtctccccactaatacactccccatctgcaagctctgccatgagaggctgtgagaccctgacttggccccacctctctctaggcctccagggaagtggaggcaagtgaggccctgggaaggacatttcaatttcactgttagccccagggcaatggggagccacgggggtaacagggagaggcctggtcagatgtgcagtgttaaaatgtgagacacttgtggggcagagagggattaaagggaggcaagagtggaagcccagagggtgttaaatggtcaaggtgagtgaggatggtggcctgggctctggagggggcggtggggaggacttggagagtcactgacaagggcagctgggaactcagggtcctgcactgtcactgtcagggcaggaggattgggggctgcaggggagactcgagagggaagcgagtgccccacaggggaaggggcctgtggcctcccacttagagtgagggatgctgggagaaggatagagcccctggggctagccagggaccctgggctttctctgattccctgccctgcccattgcccctttgcagcctcagtgagtgtcctctggagcccccaagcctcacccgcctctgtgccactctgaaggactgcccgggacccctggaactgcagtaagtaacgaggacacagccccagagggcaccatgtggggatctgcccagtgacctgggagggggcttcttggttagaagacaggtgagtctttctcgatttcttcccaccagccctgccccatgagagtcccctggcctttggtagaaacttggctgtctctcggcagcccccagccttaggcagcgcatgtctcccactgggagatgctgtgctggactggggaagccttcacctgcaccatccactcaactcagggcacctgggagccctgtccacctccaaccccacccctggagcctcaccagggcacccacttgaacctgcctgcatggctggagcgtagcacttctgaaagcccttcctcaaggcacccccactctccttggggttaccacctcactcgccccagaacatctgggtctgtaaccagagactggacctggaatcaggactcttggctcaaaagggatttaactccccgggcctcagcttcttcatctgcacagtggatggtcagcctttccttttattgtcattgtggtgattctattatagtaattaccttaaaataaagaaatccaagacaaaacctgcctcacctaaacaacctcttctctcatcaaatccatgttgtcatgtgtccacaggactgtctactccttgcctatttgcatattcagtttctacctgtttgcagtcataaactagtttcatgcactgtgttttcatagcatctgtgttttccattttgcttcagtcttttttcttgctttctagcccccatctcaaatgcccttccagcccttccaaccagataatccggtttgaccccctggagtgtggccttcccatgtccttctccaggttcaaacatataaccacaaaaccattatcagacctacactattttttttttctgagacagagttttgctcttgttgcccaggctggagtgcaatggcgtgatctcggcttgctgccacctctgcctcctgggttcaagcaattctcctgcctcagcctcctgagtagctgggattacaggcgcccgccatcatgcctggctaatttttgtatttttagtagaggcagggtttcaccatgttggccaggctggtctcgaactcctgacctcaagtgatccaccttcctcagcctcccaaagtgttgggattacaggcttgagccactgcacctggcccagacctaccctattaatggcaattccttaaagtcaaccaatggtcagtggtccctgattgtctcttacctgttttcacagagtatatactgatgccttttaatactaaattgccacagtacgggacgagctgcaagttactccaccacacccttctagagtctagatcaagggtgtccaatcttttggcttccctgggccacattggaagaagaaaaagaattgtcttgggccacacataaaatacactaacactagcgatagctgatgtgctaaaaaaaaaaaacaaaactccaaagaaaaatctcatagtgttttaagaaagtttacgaatttttgttaggccgtattcaaagccatcctaggctgcatgcagcaggccatgtggcttggacaacttggtctagattgaaatccaaactgcttctaggtgttgtgttttgttttgtgtagcactgcagtcagtgctacaaaaagcactcttacgtgatttgactgttaagtacctattgtataccatgcactgggccagatcctgggaacacaaggagactgggatgcgggctctgctggccaaggcaaatcatctgcagaggaagcttaatataaaaagcccactggcggcccggcacggtgactcacgcctataatcccagcactttgggaggccgaggtggctggatcatgaggtcaggagttcgagactagcctggccaacatagtgaaaccccatctctactaaaaatacaaaaattagccaggcatggtggtgcacccctgtaatcccagctactctggaggcaggcaggagacttgcttgaacccgggaggcagagattgtggtgagccaagactgcgccactgtcctccagcctgggcaacagagcaagactctgtctcaaataaataaataaataaataaataaataaataaataaagcccactggcagcactgggcggtctgagcacaggtgggagtttcaggtccccctccattacctgtggttggggaaagtgcaatagtgaatatgaaagcactttgtcaactgtagagtactgtgatcacttgcaggattattgctataaatagtcatcaaggtactcaatgctgaagtccagtgattccccggggttccaccggggaagccagggaagatagattgtggggctccatcccccctccctgaattcaagcactgcaggtctactttgcctgtgtacacatgggcataccatgtgggatgtggtaaagagtaaagattccattgctttaaaaaaaaaaaaaaggagggtgtaatcacctcctttgccaaccagagcccatggtgtatttgggggtctggtgggacaccatacgggatgtgtttctggaaagaccaccctcaataaaggccccagtcctgactgtgcctcaggggcccatgcccagtccctggggcagaaagggtagagttgggcctccagcctgggccctggcagaggctccaacatgaggctgctcctcccgccctaccctgccccccagctcactgagccagttgatgtagggcccctgtactccatgcctcccctccaaacagccagaggagaaagcagcagagatgggccaggcccttggaggccccggagaggggagagggcagcctgcagaggatgaaggaacagaaagagaggaagggggaggtggagaaggcagaaggagaacatagtagaggtctgcgggggttgggaagtggctccaggccccccaggaaggggctgtaggtaaaccccagggaactcagtgtcttgagttgtcctggtcctccatctagagcagagacagcaaggcaggtatctggagtttctcctaaatgcactgggttctgacgaattatctgaacaatgatgagctggttggtctggtgttaatgggcaactagagacccaagccagtccctgtctccttcgctgacctgttgtatgctgaatttccactgtcatatccactcctctgggttaaggcagcattgttttcttttcttttttatttttttgagatagagactcgctctgtcacccaggctggagtgcagtggtacgatcttggctcactgcaacctctgcctcccaggttcaagtgattcccatgcctcagcctcctgagtagctattactacaggtgtgcaccaccacgcctggctaatttttttttcgttttttgtagtagaggtggaatttcaccatgttgcccaggctggtcccagactcctgacctcagatgatccacccacctcagcctcccaaagtgctgcgattacaggcatgagccaccatgcccagctgcattcttttcttaacaaacatgttttgcggaacactaaccttcatggcccttaaaaattaattctgctagtccatttagtttggggaaaagtctgctgtagctccttggaaattcataatgcacagcagcctatcgcagcctcagagaagccctgcagcaaacaaaaccatttaatttggcttaaccccgtatttcccaaacttaaaagaccttcctcttcttccagcctcacggataacccatggacccagtgctgggagggaatgtttcaggtgaccctggttaggtcccatctccagaaggctctggctatgaggccgtgctccctgctttcctggaaggtttcccccacctcatccacctgctttgtttcacagattgtcctgtgagttcctgagtgaccagagcctggagactctactggactgcttacctcaactccctcagctgagcctgctgcagtaagacgagagtttttcctatttcccggttccttgtgctcgtgtttctaaggctcctccatggcaaagctgtacctgccctctaacccctcaaccccccgcctttaccccctccaaccccctctacccgctccattctttccttaggttgttttatcattttacctggcacaactggggactccaatctgcttccagctccaccctaatactttgtcaacctcagggggcgtcgtttgcctcctctgcgtctcagtttcctcatctgacaaatgggattaatattccccgcccattcccccagagttgggactcaaataagttattctaaaatcaccttaagaaatggaagatctgtgacaaatgagctgtccaacttctccccacccacggagggtcacccactcgtagaaaggggctgtacagatgtaggtcctgtacttatcacatgctgctttttaaaggtcaccgtcaaactcgcaaaaagggaatttaagcagaattcccccaaagtattaaaactattttctaatttcagctcagactggttagaattttaaaagtatttaggccatgtgtggtggctcatgcctgtaatcccggcactttgggaggccgaggcgggcagatcacctgaggtcaggagtttgagaccagcctggccaatgtggtgaaaccccgtctctactaaaaatacaaaaattagcccggtgtggtggtgggtgcctgtaattccagctacttgggaggctgaggcaggagaattgcttgaacttgggaggcggaggttgcagtgagccgagatcgcgccattgcactccagcttgggcgacaagagtgaaactccatctcagaaaaaaaaaaagaaaaaaagaaaaagaaagaattttagaaggatttactttaaacagtcttctagtggtgggaggcggggtgggaagcagctgcagctaagatgaaaaaatacagcaggaaagtaaatcataatgttaataacatcggtgcaaaggctggggctctctgggatgtctaagatggctcgcatcacctccaggatctcgcttatgcttgggttttatctgggagggagggaggagacgtgacaacattccaggggcaagtacagcccagctcacagcaccccatggcaccctgtaatagtcccaccctgcccggagataatgagtcagaaaggactcctttggacataaaaggtggcaggttaaaattgaacaggttggaaacctcagaccggagaggaacttctctttgcctaaatcacacagcttcacccctgactcctcgtccgcctttggagtggcgtggccagcctgaccccttgccagggtttaaactttgtagtactcaacgtgtagtgcttgtggccctactgtgggccaggcattgtgtgacgacacagcagaaaaagttgaccatgtccttatcttcttggagctcctcttacaatagtgggagctgaaaaataagtaaagtaaaatcaaataagatgaacttagccagtgataagagaattttctcgggatgtggtgaagagtggctggagaggtgatttagatgtggcagaagccatcagggaacatctctgaggagggatgctgagctgggacctaaaggaagagagagagctcgccttgtgaagagcagggaactgcattccaggcagagggaacggcatgtgtgaggccctgaggcatgattaagcttggtgggctccaggaacagcgcggaaccgagacagccagagcacagtgactggcagggacagtcctaggagaggaggaagagagagatgggctcgggttgggttgcatggggcctggcacccatggggagagtttagacttttgttcctgggaacatgaaagggagaggaataatttgggttttctttctttcttttttgtgggggagggtctcgctctgtcacacaggctggagtgcaatggcgcaatctcggctcactgcaacctccgcctcccaggttcaggcaattcttgtgcctcagcctcccaagtagctgggattacaggcgtgcaccatcatgcccagctaatttttgtatttttagtagagacagagtttaaccatgttgaccatgctggtctcaaactcccgacctcaagtgatccgcccgcctcggcttcccaaagtactgagattacaggcaggagccactgcacccgttcctcatttgggttttcaaaagttcagactgagtgctgggtagagaatggattgggagatacgagtggaaatgagagtgggaagagatgtgtgcagcagggtgaagggtgctgggggctgatcactgctggggtgggatagaagttggtagactcagggtggatcttgagagtggaatttacagacaagctgatagggggattactggatgaggcaaatggaggtgctgaggctgcctctgagggcagagtggacccatctcactttctctaaggcagtggtttccaactgggggtgattttcacccttgggagtcatttggaaatatctggagatatttttggtggtcatgactgcgggtgaggggtgctgctactggcatcgaatgaatagagatctgggatgctgctgaacatcctatagggcacaggagagcccacaacaaagaattattggacctcacatctcaatagtgctaaggtttaaaaactgtgtctgaagggcctgaagcttcccactctctgtgagcaaggactcgcctgtgaaatctgtgcttgcaggtaaaaacaatagtaataataacagcaagcacaggtcccatgcccggcagtgcacctgcatgatgtaattaaatcctcatatacctcgagagtcatacatgacgagtcttgatttccagataaggaaactgaagctcagagaggtgaagtcacttctccaaggtcacacagccaataagcagaactgggactcaaatccaaatctgcctgtccctcagccctatttgtgcctcttgatcccctgcctgcttccctattgccttgctgagctgctagccctccccaccctccctttccttaccctccaggctagccaggttccttgtccactcatcttgccggatctaccccctttccttttcaggctgagccagacgggactgtccccgaaaagccccttcctgctggccaacaccttaagcctgtgtccacgggttaaaaaggtggatctcaggtgggcattcccctgggacagccaggactcgtcctgaagggttgtgcctggagtctggtgggtatgagggggtaggatgaagacagtaggacccaactagaggctgggcttccggaggaggggtgctggccccgtgggggcatcctgaggctgtggccacagctgtctgacccaggtcctgtctgatccaggtccc

SEQ ID NO: 12978 - DNA, 549 bp, Homo sapiens
atacatgtaattgttgcttaatctattccttgtttgctaagaaagcaggccaccccaggccctccttgccctgaccagtctgggttcttgccactgccagggaagttggtctttgaccattttcaaactgctgcttcctctctgcttccagctttgaaagccaacacatcctcctgagaggggacaagacaagcagggatatgtgggccactggatctttgccagacttcccagctgcagccaagttcttagggttccgtcagcgctgcatccccaggagcctctgcctcagtgagtgtcctctggagcccccaagcctcacccgcctctgtgccactctgaaggactgcccgggacccctggaactgcaattgtcctgtgagttcctgagtgaccagagcctggagactctactggactgcttacctcaactccctcagctgagcctgctgcagctgagccagacgggactgtccccgaaaagccccttcctgctggccaacaccttaagcctgtgtccacgggttaaaaaggtggatctcaggtccc

SEQ ID NO: 12979 - DNA, 2822 bp, Homo sapiens
ctctgcctttctctgaatctcagggtttcctgggcatgggatcataatttctatcccctgatgcccgggtgccatggggaccatggaggccatggggtgggaaggccaggtattgccatgctcacagaatgagtttgggggtctcctctggttctgaggcctccatcctcccttgtccttgtgggtgcagccccgcttccctctctgtgccctgtgggtgccctaggtgcctaggaagctggcatgtctgggcaccgtgcttccccaggcccttctctctgcagcctgggctctgagcagagcttccggattcacttctccagagaggaccaggctgggaagacactcaggtaatccctgcagggtgatgggacaggggacagagaggggagaggaggctgaccctatggcggcctccatggccccctcttccctgggccctctcctcctttagagagcagcttcaagctcactgcctgggtctgttcctccagatctgcccccgatgccctggtaactccagtctcagccagggccttggcattgaacttgtgcctcttagcccaccatcctaagcccaactcagcccaacattctcttccttgccatgtcctgactacaggccttgaggcttctgagtgtcacggttaaagattttgaagccaactgaaaataaatccctgatctgccacttaccagctatgtggccctggacaagtaaaatggggataataacacaacctaccccttagggttattgtgaggattaaatgagttaataagtataaagtgccaggaaaaggtctggctcatgggagtgctgtcagcagttattgtaactgttattattattattattattattattattattatcattatcattacccctggtagccctgactcactgccacggccagttcctttacatgtcttacttcagctgtgaacagggcctccaaactgatccctgcatcttatcaggcctcctcccctccattcactccacagcccccagagggatcttcacaacacacatctgacagtgcccctctgctactctgtgcccctcagtggctccccattaaccccagggtgaagttcaaagtccctagcatcttctccctcacagtctgatccaactgtcaccttccaccatgttccttcccacctcccccacaccacacacacgccctacacaccaacccatataccacagatacaccaagcacacccaaacacaccacacagcacgcagcacacacaacacacgcacaccacacagcacacacaacacacaaacgcaccacataccatacacataccacatacacacacatacaccacacacaccacacaatacacacaccccacaaaaacaaaccccccacatacatacctggcacattacaaatacagcacacacaccacataatacctacaaataccacatacacaacacacacacacacacacagttcagccataaccttcactatttgctcctagatcaagccctgcctgaagattctctgcctctgctcacaccgcactcagctcaacattctcttccttgccttttctgagataaaattctcccaatcctttaacacccagctcaaacatcagcccctcctggaagtatcccagcagccctgcctcatcagagtgaactgccccgaggttcactgggccctttcacttggctgggcccgtctgctggccacccagggctgagatgcctggacagcagagccccacggagaatcccaggcacacctccctccccagggagctcagccagtgctggtccgggagagtaaggcagtggttaagagcttggggtctgcagtcagactgacctggatggaaaccagattctgcccttctttcttatctgctgtgtgtccttgggttagtcagtttccccacctctaattggtgctatgagaattaaaggagaccctgcgggtaaggcaggaagtcccatgcacccagaggctggcacagtgcctgacctagagtcagcctccctaaataacttactcctaatactttcttacagggggtgtgggaggttcctccccaaagagacaggaagctcccagagcaggagctgcatatttggcctctcaggccctgctccaggcctttgccctcagaggtgggatgctcccccaataggccctcagggaggctgagatgaagctgagcagcagtgcccacaggcctcacccaggctctgccctggctttctgccctcaggctaagtgagtgcagcttccggccagagcacgtgtccaggctggccaccggcttgagcaagtccctgcagctgacggagctcacgtgagtgacccacccagcccgtgaggacagcagaggggtgggggcaccctgccagagccacctcagtgactgacctctgtctccaggctgacccagtgctgcctgggccagaagcagctggccatcctcctgagcttggtggggcgacccgcagggctgttcagcctcaggtacctcctcccccgctgcctccgggaggggccatggcatgaatgggagcaggggtgggcactggagtaagaggcccccaggatcatggccccagtcatttcctgtacccacaaccctgccatctggaccctgagcaaaccctgtccatctgtcccagagactccacaaggcacacagagaaactgtccttccccacactggaggcctgtgctttgggatttaagaaaaaaagaaagaaagaaagaaagaaggtttcagaggatactgaactgaggacaaaaataaactgaaacgaagttctt

SEQ ID NO: 12980 - DNA, 907 bp, Homo sapiens
ctctgcctttctctgaatctcagggtttcctgggcatgggatcataatttctatcccctgatgcccgggtgccatggggaccatggaggccatggggtgggaaggccaggtattgccatgctcacagaatgagtttgggggtctcctctggttctgaggcctccatcctcccttgtccttgtgggtgcagccccgcttccctctctgtgccctgtgggtgccctaggtgcctaggaagctggcatgtctgggcaccgtgcttccccaggcccttctctctgcagcctgggctctgagcagagcttccggattcacttctccagagaggaccaggctgggaagacactcaggctaagtgagtgcagcttccggccagagcacgtgtccaggctggccaccggcttgagcaagtccctgcagctgacggagctcacgtgagtgacccacccagcccgtgaggacagcagaggggtgggggcaccctgccagagccacctcagtgactgacctctgtctccaggctgacccagtgctgcctgggccagaagcagctggccatcctcctgagcttggtggggcgacccgcagggctgttcagcctcaggtacctcctcccccgctgcctccgggaggggccatggcatgaatgggagcaggggtgggcactggagtaagaggcccccaggatcatggccccagtcatttcctgtacccacaaccctgccatctggaccctgagcaaaccctgtccatctgtcccagagactccacaaggcacacagagaaactgtccttccccacactggaggcctgtgctttgggatttaagaaaaaaagaaagaaagaaagaaagaaggtttcagaggatactgaactgaggacaaaaataaactgaaacgaagttctt

SEQ ID NO: 12981 - DNA, 1533 bp, Homo sapiens
gggtgagtgccgggagctctgagggtgagtgccgggcgtgccgcggggctgcgggacccgggctggggcgagcggaagggagaggatcggggttcgaattctgcacggagaggggtggaggggatgtcagaggccctggagcgggaggtgcgggtggccgggtggctggccgatggatagctgggtaagcggacagggcgccagtggcccggcagcgcgcacagcatgcgccccggcagtttggaggaagagttgccggcccgcagaggatggcagatgagggtcgcctggatggggggacacagtaagcggctgtgctcccctccctgcgcagctcctgtcacctaccggatccacccactctctctgtcttttactttgcaacttttcattgattttaaaacaattacggaagttacactgttcattgtacgcaatttagactttttggcctaaacaactttttattgtggaaaattccaaacatatacaatagtagaaggaatagaattaggttgagccttctgcacctgcgggttttcatataatgaagccccacctatccacgttcagcttggacagtcacgaccccaaggccacctactcacgaccccaaggccacctaggtagcccaatctccaccgctggttattttgaaacaaatggcagacagcatagcatctcaactgaggtatttcagaatgtactaaaagataaggcatcttttaaaaacaaaaccacagtaccaccagcatactacaaacattttaatagttattccttaatgtcaaatctccagattatttctaaggaacatttaacctcataagtgataggtgaatacgtgggtgttgttttgttacttgctttctgcattcccatgtggttttcggtcactattctcacccagaaagccaggacctgaaactggctggggtgatcattcgaggaggtcggaagaggctcctaccttcagtgccgtttgcgtccattttataagttggagttcttatgtttccttttttaaaaggttgaagtttctgcagacctaaaaagcagtttgaaaactggcagttcccagcctctaaaacccgggggtagcaggaggcagagagtaccccggggccagatcctggagcctcattgtcccttcaaatcaccttccgtttctctaagggagaaataaaccttgaaaagccatgggcttttcagatgtatctagatgtatctgatgcttttcaggtgtatctagactcccatccagcgtgctttctgcaaaacttactgaaccatagcccagaatggccatccatgatgcccacccgccttgtctcctgaagcacattgccaggtggacctgcacatggtgtggacggcagacagactggggctctcaacaactggtatttgctggatgaccatgaactaaccattcaatttctcgaaactttggtttctcgtctgtaaaatgaacatatgcaaatctatcctacaaagtgtgttttgtggattgaatgagatgatacacgccca

SEQ ID NO: 12982 - DNA, 527 bp, Homo sapiens
gggtgagtgccgggagctctgagggttgaagtttctgcagacctaaaaagcagtttgaaaactggcagttcccagcctctaaaacccgggggtagcaggaggcagagagtaccccggggccagatcctggagcctcattgtcccttcaaatcaccttccgtttctctaagggagaaataaaccttgaaaagccatgggcttttcagatgtatctagatgtatctgatgcttttcaggtgtatctagactcccatccagcgtgctttctgcaaaacttactgaaccatagcccagaatggccatccatgatgcccacccgccttgtctcctgaagcacattgccaggtggacctgcacatggtgtggacggcagacagactggggctctcaacaactggtatttgctggatgaccatgaactaaccattcaatttctcgaaactttggtttctcgtctgtaaaatgaacatatgcaaatctatcctacaaagtgtgttttgtggattgaatgagatgatacacgccca

SEQ ID NO: 12983 - DNA, 3446 bp, Homo sapiens
gcgggcctggcatcctgcacctgccgccccttccttagccacctggcgcagggcaatgaggactgtgtgggtgccaagcaggctgctgtagtgcaggtgttgaagaagttggccacccgcaagctcacagggccaaaggttgtagagctgtgtcactgtgtggatgagacacaggagcctgagctggccagtctcaccgcacaaagcctcccctatcaactgcccttccacaatttcccactgacctgcaccgacctggccaccctgaccaacatcctagagcacagggaggcccccatccacctggattttgatggctgtcccctggagccccactgccctgaggctctggtaggctgtgggcagatagagaatctcaggtgagtaagagtggaggaggaccggggaggggattgggcttttgggggagcagaggccaaccagtctagcaaacctctgccaagaggactggataagaatcttgaatatcagaacataatggcctgcaatgcaagagaggaagctccataccttgacaggacctctggagtccaaatggatcctcctcttgtctgtggtttctggactctcagtctctctgtcaatcatgggctgaaaccacagatccaggctgtctatagaggctggtggactttgggcaagtatatggagcacacacatgcacactgtctaggccagagtttcttcgttcctaaaacgaatctgtaacaatagccaactcatatggtcattgcaagaatgagatgggatggtgcatgaaaaacattttgtagcacagtgcctagcacagagcaaaggctcagtgtgcatattagctagagaaaaggctaggctgcagtaacagagaaacctcctccccaaatacagtaggttaaataatgtagaattttatttctctctcatggaagagtcagaggtaggtggtccaggtcagtggaatggctcagctccacgcagtcatgcaggtacccaggtccctcccattttgctccattatccccttgggaatcctatctgcacagtcaaagctacgtcatgggtatatctgtgctctggcttgggaacaaggaaagagcatggaggaacatgtcaatgcattaaagttcagtcctgaaactaggatacatcccttccactcacattccattggtgagaacatagtcacctggccacactgagctgcaagggaggctgggaaatgtgatctctggctgggaaaccatgttcctcatgatagctctattgctgtagatgaagtggagaatgggctttggtggacgattagaagtctcggccataatatgtatttgttagtactactgtattaagccccatctctctgaggggatggcgatgacttctcagctctgcccagcactgatcctctgacacttcgcttcttcttatggcagctttaagagcaggaagtgtggggatgcctttgcagaagccctctccaggagcttgccgacaatggggaggctgcagatgctggggtgagccaggccttggagctgagaagggtcttcagctggggatgcctggtactctcctccctctccttaatcctacacaaggcagattcctggccccgcccttttcccctcctcgttcctccccaccatctttgcttactctgtaggttagcaggaagtaaaatcactgcccgaggcatcagccacctggtgaaagctttgcctctctgtccacagctgaaagaagtcaggtgagtgatctccaggagggctcactgactggggagatgagccactgcccaggtcccagagtccccctggggcctgcatgttcctccaagtctgaccagtagtttttcagtgagacccagagagggaaggcatcagtccaagtactcagtagggctgagtccaaacccaaggctcccagagtccccagagcaaggcttccttcatctaatattttagactgtcttggaggagcatgagtgttaaggctccctccctctttctgaaatcccaggagaagggatagcagtgcgtaggcaggaatcaggcactgtgggtacacataactacatgaagcaccacacaccttcacatttgttcacacatgtctacacttgcacagaagtacacaggcatatgcaagaatatgcacccacacatgcccactcataggtgtgcacatgtatgcagcgcacacatgcacctttaactacatgtacacattttgatgccagcacactctaactaactaagcttgtatgcacaaatatactcctgccctgtgtctgggactcagtaccatggggaggagtgggaccagtgaccctcctccctggcagaacgctgctagtttatatggcacctttatgacatttagagaaggcaccacttcatccacacagatgcagcctgtcactaaggttcagcacttgttgagtgaaaataataagttggaccacagtccctattgtcgtctcggctgggcatctgtgaaccgtgattaagccaaggttcagaagtactgaacttgttgacatttttcttccctggctattgaaagtgactttaattttgtctttcatcacccaccattgttcttaatcaccctcactcccctcaactcatctgtctccccagctaggaacccaggcaaggctggcttgtgaacaggtggggaaagtgaggtcagagaggaatgcgcttggctcagggctctgggtgagtcagggccacagccgaggctggaagcgatgtctgcagcgtcccagtctagactttactcattgcctggggggcctatcccaggcacatcccaggcataagccctgggagcagggtgctaggtctcctcattgtgcctcatgaagaggccgtcagtctgtcttctagatcccttgagccgccaggcaaaaacttccccataggaacagaatagacccagaattgaggccagcagagggtctttcctcctagccgtgcctgctggaatccggcgagcaggccatcagctctttctgggcccctgtcttatgtctcccacatgagggtggccatcctgtcacttgctaactggggcttgcaagtgccccaaccccagggcaaagggactgggccttggtctcctcgcagttttcgggacaaccagctcagtgaccaggtggtgctgaacattgtggaggttctccctcacctaccacggctccggaagcttgagtaagtgatctttccactgcctctgcagcccagtccctctctatacctgattcaccccactcccttgcaaggcaaggaaggtctggggcccctggggtaggggattccactcctgacacctttgccacaatcttgcagcctgagcagcaacagcatctgcgtgtcaaccctactctgcttggcaagggtggcagtcacgtgtcctaccgtcaggatgcttcaggccag

SEQ ID NO: 12984 - DNA, 868 bp, Homo sapiens
gcgggcctggcatcctgcacctgccgccccttccttagccacctggcgcagggcaatgaggactgtgtgggtgccaagcaggctgctgtagtgcaggtgttgaagaagttggccacccgcaagctcacagggccaaaggttgtagagctgtgtcactgtgtggatgagacacaggagcctgagctggccagtctcaccgcacaaagcctcccctatcaactgcccttccacaatttcccactgacctgcaccgacctggccaccctgaccaacatcctagagcacagggaggcccccatccacctggattttgatggctgtcccctggagccccactgccctgaggctctggtaggctgtgggcagatagagaatctcagctttaagagcaggaagtgtggggatgcctttgcagaagccctctccaggagcttgccgacaatggggaggctgcagatgctggggtgagccaggccttggagctgagaagggtcttcagctggggatgcctggtactctcctccctctccttaatcctacacaaggcagattcctggccccgcccttttcccctcctcgttcctccccaccatctttgcttactctgtaggttagcaggaagtaaaatcactgcccgaggcatcagccacctggtgaaagctttgcctctctgtccacagctgaaagaagtcagttttcgggacaaccagctcagtgaccaggtggtgctgaacattgtggaggttctccctcacctaccacggctccggaagcttgacctgagcagcaacagcatctgcgtgtcaaccctactctgcttggcaagggtggcagtcacgtgtcctaccgtcaggatgcttcaggccag

SEQ ID NO: 12985 - DNA, 3430 bp, Homo sapiens
gtggctcttccgcttggacatcagctttgaaagccaacacatcctcctgagaggggacaagacaagcagggatatgtgggccactggatctttgccagacttcccagctgcagccaagttcttagggttccgtcagcgctgcatccccaggagcctctgcctcagtgagtgtcctctggagcccccaagcctcacccgcctctgtgccactctgaaggactgcccgggacccctggaactgcaattgtcctgtgagttcctgagtgaccagagcctggagactctactggactgcttacctcaactccctcagctgagcctgctgcagctgagccagacgggactgtccccgaaaagccccttcctgctggccaacaccttaagcctgtgtccacgggttaaaaaggtggatctcaggtccctgcaccatgcaactttgcacttcagatccaacgaggaggaggaaggcgtgtgctgtgggttcacaggctgcagcctcagccaggagcacgtagagtcactctgctggttgctgagcaagtgtaaagacctcagccaggtggatctctcagcaaacctgctgggcgacagcggactcagatgccttctggaatgtctgccgcaggtgcccatctccggtttgcttgatctgagtcacaacagcatttctcaggaaagtgccctgtacctgctggagacactgccctcctgcccacgtgtccgggaggcctcagtgaacctgggctctgagcagagcttccggattcacttctccagagaggaccaggctgggaagacactcaggctaagtgagtgcagcttccggccagagcacgtgtccaggctggccaccggcttgagcaagtccctgcagctgacggagctcacgctgacccagtgctgcctgggccagaagcagctggccatcctcctgagcttggtggggcgacccgcagggctgttcagcctcagctgaagcggtttcaaggtgcaggagccgtgggcggacagagccagggttctctccctgttagaagtctgcgcccaggcctcaggcagtgtcactgaaatcagcatctccgagacccagcagcagctctgtgtccagctggaatttcctcgccaggaagagaatccagaagctgtggcactcaggttggctcactgtgaccttggagcccaccacagccttcttgtcgggcagctgatggagacatgtgccaggctgcagcagctcagcttgtctcaggttaacctctgtgaggacgatgatgccagttccctgctgctgcagagcctcctgctgtccctctctgagctgaagacatttcggctgacctccagctgtgtgagcaccgagggcctcgcccacctggcatctggtctgggccactgccaccacttggaggagctggacttgtctaacaatcaatttgatgaggagggcaccaaggcgctgatgagggcccttgaggggaaatggatgctaaagaggctggacctcagtcaccttctgctgaacagctccaccttggccttgcttactcacagactaagccagatgacctgcctgcagagcctcagactgaacaggaacagtatcggtgatgtcggttgctgccacctttctgaggctctcagggctgccaccagcctagaggagctggacttgagccacaaccagattggagacgctggtgtccagcacttagctaccatcctgcctgggctgccagagctcaggaagatagacctctcagggaatagcatcagctcagccgggggagtgcagttggcagagtctctcgttctttgcaggcgcctggaggagttgatgcttggctgcaatgccctgggggatcccacagccctggggctggctcaggagctgccccagcacctgagggtcctacacctaccattcagccatctgggcccaggtggggccctgagcctggcccaggccctggatggatccccccatttggaagagatcagcttggcggaaaacaacctggctggaggggtcctgcgtttctgtatggagctcccgctgctcagacagatagacctggtttcctgtaagattgacaaccagactgccaagctcctcacctccagcttcacgagctgccctgccctggaagtaatcttgctgtcctggaatctcctcggggatgaggcagctgccgagctggcccaggtgctgccgcagatgggccggctgaagagagtggacctggagaagaatcagatcacagctttgggggcctggctcctggctgaaggactggcccaggggtctagcatccaagtcatccgcctctggaataaccccattccctgcgacatggcccagcacctgaagagccaggagcccaggctggactttgccttctttgacaaccagccccaggccccttggggtacttgatggccccctcaagacctttggaatccagccaagtgatgcacccaaatgatccacctttcgcccactgggataattgactcaggaaagaagagcctcggcagggcgctctgcactccacccaggaggaaggatacgtgtgtcctgctgcagtcctcagggagaacttttttgggaaccaggagctgggtctggacaaaggagtaccctgcattacgtgggatatgtgtgatcaattggggacatgcgacacacaatgagggtgtcatgacaatgcatgacacgtacggttatatgtggcagtgtgaccccttgacatgtggcgttacatgaaagtcagtgtggcacgtgttctgtggcatgggtgctggcatcccaagtagcaggatacatgattgttggtctatatatgacacatgacaaatgtccatgtcacaggactcatggctggccagatgacctcaggctggcccaagatctaatttattaatttttaaagcaaatacatatttatagattgtgtgtatggagcagctaagtcaggaaaagtcttccgcccgagctgggaggggagagtgtccatgcactgaccagtccaggggctcaagggccagggctctggaacaagccagggactcagccattaagtcccctcctgcctcaatcctcagcctacccatctataaacttgatgactcctcccttacttacatactagcttccaaggacaggtggaggtagggccagcctggcgggagtggagaagcccagtctgtcctatgtaagggacaaagccaggtctaatggtactgggtagggggcactgccaagacaataagctaggctactgggtccagctactactttggtgggattcaggtgagtctccatgcacttcacatgttacccagtgttcttgttacttccaaggagaaccaagaatggctctgtcacactcgaagccaggcttgatcaataaacacaatggtattccacgtc

SEQ ID NO: 12986 - DNA, 16284 bp, Homo sapiens
gtgtgactttatcctggaggcagtgggatgctgatagcaagttcagacaggcatgaggccagaccagagctgagttttcaagataactccagccagaggtatgcgtgcatgtgcacatgtgggtacatgtatgtgtgtgcacgtgcatgtgtgtatgagtgtggactagagatggaatggctttctgagcaaagggaacagccaaggcaaaggcctgtgggctgcagggagagaacaaggtttgatctctgcactccctcctctaagctctgtgtcaacagcattttcaggacagcaggaaggattcccaaagagcacagcagcgagggcagttggagggaggcgtctgctgggacactgaaaccagggtggggtaaactcccctcgcacctcctcagactcagagcccccataaatcttccaggtgcaccccagcccttttccctctctctgtctgaactggggtggcatgatcccaggactgcaactccacgtgtctggattccccttactgactgcgtgaccctggccattttccctccacctttctctcagcgcccccatttgattactcggcctcaggggtgcactggggattcttagaggtaacacttcgaacggaaagccagaggtcctggtgccaaaatgcaaatgtgagggcttgaaagttcatcgggttttattttctctgttccgtttgcagtagctcttctttcttgttttctatagaacagtaaaaaactttatgcatttgaatatcgtgaaccttgtaattcatatgcaatataaaaactactagctatgcatggagaaatcaattgaagaacagtggcttagcatgtctttctcattctttgatggctacctcaaatcaaatcaatatgaacttggggtcaggcatggtggctcacacctgtaatcccaacacttggggaggccaaggcaggaggatcacttgagcgcaggaatttgagactagcttgggcaacatagcgggacctcatcttaatattaaaaaaaaaaaaaagagaaagaaaaaaagtgaacttgggaggtttgaatgacaactcgtatagctgaagtaatagatatattcaacttttaaaacttaattttcattagataacacatgcatatggtataacattctaggccaggtgcagtggctcacatctgtaatcccagcactttgggaggccaaggtgggcagattgcttgagcccaggagttgaagtctagcttgggcaagatggcaaaaccccatctctgcaaaaaacacaaaaaattagctaggtgtggtggtgtgcacttgtagtcccagctactcaggaagctgaggtcggggaatcatataagcccaggaggtggagactgcagtgagccacgaccacaccactgcactccagcctgggtgacagagcaataccctgtctcaaaaaaaaaaggaaaaaaaattcctttcactggggacaattacctttatgaatttcttccagaaatattaatgtatttgtatacacatttttttttgagacagggtctcactctgtcacccaggctggagtgcagggatgcaatcttggctcactgcagcctggatacccccaggctcaagcaatcctcccacctcaaccttgcgggtagcttggacaacatgtgtgcaccaccactcctggctaatttttgtattttttgtcaagatggggttttgccatgttacccaggctcgtctcaaactcctgacctcaagtgatctgcccgcctttgcccctcaaagtgctgggattacaggcatgagccaccatatttattttttctttacacaaaggaagcatattctacaccctgttttgccccggctctcttttaaaaaacagtgtatcttggataccattccatatcattccataaagttcatcttcatcctctttttttttttttttttttttttgagacagggtttcactctgtcgcccaggctggggtgcagtggcactatctcagcttacctcaacctcccgggctcaagtgatcctcccacctcagcctcctgagtggctggatgctgcttctttctttttgatggctgcaaagaattccattgtatagatgtgccataatttaatcataatatgtcctctttgatcatttaggtttttccaatcttttgctattacaagcaaggccacgttaaatatccctgggcatattattttgcacattatgaagatatctgtaggctaaatacctgtgtatggaattgctcagtgtgattacatggcatttaccactttggtagataaaggttgtatcctgttacatgtccacggatgaatttcttccagaaatattcatgtatttgtatacacattttttgagacagggtcacaaaaccgttaacacattattattattattattattattattatttcacattatttagggaagtttcatttttttgtgagctatcactgataatttcttatttactcatcatcttgtatttctcttccttgcacattggggaaatgtctattctagtttttaatgtaaatgttcttgtggcttttttagaaaaaatcaaaatgtgcacattaaaaagtttgaatggttcaaaaggtcctaaaaagggtccacagtggaaaaggctctcctttcccagcaggcccagatccctcctcagacacaagcctgtcgtcagtttcctgtgtagcttcccagagttggtcactatgtatgcaaatacacacacatttaaaatatacacactccacgtccacgtggaatgatgcaaagcatctaagtgcccgttaattcacaaccttgccaactcagtaatatccttgcgaatctaatagctagaaaatggtgtatctttttagttctaatgtattatatttattctattttctgtgagcttgaacatcttttcatatatttaaaagtcattggggccaggggtggtggctcatgcctgtaaccccagcactttgggaggccgaggcaggtagatcacctgaggtcagaagttcgagaccagcctggtcaacatggtgaaactcagtctctattaaaaatacaaaaaaaaaaaattaatcaggcatggtggctcgtgcctgtaatcccagctattgggaggctgaggcagaagaattgcttgaactggggaggtggaagttgcagtgagtggagatcgtgccactgtactccagcctgggcaacagagtgagactctgtctcaaaaaaaaatttttaaatgtcattggtgtttcccttttttgtaaaccttttatgttctttgcctagttttctatgaggtcattggctttttcagtgttggtttttagtaactctcgatttattaaaacatttatacatttatagctttgtttatgatgtatacatttataaccttgtctgtgatgcagatatttttccaatttgtcatctggcttttgaccttatctgtggtattctttgacaatacaaaaattttaatttatatctgatcagtttcatccagttgtttttttcttttttcatgatttctgagttttgtgtcatgcttagcaagatgctctctactctgaaattattttctgtaaaatatttttttcagccaggcatagtggctcacacctgcaatcccagaactttgggaggtagaggtggaaggattatttgagtccaggagttcaaggccagcctgggcaacagagcaagaccccgcctctattttttaaaagagaaatttttttaaaatactttttcccatgttttgtttgagcacttacattttcttaacttttttgtcgtgaaacataacacatagaaaaatgtaatgtaagtgtacaacttcatgaattgttataaattgaacatatagctttctggtactttcatggtttaacttcttacatttaaattttggtttcatctagactttattttgatataattgtgaaatagaaatccatttttattctaaaagaacactttttaaatgttcatgaaatgttttaaaatttattatataccaagcaagaaaaaatctcaacatagtcctcaaagcagaaattgcacaggacttattctttgtacagtgtaatgcacaaaaactaataagaaagccttaaaaacaaccctttattaaattactccattccaaattataatttcaatctacttagcacataagtattgatatacatttatcgaaattggccaaaagtgttttattattttttaaaagaaaaagcctagcaatggcttaagcaataaagtttttaattttaaagaataacaaacagcctcactaaatcagaggaaagaaataaaaagataaaagcaaaaattacagaactagaaaagggaccattccagcaaaattgataaatgaaaacaaaaatttgtttttcaaacataagagttaccaacggctggtgaatctaaaaagaagaaaaaacaaagtaaactaaattaaatgtgaagccatgaagagatttaaaattataagaaaataggccgtgcacggtggctcacgcctgtaatcccagcactttgggaggccgaggtgggtggatcatgaggtcaggagcttgagacccgcctggccaacatggtgaaaccccgtctctaccaaaaatacaaaaattagctggctgtggtagcatgagcctgtagtcccagctacttaggaggctgaggcgggagaatcacttgaacccaagaggtggaggttgcagtgagccgagaccttgccattgctctccagcctgggtggcagagtgagattccgtctcaaaaaataaataaataaataaagctgggcgcagtggctcatgcctctaatcacagcactttgggaggccgaggtgggcggatcacaaggttaggagatcgagaccatcctggctgacatggtgaaaccccgtctctactaaaaatacaaaaaatgagctgggcatggtggcgtgtgcctgtggtcccagctactcgggaggctgaggaaagagaatggcgtgaacctgggaggtggaggttgcagtgagctgagatcacgccactgcactccagcctgggcgacagagtgagactccatttcaaaaaaaaaaatacaagaacatattatatacaactgtgagctacaccatgtttgaacatcttgacaaaatgagcaactttctcaaaactaaattgccaaatgttcatttttaaaaagccaaaaataaccaaccaacacaatgaggataaatttaaagtgatcaagtttgatttttttaaaaaactgttcaaacatcttggtagtgctgggcaggaagttggctttcattctgggtgagatgagaaggctctaaggggcataggacctgatgtcatgggacctgatgcaggctctgtcttaatagctgactcctgcgtggagtaggttattgggggatgggtggacagagaccagggaggaggctggtgcaggaatcccagtgagaaatgatggtgtccaggctaggccatagcagtagaggaagcaagattctggaatgcacttggaaaatgaagccatctttgggcttgagctcaaggaagcatgaagctgcccctaactgaagtggggaaggtggtctggggagcagtttaggaggagagatcaggagctcagtttcggacttggaaattttgaaacgcacatgaggcatccaggtggagttgggagaattaaataatgctgaaaggtactcacttggcaagtagcaaatattcgctatattgtctgttcaactttgtcaactgcttttccagtagaaatgtagtgtccttatcacacatgcataaatgttaaactcaaaagtaaaatgaaatattttctcagtagatatgaataactttttaatttttttgttttttgacatgcggtctcactctgttgcccaggctggagtggggtggcgagatcatagctcactgcagcctcaaactcctgggctcaagcaatcctctgccacagcctcccgattagctgggactacaggcacacaccaccacgcccagctaatcttttattttttgtagagactgagttgcacaatgtagcccaagctggtctccaactcctgagctcaagctatcctcccacctcggcctcccaaagtgttgggattacaggcgtgagccactgcacctggctgctttttaattgtaatattcatcctccatccatcatacttagtgcaaatatttttccccacctattgccttcctatttctcttttatttcacgtcatttagggaagtttcatttttttgtgagctatcactgataatttcttatttactcatcatcttgtatttctcttccttacacattggggaaatgtctattctagtttttaatgtaaatgttcttgtggctttttttaaaaaaaaatcaaaatgtgcacattaaaaagtttgaatggttcaaagggtcctaaaaagggtccacagtgggaaaggctctcctgtcccagcaggcccagacccctcctcagacacaagcctgtcatcagtttcctgtgtagcttcccagagttggtctctatgtatgcaaatacacacacatttaaaatatacacatgccacagctttttaaaatttgaatttatgggccatgtgcagtggctcacgcctgtaaccccaacactttgggaggccgaggcaggtggatcacctgaggtcaggagttcgagaccaacctgaccaatatggtgaaaccccgtctctactaaaaatacaaaaattagctgggcatggtggtgggtgcctataatcccagcttctcaggaggttgagacaggagaatcgcttggacccaggaggcagaggttgcagtgagctgagatcgtgccactacactcaagtctaggcgacagagggagactccgtctcaaaaaaaaaaaaaaaaattgaatttagactcaggtgcagaggctcacgcctgtaatcccagcacttacggaggctgatgaggggagaatcacttgagtccagtagttcaagaccagcctgggcaacacagggaaactatgtctctacaaaaaaattaaaattagcctggcatggtggagtgtgcctgttgtctcacctactcaggagggtgaggcaggggaatcacttgaactcaggagtaggaggctgcatgagctatgattgcaccactgcactccagcctgggtgacagagcaagaccctgtgtcaaaaaaaaaaaaaaagaaaagaaaattagactaccatcatagatggtacaaacacttcccagtttgttgctttcgttttgtttgttgccatttttactatacagaaaaaaaaggcaataaagaatacattattataatatgttaatttctactgcattatttttaacaacttcattgaggtgtaatttacataccgtaaaatctatccattttaggtgtaggattcagtgatttctggtaaatttactgagttatgtgaccatcaccacaatctggttttgggacattttcattactgccataatattcctcaaacccatttagaatcattcctatttctgctcccaggcccaggcaaccagtaatctacttgctgtttcaatagatttgccttttctggatgttttacataaatagaatcatacaatacgtgatctttagtgatcttttttcacatggcataaacttggttcctttttatgttgaataatattccattgtatagatatgtcacagtttgtttctccattcatgagcttttgggtatttgggttgatttcactttttgactgttatggataatgctggtacaaacattcatatacaagtttttgtgtagatgtatattttcatttctcttggaatagacctaggcgtggaattgctggattagatggtaattctattgttttacattctaaggcaggggtccccaacccccaggctacagatcagtgtcggttcatggcctgttaggaactgggccgcacagcaggtggtgagcggccatcgggcgagtattactgcctgagctctgcctcctgtcggatcagcggtgccattagattctcataggagcacaaacccagttgtgaaatgcgcatgtgagggatctaggttgcgagtttctgatgagaatctaatgataaatgtaatgagcttgaatcatcccgaatccatcccccaaccccaacccccgtccggggaaaaaatgatctctcatgaaatcagtccctaggccaaaaagtctggggactgctgttctaaggaactgccaaaactgccaaactgtttttcagagtggctggaccattttacattcccaccggcaatatatacggtgtcctgtttctttacatcctcatcaacatgtgtctttttcattacagccattctatgtgggtgtgaaatgctatgtggctgtgtttttcatttccatgcagaaatttttaatttaattgcttagttaaaaataattctttaaatttaaaacactcatattgccatatgtatatttttatactacaaagtgatacaatttttgttaattttcttgccttgattactctttacctgtatagtatttaaatctttacataagatcacaattatagtgaatagtaatttattcaactcaaaatcttcataggatttagaaaatttaagtcctttaccaaagggattgacttctaacttcattaaaggttgcgaacagtatcaaatccttggtaaagccacattcaatctttggcactccaggattttgagctataactgtagtgatcactaatatgtcatttctaagctgacggtcataatgactaaaacctctcatagattttaaaatacttccttcaaagtcagtaaacattccaagttactaagctgttgaacaatttcttattttgaagattttttctgataagttccaaagtgtttctgatgaaggaaataaaagctgtccagagaaatctgagtcattgaggtgagcacagattccattggctgcttgtgctttcatcattacagtacaattaacttcagaagtcgagagatgctgcagaattttaagtacccaaagtttctcaacaagttgattttcaagcaaggtcattaactgggccattgtttttgccaatcctccaacttcagccatttgaatcttgtatgatgaactcacttgctggtaacctggaatatgctcctttggtggttgtgcctgataaaagtcaacaatacgtttacaattttttatcctcaattcagaacttggtattttcattaagtcacccagaagcgcaactgaactagcagtatctccagcataagttatttcatccgatactttctttttcaaaaatggcaagccacactattttatgatatcatatgcagattctacaaaatgcggctggttttcaatttttactgcacacagattcagaatttcaaatgtctgtactaaatcccttaagggaagttcattctgataacactgtaccagtttcttgacagatttaagttgcttttcttctaagccttctttagcagtctcttcaaaaagtttgatgacaccattaaggtccacaggcttcaaaacaccagttccacatggcgagggaggccttgggaaacatcatcatgatggaaggcaaaggggaagtaaagaccttcttcatggtggcaggaaagagacagcatattgctatgtattttaacaccacttatttccccccttttttctttcaatatcatggattaaatagtgtattttaaatgagtgtgaggctcacttggactctattccatccctttggccaatttttttccatttttaatccaagaatcttaaagtttgaatgatggtcaccttgttatatattttattatgtttggaagcttttttgctattgtctgatcctcccaacaaatagccttttgatagaattgcctttattcgtttctttatatctaattctaacttaagattagacttaaaagtaacttcagcggttttattatgaaatatttaaggcatataaatactgcctcttttctctaaatgactgctaatataattttaccaagttctgttaaagtatcctgttgtacataaagtgctgttgttttttatctgcctgttaacttagagtgggttttattttctttcactttctgtggtcgaaggcaagtatgtcttagtcagtttgggctgttataatgaaacactgtagactgggtggcttaaacaacagaaacttgtttctcacgttctgaaagccgggaagtccccaatcagggagccagcaggcctggtgtctggagaggatgcgcttcctggtttgcagacggcaccttctcattgtgtcctcacagggcagagagcaaaaagaaagggcaagcgctctccagcctcttcctttttcctttttttttttgtttgtttgagatggagtcttgctctgttgcccagactggagtgcggtggcatgatcttggctcaatgcaacctctgcctcctggcttcaagtgattctcctgcctcagcctcctgagtagctgggactacaggtgcctgccaccatgcctgactaatttttatgtttttattagagatggggtttcatcatgttggccagactggttttagactcctgacctcaagtgatctacctaccttggcctcccaaagtgctgggattacaggcgtgaaccaccgcacccggcctccagcctcttcttgtgagggcagtaatcccatcataaggggtccaccctcttgacctaatcacttcgcaaaggtcccacttccaaataccatcacactgggtatttaggcttcaccaggtgaattggtgggggaggtgggacacaaacattcagtccacggcaagtttttatctcaatttgctaaagcctctctttatttctcctgttacagtgtgataatgttttttaaaatatcatttagctggctgtggtgacccatgcctgcagtcccagctactcaggaggctaaggcaaaaggatcacatgaacctaggagtttgaatccagcctgggcaacatagaaagaccctgtctcttaaaaaaataaataaataaataaataaataaataaataaataaataaataaaggaaagaggctgggcacagtggctcatgcctataatcccagcactttgggaggccgaggcgggcagatcacctgaagtcgggagttcaagaccagcctgaccaacatggagaaaccccttctctactaaaaatacaaaattagccgggtgtagtggcacatgcctgtaatcccactacttgggaggctgaggcaagagaattgcttgaaccagaaggtggaggttgtggtgagccgagatcatgccattgcactccagcctgggcaacaagaatgaaactccatctcaaaaaaaaaaaaaaaaaaaaaaagaaagaaaagaaaagaagcacttaaagaggctgaggcaggcagatcacttgaagtcaggagttcaagaccagcctggccaacatggtgaaacctagtctctactaaaaatactagaattagccagacgtggtggcacatgcctgtaatcccagctactcgggaggctgaggcatgagacttgcttgaacctaggaggtggaggttgcagtgagctgagaacatgccattgcactccagcctgggcaacagagcaagactccatctcaagaaaaaagaaagagagagaaagagaaatatagacatatgttattagtcccccaggacctcttcaaaagatctctcttttcctttcttatttctaattaccatactacataccacctccattatgtcagaatgtgccctatttacgtggatttgtctaaagtcatggaactctgagttacattccccgtatttcacagagacacaatcagagcacacgctgatcttccgcctctcttcatttcctccatgtactctgtagctacctgttctcttctttgttcgtaggaagatctctgttgcgtggtgtgggagtttgtgccagctcatctttttattgtgctttctgtgagcagctatcaatgcctccaggtcttctctttaagaagaatgtttactctcaattgtttaaaaaactaactaaataggaagaagattgcaaatcctaacctttttggggttttatattgggggcaaaagttggcatctgcagtaaggattatttcattttcatctgaataaatgagcagtaataactttgctgacttgcagggctcattgtgatgccaaaggacattgtaaggtgcatatctgaattggaggaggaagaggggcatcctctgagccaggtgtggcaggaggtgacatcaaggagggttaggctgcgtaaacccagggacacaaggagctgcagtcggggaagaacaaggtctagcggatggagttggggggactgtgtctggagccaatgttctcagatgtgtctccggcaggcaggggcaagggctggtgcctggtttacagcattccttttggagtctggaatagtggggaaaactccctgtcttctctccccttaggagtctgcactatggaaacaacctgtcaatccagctcaaggcacacatagcccagacacccatgagaccctctccgtggggaccctagagcacctatcatgaacgaggagaccaagtaggtgatttttctctccccttcacctcctcttttcccctcctatctacttcgtcacttttctcctactgccaagactggtccctacccaaatctgccttactgggctgcccccaacacaacaaacctgcccttgaccatcattcagcatgagaatgtaatgatcagacacagaaaatcaggaagagttttgagacagcatctaatctacccattttagagatggtatgactgaggcttatataggaaaaaggcttgctcaaggtcacactatgagtgtatcagctaggataggccaggttacactgtagtacatgcaccctccaaagtcccagtgactcatggcaacaaaagtttatttcctgctcttgcttcctgtctcgtgtggattgactgggattgctcctccacatcatcctgtctcccacactcaggctaacagggtagccatgatttgcaatatttctggtccctggagtagaaaaaaagaaaaagtactgtcaattacaccttggttcttaaaacaactacaggcatgacatgagtcttttttagcatgtttcattgaccaaagcaagtttcatggctgtgcccaatttcaaggaggcagagaagtgtaatcccaccaaaggcctagaaagaggagaaagagtatctgtgaacagccctaatgcctaccacagagaattagtaacagagctgggccatggatctttcaaccatcgtcctctgtctccaagattattccccatggaaatctcaatgactgataatgatgccatgtgctttttctcctgaggatggttagccttaaagagatttgtgtcatatcctaaggggatagaacactaatgatggaaacaaaggtattgtgttagactggctggaggagaaatttgaggatgagaaacatcaccagaaatcacaccatccaggcactacttacttccatctggtgccatgctgccctggaccatttcttcatgggtagcatggatgctggacaccatagcctggaaaagaagttatgccctaggctatggccacatccttttgccgagatcacacaaaatccagggacttagccttgtctggtgccatctaggcctccaaggccttggaaatttactggcctgggaggcaagaaacctcagttctcctcctgcctctgtcatggacttgctgtgtgactgtgggcacaccctttgcccttccttggccatggtctttccgtctgcttagtggaggtggtgatccctgcctgaggatcatggtgtgagcatgtttcataaattctaagactctctgcctgagtgaggacctattgctattagcccagttgaggagaaatgaccagtggggctgacagtacatccaagtatgtctctactgcatgcccagggagcagctgggctctaaaccccaggacgcatagtactggcctcagcctctgggaattgggaaggctggcttctgggtggacctcctactcttttcagagttagaggtggactctctggagttgtgaggataaaataaggtatataaagcacttagacagtgcctaatacacagtgagtgctttccaagtgtgtactgctatgaggaaggacatagtaccagaaagtacatccggaaatgtgatagcatagtccactagatgatggaccaccatttagttggccaatccccaactgttggacatttaggttgtttccaatttttaataattataaataatcttgcagtgagcatctttgcaattaaatattgtatatacgttcatgatcgtttgccaaggttagagtcctagaaatggaattactgaatcaaaggaactgcacattatttaggcttttgctgtgtaaatgccccgtgccctctattggtacttctagaaggaggtggtttaagagttccagttcggccatcatgatggctcacacctgtaatcccagcactttgggaggccgaggtgggcagatcaccctgaggtcaggagtttgagcccagcctggccaacatggtgaaaccccatctgtactaaaaattacaaaaattagctgggcattgtggtgtgcacctgtaatcccagctactcgggaggctgaggcagaagaatcgcttgaacccgggaggcggaggctgcagtgagccgagattgcaccattgcactccagcctgggtgacagagcgagactctgtctcaaaaaaaaaagagttccagttcagaagggaagaatttgcttagcaaaagaggtgatggtctgtgttagctaggattagagttcactgtgagtagcagaaagcactaaacaacagtggcttaaccagaatggaagtgtatttccctgccatgtaacagaagtccaaagtcagtgagcacagggcagatgggcagctttaccttccaccttcctcagtatgggttccacctcatgattcaatatggctgcccaagatccagccatcccatcaacaatccagacaacaggaaggagcaaagaagaatagacaacatttctacttacattccactggccaaattacatggctacatataactgcaagggagactgggatataataatctattctagatgaccagagaatatttagtagttctaatactgaggaagaagggaagaacagattttgggagacaactagttgtctctgccatgaggttagctcagactgagagcagcataaatggttcatggaaataagaatgagtaatgcatcctcacgggactgtccacaggggatgaacaagaccattccagagagccagggtgcaggcacaaatggagtagggagggggtgcagaagaaacagactgatctctggagctgatccctgggcagagacatcaagactccatggagaggccacttccctgcctattttatgtcgctcaaatgtagggactggttcttgactgcttgacttccctagaaactcccttatcccccaactcaccttccccagatcaccttccccctagttcatctgtaccccactcacctgccctcaggtcacctgccccacaactcacctgttctccatctaatcttcctcccagctcccctgtcccccaaatcacctgcccccaatttgcttgtcctccagctcaccggttccccagctcatcttccttccagttcccctgtcccccagctcacctgcctgccctcagttcacctgtcccccagttcatcttcctcctagctcccctgtcccctagctcacctgtgccccagctcccctgtcccccagttcccctgtcccccagctcacctccccctcagctctcctgtcccccagctcatctgcccccagtttacctgtcccctagctcacctcccccccagtttacctgtcccccagctcacctccccccagtttgcctgtcccccagctcaactccccccaagttcccctgtccctcagctcatctgcccccagtttacctgtccccctcaactcacctatcttccctgtccctccagggctggctcctcatggaccccgttggcctccagctcggcaacaagaacctgtggagctgtcttgtgagg

SEQ ID NO: 12987 - DNA, 282 bp, Homo sapiens
gtgtgactttatcctggaggcagtgggatgctgatagcaagttcagacaggcatgaggccagaccagagctgagttttcaagataactccagccagaggagtctgcactatggaaacaacctgtcaatccagctcaaggcacacatagcccagacacccatgagaccctctccgtggggaccctagagcacctatcatgaacgaggagaccaaggctggctcctcatggaccccgttggcctccagctcggcaacaagaacctgtggagctgtcttgtgagg

SEQ ID NO: 12988 - DNA, 2656 bp, Homo sapiens
ctgacttccttctgcgtctgcacaggccctgggcaccagcagacaggctatgctttcacccacctcagcctgcaggagtttcttgctgccctgcacctgatggccagccccaaggtgaacaaagacacacttacccagtatgttaccctccattcccgctgggtacagcggaccaaagctagactgggcctctcagaccacctccccaccttcctggcgggcctggcatcctgcacctgccgccccttccttagccacctggcgcagggcaatgaggactgtgtgggtgccaagcaggctgctgtagtgcaggtgttgaagaagttggccacccgcaagctcacagggccaaaggttgtagagctgtgtcactgtgtggatgagacacaggagcctgagctggccagtctcaccgcacaaagcctcccctatcaactgcccttccacaatttcccactgacctgcaccgacctggccaccctgaccaacatcctagagcacagggaggcccccatccacctggattttgatggctgtcccctggagccccactgccctgaggctctggtaggctgtgggcagatagagaatctcagctttaagagcaggaagtgtggggatgcctttgcagaagccctctccaggagcttgccgacaatggggaggctgcagatgctggggttagcaggaagtaaaatcactgcccgaggcatcagccacctggtgaaagctttgcctctctgtccacagctgaaagaagtcagttttcgggacaaccagctcagtgaccaggtggtgctgaacattgtggaggttctccctcacctaccacggctccggaagcttgacctgagcagcaacagcatctgcgtgtcaaccctactctgcttggcaagggtggcagtcacgtgtcctaccgtcaggatgcttcaggccagggaggcggacctcatcttccttctttccccgcccacagagacaactgcagagctacaaagagctccagacctgcaggaaagtgacggccagaggaaaggggctcagagcagaagcttgacgctcaggctgcagaagtgtcagctccaggtccacgatgcggaggccctcatagccctgctccaggaaggccctcacctggaggaagtggacctctcagggaaccagctggaagatgaaggctgtcggctgatggcagaggctgcatcccagctgcacatcgccaggaagctggacctcagtaacaacgggctttctgtggccggggtgcattgtgtgctgagggccgtgagtgcgtgctggaccctggcagagctgcacatcagcctgcagcacaaaactgtgatcttcatgtttgcccaggagccagaggagcagaaggggccccaggagagggctgcatttcttgacagcctcatgctccagatgccctctgagctgcctctgagctcccgaaggatgaggctgacacattgtggcctccaagaaaagcacctagagcagctctgcaaggctctgggaggaagctgccacctcggtcacctccacctcgacttctcaggcaatgctctgggggatgaaggtgcagcccggctggctcagctgctcccagggctgggagctctgcagtccttgaacctcagtgagaacggtttgtccctggatgccgtgttgggtttggttcggtgcttctccactctgcagtggctcttccgcttggacatcagctttgaaagccaacacatcctcctgagaggggacaagacaagcagcctcagtgagtgtcctctggagcccccaagcctcacccgcctctgtgccactctgaaggactgcccgggacccctggaactgcaattgtcctgtgagttcctgagtgaccagagcctggagactctactggactgcttacctcaactccctcagctgagcctgctgcagctgagccagacgggactgtccccgaaaagccccttcctgctggccaacaccttaagcctgtgtccacgggttaaaaaggtggatctcaggtccctgcaccatgcaactttgcacttcagatccaacgaggaggaggaaggcgtgtgctgtgggttcacaggctgcagcctcagccaggagcacgtagagtcactctgctggttgctgagcaagtgtaaagacctcagccaggtggatctctcagcaaacctgctgggcgacagcggactcagatgccttctggaatgtctgccgcaggtgcccatctccggtttgcttgatctgagtcacaacagcatttctcaggaaagtgccctgtacctgctggagacactgccctcctgcccacgtgtccgggaggcctcagtgaacctgggctctgagcagagcttccggattcacttctccagagaggaccaggctgggaagacactcaggctaagtgagtgcagcttccggccagagcacgtgtccaggctggccaccggcttgagcaagtccctgcagctgacggagctcacgctgacccagtgctgcctgggccagaagcagctggccatcctcctgagcttggtggggcgacccgcagggctgttcagcctcagagactccacaaggcacacagagaaactgtccttccccacactggaggcctgtgctttgggatttaagaaaaaaa

SEQ ID NO: 12989 - DNA, 560 bp, Homo sapiens
gtgcagagcgcggaggagccgcgagcgctgagggagtctgcactatggaaacaacctgtcaatccagctcaaggcacacatagcccagacacccatgagaccctctccgtggggaccctagagcacctatcatgaacgaggagaccaaggctggctcctcatggaccccgttggcctccagctcggcaacaagaacctgtggagctgtcttgtgaggctgctcaccaaagacccagaatggctgaacgccaagatgaagttcttcctccccaacacggacctggattccaggaacgagaccttggaccctgaacagagagtcatcctgcaactcaacaagctgcatgtccagggttcggacacctggcagtctttcattcattgtgtgtgcatgcagctggaggtgcctctggacctggaggtgctgctgctgagtacttttggctatgatgatggtaagggcaggtgtgagagacgcaaagcagccgggccagtacctgcgtcatggggagccgggaggagcccagggacccacctaagtcagagagagggtgtagccc

SEQ ID NO: 12990 - DNA, 4121 bp, Homo sapiens
cagaagtgtcagctccaggtccacgatgcggaggccctcatagccctgctccaggaaggccctcacctggaggaagtggacctctcagggaaccagctggaagatgaaggctgtcggctgatggcagaggctgcatcccagctgcacatcgccaggaagctggacctcagtaacaacgggctttctgtggccggggtgcattgtgtgctgagggccgtgagtgcgtgctggaccctggcagagctgcacatcagcctgcagcacaaaactgtgatcttcatgtttgcccaggagccagaggagcagaaggggccccaggagagggctgcatttcttgacagcctcatgctccagatgccctctgagctgcctctgagctcccgaaggatgaggctgacacattgtggcctccaagaaaagcacctagagcagctctgcaaggctctgggaggaagctgccacctcggtcacctccacctcgacttctcaggcaatgctctgggggatgaaggtgcagcccggctggctcagctgctcccagggctgggagctctgcagtccttgaacctcagtgagaacggtttgtccctggatgccgtgttgggtttggttcggtgcttctccactctgcagtggctcttccgcttggacatcagctttgaaagccaacacatcctcctgagaggggacaagacaagcagggatatgtgggccactggatctttgccagacttcccagctgcagccaagttcttagggttccgtcagcgctgcatccccaggagcctctgcctcagtgagtgtcctctggagcccccaagcctcacccgcctctgtgccactctgaaggactgcccgggacccctggaactgcaattgtcctgtgagttcctgagtgaccagagcctggagactctactggactgcttacctcaactccctcagctgagcctgctgcagctgagccagacgggactgtccccgaaaagccccttcctgctggccaacaccttaagcctgtgtccacgggttaaaaaggtggatctcaggtccctgcaccatgcaactttgcacttcagatccaacgaggaggaggaaggcgtgtgctgtggcaggttcacaggctgcagcctcagccaggagcacgtagagtcactctgctggttgctgagcaagtgtaaagacctcagccaggtggatctctcagcaaacctgctgggcgacagcggactcagatgccttctggaatgtctgccgcaggtgcccatctccggtttgcttgatctgagtcacaacagcatttctcaggaaagtgccctgtacctgctggagacactgccctcctgcccacgtgtccgggaggcctcagtgaacctgggctctgagcagagcttccggattcacttctccagagaggaccaggctgggaagacactcaggctaagtgagtgcagcttccggccagagcacgtgtccaggctggccaccggcttgagcaagtccctgcagctgacggagctcacgctgacccagtgctgcctgggccagaagcagctggccatcctcctgagcttggtggggcgacccgcagggctgttcagcctcagggtgcaggagccgtgggcggacagagccagggttctctccctgttagaagtctgcgcccaggcctcaggcagtgtcactgaaatcagcatctccgagacccagcagcagctctgtgtccagctggaatttcctcgccaggaagagaatccagaagctgtggcactcaggttggctcactgtgaccttggagcccaccacagccttcttgtcgggcagctgatggagacatgtgccaggctgcagcagctcagcttgtctcaggttaacctctgtgaggacgatgatgccagttccctgctgctgcagagcctcctgctgtccctctctgagctgaagacatttcgcattcagagctcccaagacccagggcggctcctgcctgacctgttgccctttgacccccaccaggctgacctccagctgtgtgagcaccgagggcctcgcccacctggcatctggtctgggccactgccaccacttggaggagctggacttgtctaacaatcaatttgatgaggagggcaccaaggcgctgatgagggcccttgaggggaaatggatgctaaagaggctggacctcagtcaccttctgctgaacagctccaccttggccttgcttactcacagactaagccagatgacctgcctgcagagcctcagactgaacaggaacagtatcggtgatgtcggttgctgccacctttctgaggctctcagggctgccaccagcctagaggagctggacttgagccacaaccagattggagacgctggtgtccagcacttagctaccatcctgcctgggctgccagagctcaggaagatagacctctcagggaatagcatcagctcagccgggggagtgcagttggcagagtctctcgttctttgcaggcgcctggaggagttgatgcttggctgcaatgccctgggggatcccacagccctggggctggctcaggagctgccccagcacctgagggtcctacacctaccattcagccatctgggcccaggtggggccctgagcctggcccaggccctggatggatccccccatttggaagagatcagcttggcggaaaacaacctggctggaggggtcctgcgtttctgtatggagctcccgctgctcagacagatagacctggtttcctgtaagattgacaaccagactgccaagctcctcacctccagcttcacgagctgccctgccctggaagtaatcttgctgtcctggaatctcctcggggatgaggcagctgccgagctggcccaggtgctgccgcagatgggccggctgaagagagtggacctggagaagaatcagatcacagctttgggggcctggctcctggctgaaggactggcccaggggtctagcatccaagtcatccgcctctggaataaccccattccctgcgacatggcccagcacctgaagagccaggagcccaggctggactttgccttctttgacaaccagccccaggccccttggggtacttgatggccccctcaagacctttggaatccagccaagtgatgcacccaaatgatccacctttcgcccactgggataattgactcaggaaagaagagcctcggcagggcgctctgcactccacccaggaggaaggatacgtgtgtcctgctgcagtcctcagggagaacttttttgggaaccaggagctgggtctggacaaaggagtaccctgcattacgtgggatatgtgtgatcaattggggacatgcgacacacaatgagggtgtcatgacaatgcatgacacgtacggttatatgtggcagtgtgaccccttgacatgtggcgttacatgaaagtcagtgtggcacgtgttctgtggcatgggtgctggcatcccaagtagcaggatacatgattgttggtctatatatgacacatgacaaatgtccatgtcacaggactcatggctggccagatgacctcaggctggcccaagatctaatttattaatttttaaagcaaatacatatttatagattgtgtgtatggagcagctaagtcaggaaaagtcttccgcccgagctgggaggggagagtgtccatgcactgaccagtccaggggctcaagggccagggctctggaacaagccagggactcagccattaagtcccctcctgcctcaatcctcagcctacccatctataaacttgatgactcctcccttacttacatactagcttccaaggacaggtggaggtagggccagcctggcgggagtggagaagcccagtctgtcctatgtaagggacaaagccaggtctaatggtactgggtagggggcactgccaagacaataagctaggctactgggtccagctactactttggtgggattcaggtgagtctccatgcacttcacatgttacccagtgttcttgttacttccaaggagaaccaagaatggctctgtcacactcgaagccaggcttgatcaataaacacaatggtattccacgtctagcgtg

SEQ ID NO: 12991 - DNA, 20112 bp, Homo sapiens
tctggggggtgggaaagcggctccttcccgcctctgttcagtggggcatgcagcactgtgtttttgtccctgggcaggctgacacattgtggcctccaagaaaagcacctagagcagctctgcaaggctctgggaggaagctgccacctcggtcacctccacctcgagtgagtggtttgtgtgttggaaggtgggtgggtggggccaattacagtgagttagtgttggtgtttgggtttggtttttaagatttagatcaactgttctttccctgctgaagtcagaaaccccttggagaatctggtgaaagttgtgactcttcctcccaagatacagatcccccatgtctgacacgctcggaggctcacccctggtccctcagaggtccacgaacctcagaataagaacctgggggagaccccagctgcccgtgccagatctgctgagatctggcctggcagcccagggctgtgtccagtttcaggaagttgagtaactggaatgcagggaccatgctgccagcaacccactccccacctgctaatgttctcccctcccttctccccacccccagcttctcaggcaatgctctgggggatgaaggtgcagcccggctggctcagctgctcccagggctgggagctctgcagtccttgaagtgagtagcccgctaggcagagcctctgaggctggggcagggggggagcattctctgtcccatccccctctttcctggggttattgtaaagattaaatcggaaaatgcatgaaaattgcccctaatacaatgtaagttctcggtgaaggctagctaatagatgattcttactcagagagtctgtgactcaataatcccacttctgattcaaggtttcacttctggaacctgtctccgcatctctgaacaggcttctgaggccaccctggggagggcaggtgtgggtgcgaagtatgactaacggctggcagttgttattctggccctggggtgccgggaggggctggggctgttagctggggtatggtcagggtagacagggagggtttgtaccagagaggacactcaagcagggtgcccagggctgccaaggatccctgagtacctggcagagagtgtgtaggaggaatccccaaagtttgcctgcaatggaccagagttcttgatccctaaatgcccttggtgcttttggctcacaaagcaccccctcctcccaggcacttctgggccaaagccagaggagcccaggggagaggtcacaggtcctatattccaggctgtctctgtgaacacgctttgctgtgtgattctgggcaagttacatcccctctccgagtccctggttcccagtcggtaaatacataaattgcaggcgtggcctctgttggtggctacgatctctgaaatgagtgctggggcctaaggaccccctgctcacaccctgtttttgtgcaatgctgggaaggaagggagttgccttggttcctgttcagggcctgcacctgggaaggaaggaaggtctaaccattgcaggcaaattacatgaagactggaggttttagtatgtcctcatgtgaccttcttattagtgtggactcgtgacctggtgctgtgagggtccacactcgccctaccagtgtccccgtgggaggggagtgtagcattaaatagtaaatagaaaacaataacaagttgacaggagaccctgaaagaaaggagacactttgttcctgctttctgcacaagagaccctgcattttcattttgtcctgggtaccacccctcccttatcaggtggagaaaaggaggcccagctccagccagaaagcactcctcagatccatcacagaccgagggacccactgggtgcccatctcagctctgtcaccaacatgtctcataaccttgggctagaccttgattctctctaggactctgtttccccatctccaccatgaggacttgcaaggggtgctctctgaccatcttgggttcagtgggttccgtcatctggaaccagggatccctcccccgccctgtgccctgaccacaaagaggatgtgtttgggtcctgagtgacctccattgtgccacccctgtgatctccagcctcagtgagaacggtttgtccctggatgccgtgttgggtttggttcggtgcttctccactctgcagtggctcttccgcttggacatcaggtgagcgtgcctctccgcccccagccctgcccctgtcccccatcccacaggtcatctgctcccacgtgggccccttgtccaccagtttcatgccaacctgtcatcctcagcaccttgggcagtaccagatctgcagagcatgtgatgggcgtccactgaatgaatgaatgatcaaatgaatgaataagtatggcctcacggatgctcaaatttctccaaattcaccattagagagttcattgactctgcctcactcgttctttggatagtccttagagatttttttttttaggattttttttttaattattatactttaagttctagggtacatgtgcacaacatacaggtttgttacatatgtatacatgtgccatgttggtatgctgcagagacttttaagaaaactgggggccaggcgcggtggctcacgcctgtaatcccagcattttgggaggccaaggtgggcggatcacgtgaggtcaggagtttgagaacagcctggccaacagggtgaaaccctgtctctgctaaaaataccaaaaaaaaaaaaaaaagtatctgggcgtggttgtgagcccttgtagtgccagccgctcaggagtcaggagaatcacttgaacccaggaggcgaaggttgcagtgagctgagatcgtgccactgcactccagcctgggcgacagagtgagactccatctcaaaaaaaaaaagaaaagaaaagaaaactgggagcttcctagttgccactggggactcagggacctgtcttaattgtgggagctgatgagaatataaaaggggaggcaccagccagccaagccaccccaggcactcagggcaccgcatccatgattttcaggggaggtctgcttccctttcccttccctaaggacccccaagaatgggaggtgccacagcagatggaccaggctcagttacttaactgctgcgagctcagagcaggtcccagagcctctccaggcctcagtttcctcatctgtaaaatggagataagaataattactggcctggcacagtggctcaagcctgtaatcccagcactttgggaggccaagacaggaggaggaggatcacctgagcctaggagtttgagaccagcctggacaacatggtgagacccccccatctctacagaaactttaaaaattagccaagcgtgatggcatgcacctacttgggaggctgaggtgggaggattgcttagactcaggagatcgaggctacagtgagttgtgatcacaccattgcactccagcctgggcaacagagcaagactctgtctcaaagaaaaaaaaatgtcaggcacaatggctcacatctgtaattccagcactttgggaggctaaggcaggaggatcgtttgagccatggagtttgagaccagcctgctcaacatggcaaaaccccatctctacaaaaaatacaaaaattagacagtcatggtggggcgttcctgtagtcccagctacttgggaggctgaggcagtaggatcagttgagcccggggaaggttgaggctgcagtgagccatgactgcaccactgcacaccagcctgggcgacagagcaagaccctttcttcgaaacaacaacaaagaagaatttcttacctcattgtttattgtgagaatcaaatgagaaatgtcgatggtgtgctttgcatgtgacttgatacatgtaattgttgcttaatctattccttgtttgctaagaaagcaggccaccccaggccctccttgccctgaccagtctgggttcttgccactgccagggaagttggtctttgaccattttcaaactgctgcttcctctctgcttccagctttgaaagccaacacatcctcctgagaggggacaagacaagcaggtgaggagggaacgctcggggtgggggagtcccctcccgctctggtccccgtctgttggaggtccccccacccccagacccatgctgaccactcagctctcagttaaaccacccaagtccggcacactaggtttaatcaccacttcagtaaccaccgccccccccataaattgtcagtaatcaactgccctgttttccccttggaaggaggcaatgcagatgggaggaagggagggatatggttgggagaggtcccagagcagggcaggtgcccgcagattgctgctgtgtgggaggagacaggagaacatttgtgcttctgcgtttcggggaattttgtagacccaccgctccatacatgtcactgccctttcacgctctgaaggcaggggccgtgggtgctctgaaaaaacattttccccgtcttcgcagtaaacaaccaatactagtttagctcttcatgatgttcccggctgccctctagtgggaccaggcctcttggcctcacttgggagcagtggcagcggacagggtgggcccatgtgcagctggctgggtggagagagtcacagctagtgtgtcaagaaaaggcactgccgtacagatgggctgtcaggagtcaggggtggctcaagcctgggtggtcttgcttcccaggataggatctctgtttctggggaacccccgggttcttgaggcccaaagaactgacgtacagggaggcagaagtcatgtgatgccaagcagtggtcagagaggctctgtcttgggtcctcctgcctgctcacctggacaggaacaagctgctggcttttctaactcaggcttcccttccctgagcctcagtttccccatctgaacaatgagggactgagctaggatctagtgactgcattgtctctgagatgccttccagccctgactttccaagtctgggagtccaatgtgggtgatctgaactttcctttctaaacgatccccctcctaggggtatatgggctgggctgggagtccgagggggtgatctgaactttcctttctaaatgatccccctcctagggatatgtgggccactggatctttgccagacttcccagctgcagccaagttcttagggttccgtcagcgctgcatccccaggagcctctggtactgtcccagcccttcttgtttgggggtaaccataatagggatgaggcgtcagagggggcagagctggcagggggctagggctggggattgggatagagggaagagagggagtttaagagaaaaggaaaagaaagaggcgtgggtgtgaggggtgctgggagttggggagctctggcccctgacgggcagctcagctggcccatgccccgcattctccttggagagaagattccacatttctgtgaagcaaacagagcagctcagccactccctgcctggggtctccatctgctctgggggacacccactttccagaaagaaaggggttggcctgtctccccactaatacactccccatctgcaagctctgccatgagaggctgtgagaccctgacttggccccacctctctctaggcctccagggaagtggaggcaagtgaggccctgggaaggacatttcaatttcactgttagccccagggcaatggggagccacgggggtaacagggagaggcctggtcagatgtgcagtgttaaaatgtgagacacttgtggggcagagagggattaaagggaggcaagagtggaagcccagagggtgttaaatggtcaaggtgagtgaggatggtggcctgggctctggagggggcggtggggaggacttggagagtcactgacaagggcagctgggaactcagggtcctgcactgtcactgtcagggcaggaggattgggggctgcaggggagactcgagagggaagcgagtgccccacaggggaaggggcctgtggcctcccacttagagtgagggatgctgggagaaggatagagcccctggggctagccagggaccctgggctttctctgattccctgccctgcccattgcccctttgcagcctcagtgagtgtcctctggagcccccaagcctcacccgcctctgtgccactctgaaggactgcccgggacccctggaactgcagtaagtaacgaggacacagccccagagggcaccatgtggggatctgcccagtgacctgggagggggcttcttggttagaagacaggtgagtctttctcgatttcttcccaccagccctgccccatgagagtcccctggcctttggtagaaacttggctgtctctcggcagcccccagccttaggcagcgcatgtctcccactgggagatgctgtgctggactggggaagccttcacctgcaccatccactcaactcagggcacctgggagccctgtccacctccaaccccacccctggagcctcaccagggcacccacttgaacctgcctgcatggctggagcgtagcacttctgaaagcccttcctcaaggcacccccactctccttggggttaccacctcactcgccccagaacatctgggtctgtaaccagagactggacctggaatcaggactcttggctcaaaagggatttaactccccgggcctcagcttcttcatctgcacagtggatggtcagcctttccttttattgtcattgtggtgattctattatagtaattaccttaaaataaagaaatccaagacaaaacctgcctcacctaaacaacctcttctctcatcaaatccatgttgtcatgtgtccacaggactgtctactccttgcctatttgcatattcagtttctacctgtttgcagtcataaactagtttcatgcactgtgttttcatagcatctgtgttttccattttgcttcagtcttttttcttgctttctagcccccatctcaaatgcccttccagcccttccaaccagataatccggtttgaccccctggagtgtggccttcccatgtccttctccaggttcaaacatataaccacaaaaccattatcagacctacactattttttttttctgagacagagttttgctcttgttgcccaggctggagtgcaatggcgtgatctcggcttgctgccacctctgcctcctgggttcaagcaattctcctgcctcagcctcctgagtagctgggattacaggcgcccgccatcatgcctggctaatttttgtatttttagtagaggcagggtttcaccatgttggccaggctggtctcgaactcctgacctcaagtgatccaccttcctcagcctcccaaagtgttgggattacaggcttgagccactgcacctggcccagacctaccctattaatggcaattccttaaagtcaaccaatggtcagtggtccctgattgtctcttacctgttttcacagagtatatactgatgccttttaatactaaattgccacagtacgggacgagctgcaagttactccaccacacccttctagagtctagatcaagggtgtccaatcttttggcttccctgggccacattggaagaagaaaaagaattgtcttgggccacacataaaatacactaacactagcgatagctgatgtgctaaaaaaaaaaaacaaaactccaaagaaaaatctcatagtgttttaagaaagtttacgaatttttgttaggccgtattcaaagccatcctaggctgcatgcagcaggccatgtggcttggacaacttggtctagattgaaatccaaactgcttctaggtgttgtgttttgttttgtgtagcactgcagtcagtgctacaaaaagcactcttacgtgatttgactgttaagtacctattgtataccatgcactgggccagatcctgggaacacaaggagactgggatgcgggctctgctggccaaggcaaatcatctgcagaggaagcttaatataaaaagcccactggcggcccggcacggtgactcacgcctataatcccagcactttgggaggccgaggtggctggatcatgaggtcaggagttcgagactagcctggccaacatagtgaaaccccatctctactaaaaatacaaaaattagccaggcatggtggtgcacccctgtaatcccagctactctggaggcaggcaggagacttgcttgaacccgggaggcagagattgtggtgagccaagactgcgccactgtcctccagcctgggcaacagagcaagactctgtctcaaataaataaataaataaataaataaataaataaataaagcccactggcagcactgggcggtctgagcacaggtgggagtttcaggtccccctccattacctgtggttggggaaagtgcaatagtgaatatgaaagcactttgtcaactgtagagtactgtgatcacttgcaggattattgctataaatagtcatcaaggtactcaatgctgaagtccagtgattccccggggttccaccggggaagccagggaagatagattgtggggctccatcccccctccctgaattcaagcactgcaggtctactttgcctgtgtacacatgggcataccatgtgggatgtggtaaagagtaaagattccattgctttaaaaaaaaaaaaaaggagggtgtaatcacctcctttgccaaccagagcccatggtgtatttgggggtctggtgggacaccatacgggatgtgtttctggaaagaccaccctcaataaaggccccagtcctgactgtgcctcaggggcccatgcccagtccctggggcagaaagggtagagttgggcctccagcctgggccctggcagaggctccaacatgaggctgctcctcccgccctaccctgccccccagctcactgagccagttgatgtagggcccctgtactccatgcctcccctccaaacagccagaggagaaagcagcagagatgggccaggcccttggaggccccggagaggggagagggcagcctgcagaggatgaaggaacagaaagagaggaagggggaggtggagaaggcagaaggagaacatagtagaggtctgcgggggttgggaagtggctccaggccccccaggaaggggctgtaggtaaaccccagggaactcagtgtcttgagttgtcctggtcctccatctagagcagagacagcaaggcaggtatctggagtttctcctaaatgcactgggttctgacgaattatctgaacaatgatgagctggttggtctggtgttaatgggcaactagagacccaagccagtccctgtctccttcgctgacctgttgtatgctgaatttccactgtcatatccactcctctgggttaaggcagcattgttttcttttcttttttatttttttgagatagagactcgctctgtcacccaggctggagtgcagtggtacgatcttggctcactgcaacctctgcctcccaggttcaagtgattcccatgcctcagcctcctgagtagctattactacaggtgtgcaccaccacgcctggctaatttttttttcgttttttgtagtagaggtggaatttcaccatgttgcccaggctggtcccagactcctgacctcagatgatccacccacctcagcctcccaaagtgctgcgattacaggcatgagccaccatgcccagctgcattcttttcttaacaaacatgttttgcggaacactaaccttcatggcccttaaaaattaattctgctagtccatttagtttggggaaaagtctgctgtagctccttggaaattcataatgcacagcagcctatcgcagcctcagagaagccctgcagcaaacaaaaccatttaatttggcttaaccccgtatttcccaaacttaaaagaccttcctcttcttccagcctcacggataacccatggacccagtgctgggagggaatgtttcaggtgaccctggttaggtcccatctccagaaggctctggctatgaggccgtgctccctgctttcctggaaggtttcccccacctcatccacctgctttgtttcacagattgtcctgtgagttcctgagtgaccagagcctggagactctactggactgcttacctcaactccctcagctgagcctgctgcagtaagacgagagtttttcctatttcccggttccttgtgctcgtgtttctaaggctcctccatggcaaagctgtacctgccctctaacccctcaaccccccgcctttaccccctccaaccccctctacccgctccattctttccttaggttgttttatcattttacctggcacaactggggactccaatctgcttccagctccaccctaatactttgtcaacctcagggggcgtcgtttgcctcctctgcgtctcagtttcctcatctgacaaatgggattaatattccccgcccattcccccagagttgggactcaaataagttattctaaaatcaccttaagaaatggaagatctgtgacaaatgagctgtccaacttctccccacccacggagggtcacccactcgtagaaaggggctgtacagatgtaggtcctgtacttatcacatgctgctttttaaaggtcaccgtcaaactcgcaaaaagggaatttaagcagaattcccccaaagtattaaaactattttctaatttcagctcagactggttagaattttaaaagtatttaggccatgtgtggtggctcatgcctgtaatcccggcactttgggaggccgaggcgggcagatcacctgaggtcaggagtttgagaccagcctggccaatgtggtgaaaccccgtctctactaaaaatacaaaaattagcccggtgtggtggtgggtgcctgtaattccagctacttgggaggctgaggcaggagaattgcttgaacttgggaggcggaggttgcagtgagccgagatcgcgccattgcactccagcttgggcgacaagagtgaaactccatctcagaaaaaaaaaaagaaaaaaagaaaaagaaagaattttagaaggatttactttaaacagtcttctagtggtgggaggcggggtgggaagcagctgcagctaagatgaaaaaatacagcaggaaagtaaatcataatgttaataacatcggtgcaaaggctggggctctctgggatgtctaagatggctcgcatcacctccaggatctcgcttatgcttgggttttatctgggagggagggaggagacgtgacaacattccaggggcaagtacagcccagctcacagcaccccatggcaccctgtaatagtcccaccctgcccggagataatgagtcagaaaggactcctttggacataaaaggtggcaggttaaaattgaacaggttggaaacctcagaccggagaggaacttctctttgcctaaatcacacagcttcacccctgactcctcgtccgcctttggagtggcgtggccagcctgaccccttgccagggtttaaactttgtagtactcaacgtgtagtgcttgtggccctactgtgggccaggcattgtgtgacgacacagcagaaaaagttgaccatgtccttatcttcttggagctcctcttacaatagtgggagctgaaaaataagtaaagtaaaatcaaataagatgaacttagccagtgataagagaattttctcgggatgtggtgaagagtggctggagaggtgatttagatgtggcagaagccatcagggaacatctctgaggagggatgctgagctgggacctaaaggaagagagagagctcgccttgtgaagagcagggaactgcattccaggcagagggaacggcatgtgtgaggccctgaggcatgattaagcttggtgggctccaggaacagcgcggaaccgagacagccagagcacagtgactggcagggacagtcctaggagaggaggaagagagagatgggctcgggttgggttgcatggggcctggcacccatggggagagtttagacttttgttcctgggaacatgaaagggagaggaataatttgggttttctttctttcttttttgtgggggagggtctcgctctgtcacacaggctggagtgcaatggcgcaatctcggctcactgcaacctccgcctcccaggttcaggcaattcttgtgcctcagcctcccaagtagctgggattacaggcgtgcaccatcatgcccagctaatttttgtatttttagtagagacagagtttaaccatgttgaccatgctggtctcaaactcccgacctcaagtgatccgcccgcctcggcttcccaaagtactgagattacaggcaggagccactgcacccgttcctcatttgggttttcaaaagttcagactgagtgctgggtagagaatggattgggagatacgagtggaaatgagagtgggaagagatgtgtgcagcagggtgaagggtgctgggggctgatcactgctggggtgggatagaagttggtagactcagggtggatcttgagagtggaatttacagacaagctgatagggggattactggatgaggcaaatggaggtgctgaggctgcctctgagggcagagtggacccatctcactttctctaaggcagtggtttccaactgggggtgattttcacccttgggagtcatttggaaatatctggagatatttttggtggtcatgactgcgggtgaggggtgctgctactggcatcgaatgaatagagatctgggatgctgctgaacatcctatagggcacaggagagcccacaacaaagaattattggacctcacatctcaatagtgctaaggtttaaaaactgtgtctgaagggcctgaagcttcccactctctgtgagcaaggactcgcctgtgaaatctgtgcttgcaggtaaaaacaatagtaataataacagcaagcacaggtcccatgcccggcagtgcacctgcatgatgtaattaaatcctcatatacctcgagagtcatacatgacgagtcttgatttccagataaggaaactgaagctcagagaggtgaagtcacttctccaaggtcacacagccaataagcagaactgggactcaaatccaaatctgcctgtccctcagccctatttgtgcctcttgatcccctgcctgcttccctattgccttgctgagctgctagccctccccaccctccctttccttaccctccaggctagccaggttccttgtccactcatcttgccggatctaccccctttccttttcaggctgagccagacgggactgtccccgaaaagccccttcctgctggccaacaccttaagcctgtgtccacgggttaaaaaggtggatctcaggtgggcattcccctgggacagccaggactcgtcctgaagggttgtgcctggagtctggtgggtatgagggggtaggatgaagacagtaggacccaactagaggctgggcttccggaggaggggtgctggccccgtgggggcatcctgaggctgtggccacagctgtctgacccaggtcctgtctgatccaggtccctgcaccatgcaactttgcacttcagatccaacgaggaggaggaaggcgtgtgctgtgggtaagcccccttgaaccatgcctaggcagctagttgatgttggggaccagtagatctgcctcctgggtggccagagcagtatgcagactgcctaccacaaaacattcccctggaacaaccctgcagagggacttgtttcacccagcatgaagaaacacaggtccgggtgggatctactgtgggggtgggagcagtggattctggacacttccagagggtccaagcttgagtggagacccacctggagcccagaggctgtgccctgggctagccaggccggagggggtctcagtggccaaacgccccatcccctgcttgtcccctttacctccgtccagcaggttcacaggctgcagcctcagccaggagcacgtagagtcactctgctggttgctgagcaagtgtaaagacctcagccaggtggagtaagttgagggaggaggaggaaggagaggagcatggacgcatgcctgaggggcactgaagggggtatgagggtccgtgtgtgcacatacactcatgtgtgcctgcctacacctctcaggaccagctgtcagggatgcctgggtcacatacccaaagcttccctgaatcaattttctctctcccgcccccactctcgccatggtggagctagttccatggtgtgccctctgacttgggcagccctcagcctcaagtatgtgcaagctctgctggcagatgggggctaaaacgcaggattcattgttggcccagcaggtggttaaaagtaccggatgactctgcctgaggagggacgcagagccagccagggtggggtcttgcagtctcttgtattgttgagatgtggtatctgcgtggcctgtcttggatattcaaatagtcagcccctgcatgggtggaataataatagctaacagctactgagcactttctccactgttctaagtgcttgacatgttctttttatgtttcccatatccctggatactagtattgttctcattttacagatgagggaactgagacacagagggtgtaagaacttgcccaaggtcacacagctagtaaaatgcagagtccctgctcagacgcattgggaatccagcctaggaccagtgggaaatagagagagcagtccgccaaaaatgccacacaattttcatttctgttgtgatgtggcagagaagaaaaatgtgactgataaaatcatggatttcttttttttttaagacctggggtctcactctgttgcccaggctggagtgcagtggtgcaatgataggtcactgcagcctccaactcctgggctcaagcgatcctcccacctcagcctctggagtagctgggactacaggcacacaccaacatgcctggctaatagtttagttttgtaagagatgaagtctcaccatgttccccaggttggtctcaaacttctgagctcaggtgatcctcagcctcccaggttgctgagattacaggcatgagccgctgtgcttggaatgtattttaaacagatatgaataagaaatatgtctttgagttttttgtttttcattatagagggaaatttttcttttctttctttctttttttttagatggagtctttctctgctgcccaggctggaatgcagtggcgcaatttcggctcactgcaacttccgcctcccaggttcaagcaattctcctgcctcagcctcccaaggagctgagattacaggcatgagccaccatgcctggctaattttggtatttttagtagagacggggtttcaccatgttggccaggctggtcttgaactcctgacctcaggcgatccgcctgcctcgccctcccaaagtgctgggattacagccttgagccaccgcacccagccaatttttcttattttaaagactattttattaagtggcttcataagacagaccaatttttaaatgacgtttctcaggaaaagatgaaattaacaaacatcaaaaatgtcacagacctaggaggaaaatcagatgttccgggacacactggttatattatttctgaaactgtagttaaaactagctgggcgtggtggctcacgcctgtaatcccagcactttgggaggccaaagcgggtggatcacctgaggtcaggagtttgagaccagcctgatcaacatggtgaaaacccgtctctactaaaaatacaaaaataattagccaggcatagtggcacatgcctgtaatcccagctacttgggaggctgaggcaggagaatctcttgaacctgggagacagaggtcgcagtgagccaagatcgtgccattgcactccagcctgggcaacagagcaagactccatctcaaaataaataaataaataaaaccacagaatgctgcaatgaagggaagtaagaaacttcaggtgaggtttccaatattgatattgcattcccagattaaaagaagaaatctatgggtttaatgcatcctgcaaacatttttttttcctgaatttcctctcattcaaaaactgtggatcccaaatgatgccggccaagggcgtggtgaaggcaaattggtttttctttaacccttgaaagcctgctggaggcacctgagctatgagtggtcacccgatatggaagaggaccaagaggatgggtttactgtggtgctggggaggggatagtagcagagaacgtaggagttgctggtcattctagtggtgatggaagggatggtgatggtggtactgggcttggtggtgtagaattgtggtgataatgaaagtggtggtggtgatggtggtaatactggtggtggtgacattggtggtggtggtgatggtggtgatactggtgatggtggtgatggtggtggcgctggtgaccctgacatggggtccagtagcagtgacagtggatgcaggctcctggtgactgaggagcatctcaggctgaggaggcacctctgatccccgccactgctccttaccccctacagtctctcagcaaacctgctgggcgacagcggactcagatgccttctggaatgtctgccgcaggtgcccatctccggtttgcttgagtaagtggaaagcagcataaaggacagatagcaaggaggaaggctcccctaggccaaaagcatgatgggggctccttctgagggcatcccccagagcaccagaggacaaggactgtggagggcaaggggcaattcttcccttgccttcactcccctggccttgggtcctttcctctgtccctcacacccaccatgggcagatcctccaccaaacacccaagagaggctgtgattcgtggcagggtgacacacccctacagccaaactgacctggggacagggaagcaacattccatccccaaccagctgatgcgggattgcagctgcctggctcctggtccatcccgtccctgaaattcttctgacccaatctgtggaacataaatgtggagatgtccctgtggcaggcaaggggccttaggaagtcatccacatggttgccccatctctcccgtgacctgctggagtgacagccagctccaggacaccacttgttgctaggcaactgagcttcgtgctcgggagtccttgacccatgcggggctagagctgccagcctggccttgccagtgcccagaccccagaccacaggggcagcgggcagggtgagtgcagcgctcaaggactcagggtctggtgccagttctgcctgtgtggggatggtatccttctgggcctcagtgtgtccatctggagaatagatgcttagacatggaggcttctcttcttggaaatgacagctggaagggagatggagggggctgggcagggctccaaggaggtcctgccctcactcccattctcatctccatttcccttctagtctgagtcacaacagcatttctcaggaaagtgccctgtacctgctggagacactgccctcctgcccacgtgtccgggaggcctcagtgaagtaaggggatgttggtccccgaaaagcccctttctgctggccaacaggtgcccctggctgatgatgggagaagcaaggcacccacactttgtggccttccatctgggtggcttggagcaacctctgcctttctctgaatctcagggtttcctgggcatgggatcataatttctatcccctgatgcccgggtgccatggggaccatggaggccatggggtgggaaggccaggtattgccatgctcacagaatgagtttgggggtctcctctggttctgaggcctccatcctcccttgtccttgtgggtgcagccccgcttccctctctgtgccctgtgggtgccctaggtgcctaggaagctggcatgtctgggcaccgtgcttccccaggcccttctctctgcagcctgggctctgagcagagcttccggattcacttctccagagaggaccaggctgggaagacactcaggtaatccctgcagggtgatgggacaggggacagagaggggagaggaggctgaccctatggcggcctccatggccccctcttccctgggccctctcctcctttagagagcagcttcaagctcactgcctgggtctgttcctccagatctgcccccgatgccctggtaactccagtctcagccagggccttggcattgaacttgtgcctcttagcccaccatcctaagcccaactcagcccaacattctcttccttgccatgtcctgactacaggccttgaggcttctgagtgtcacggttaaagattttgaagccaactgaaaataaatccctgatctgccacttaccagctatgtggccctggacaagtaaaatggggataataacacaacctaccccttagggttattgtgaggattaaatgagttaataagtataaagtgccaggaaaaggtctggctcatgggagtgctgtcagcagttattgtaactgttattattattattattattattattattattatcattatcattacccctggtagccctgactcactgccacggccagttcctttacatgtcttacttcagctgtgaacagggcctccaaactgatccctgcatcttatcaggcctcctcccctccattcactccacagcccccagagggatcttcacaacacacatctgacagtgcccctctgctactctgtgcccctcagtggctccccattaaccccagggtgaagttcaaagtccctagcatcttctccctcacagtctgatccaactgtcaccttccaccatgttccttcccacctcccccacaccacacacacgccctacacaccaacccatataccacagatacaccaagcacacccaaacacaccacacagcacgcagcacacacaacacacgcacaccacacagcacacacaacacacaaacgcaccacataccatacacataccacatacacacacatacaccacacacaccacacaatacacacaccccacaaaaacaaaccccccacatacatacctggcacattacaaatacagcacacacaccacataatacctacaaataccacatacacaacacacacacacacacacagttcagccataaccttcactatttgctcctagatcaagccctgcctgaagattctctgcctctgctcacaccgcactcagctcaacattctcttccttgccttttctgagataaaattctcccaatcctttaacacccagctcaaacatcagcccctcctggaagtatcccagcagccctgcctcatcagagtgaactgccccgaggttcactgggccctttcacttggctgggcccgtctgctggccacccagggctgagatgcctggacagcagagccccacggagaatcccaggcacacctccctccccagggagctcagccagtgctggtccgggagagtaaggcagtggttaagagcttggggtctgcagtcagactgacctggatggaaaccagattctgcccttctttcttatctgctgtgtgtccttgggttagtcagtttccccacctctaattggtgctatgagaattaaaggagaccctgcgggtaaggcaggaagtcccatgcacccagaggctggcacagtgcctgacctagagtcagcctccctaaataacttactcctaatactttcttacagggggtgtgggaggttcctccccaaagagacaggaagctcccagagcaggagctgcatatttggcctctcaggccctgctccaggcctttgccctcagaggtgggatgctcccccaataggccctcagggaggctgagatgaagctgagcagcagtgcccacaggcctcacccaggctctgccctggctttctgccctcaggctaagtgagtgcagcttccggccagagcacgtgtccaggctggccaccggcttgagcaagtccctgcagct

SEQ ID NO: 12992 - DNA, 1019 bp, Homo sapiens
tctggggggtgggaaagcggctccttcccgcctctgttcagtggggcatgcagcactgtgtttttgtccctgggcaggctgacacattgtggcctccaagaaaagcacctagagcagctctgcaaggctctgggaggaagctgccacctcggtcacctccacctcgacttctcaggcaatgctctgggggatgaaggtgcagcccggctggctcagctgctcccagggctgggagctctgcagtccttgaacctcagtgagaacggtttgtccctggatgccgtgttgggtttggttcggtgcttctccactctgcagtggctcttccgcttggacatcagctttgaaagccaacacatcctcctgagaggggacaagacaagcagcctcagtgagtgtcctctggagcccccaagcctcacccgcctctgtgccactctgaaggactgcccgggacccctggaactgcaattgtcctgtgagttcctgagtgaccagagcctggagactctactggactgcttacctcaactccctcagctgagcctgctgcagctgagccagacgggactgtccccgaaaagccccttcctgctggccaacaccttaagcctgtgtccacgggttaaaaaggtggatctcaggtccctgcaccatgcaactttgcacttcagatccaacgaggaggaggaaggcgtgtgctgtgggttcacaggctgcagcctcagccaggagcacgtagagtcactctgctggttgctgagcaagtgtaaagacctcagccaggtggatctgagtcacaacagcatttctcaggaaagtgccctgtacctgctggagacactgccctcctgcccacgtgtccgggaggcctcagtgaacctgggctctgagcagagcttccggattcacttctccagagaggaccaggctgggaagacactcaggctaagtgagtgcagcttccggccagagcacgtgtccaggctggccaccggcttgagcaagtccctgcagct

SEQ ID NO: 12993 - DNA, 3552 bp, Homo sapiens
ccatctgaactgtttccaggccctgttcctttttgaattccgccagctcaacttgatcacgaggttcctgacaccgtccgagctcctttttgatctgtacctgagccctgaatcggaccacgacactgtcttccagtacctggagaagaacgctgaccaagtcctgctgatctttgatgggctagatgaggccctccagcctatgggtcctgatggcccaggcccagtcctcacccttttctcccatctctgcaatgggaccctcctgcctggctgccgggtgatggctacctcccgtccagggaagctgcctgcctgcctgcctgcagaggcagccatggtccacatgttgggctttgatgggccacgggtggaagaatatgtgaatcacttcttcagcgcccagccatcgcgggagggggccctggtggagttacagacaaatggacgtctccgaagcctgtgtgcggtgcccgcactgtgccaagtcgcctgtctctgcctccaccatctgcttcctgaccacgccccaggccagtctgtggccctcctgcccaacatgactcagctctatatgcagatggtgctcgccctcagcccccctgggcacttgcccacctcgtccctactggacctgggggaggtggccctgaggggcctggagacagggaaggttatcttctatgcaaaagatattgctccacccttgatagcttttggggccactcacagcctgctgacttccttctgcgtctgcacaggccctgggcaccagcagacaggctatgctttcacccacctcagcctgcaggagtttcttgctgccctgcacctgatggccagccccaaggtgaacaaagacacacttacccagtatgttaccctccattcccgctgggtacagcggaccaaagctagactgggcctctcagaccacctccccaccttcctggcgggcctggcatcctgcacctgccgccccttccttagccacctggcgcagggcaatgaggactgtgtgggtgccaagcaggctgctgtagtgcaggtgttgaagaagttggccacccgcaagctcacagggccaaaggttgtagagctgtgtcactgtgtggatgagacacaggagcctgagctggccagtctcaccgcacaaagcctcccctatcaactgcccttccacaatttcccactgacctgcaccgacctggccaccctgaccaacatcctagagcacagggaggcccccatccacctggattttgatggctgtcccctggagccccactgccctgaggctctggtaggctgtgggcagatagagaatctcagctttaagagcaggaagtgtggggatgcctttgcagaagccctctccaggagcttgccgacaatggggaggctgcagatgctggggttagcaggaagtaaaatcactgcccgaggcatcagccacctggtgaaagctttgcctctctgtccacagctgaaagaagtcagttttcgggacaaccagctcagtgaccaggtggtgctgaacattgtggaggttctccctcacctaccacggctccggaagcttgacctgagcagcaacagcatctgcgtgtcaaccctactctgcttggcaagggtggcagtcacgtgtcctaccgtcaggatgcttcaggccagggaggcggacctcatcttccttctttccccgcccacagagacaactgcagagctacaaagagctccagacctgcaggaaagtgacggccagaggaaaggggctcagagcagaagcttgacgctcaggctgcagaagtgtcagctccaggtccacgatgcggaggccctcatagccctgctccaggaaggccctcacctggaggaagtggacctctcagggaaccagctggaagatgaaggctgtcggctgatggcagaggctgcatcccagctgcacatcgccaggaagctggacctcagtaacaacgggctttctgtggccggggtgcattgtgtgctgagggccgtgagtgcgtgctggaccctggcagagctgcacatcagcctgcagcacaaaactgtgatcttcatgtttgcccaggagccagaggagcagaaggggccccaggagagggctgcatttcttgacagcctcatgctccagatgccctctgagctgcctctgagctcccgaaggatgaggctgacacattgtggcctccaagaaaagcacctagagcagctctgcaaggctctgggaggaagctgccacctcggtcacctccacctcgacttctcaggcaatgctctgggggatgaaggtgcagcccggctggctcagctgctcccagggctgggagctctgcagtccttgaacctcagtgagaacggtttgtccctggatgccgtgttgggtttggttcggtgcttctccactctgcagtggctcttccgcttggacatcagctttgaaagccaacacatcctcctgagaggggacaagacaagcagggatatgtgggccactggatctttgccagacttcccagctgcagccaagttcttagggttccgtcagcgctgcatccccaggagcctctgcctcagtgagtgtcctctggagcccccaagcctcacccgcctctgtgccactctgaaggactgcccgggacccctggaactgcaattgtcctgtgagttcctgagtgaccagagcctggagactctactggactgcttacctcaactccctcagctgagcctgctgcagctgagccagacgggactgtccccgaaaagccccttcctgctggccaacaccttaagcctgtgtccacgggttaaaaaggtggatctcaggtccctgcaccatgcaactttgcacttcagatccaacgaggaggaggaaggcgtgtgctgtgggttcacaggctgcagcctcagccaggagcacgtagagtcactctgctggttgctgagcaagtgtaaagacctcagccaggtggatctctcagcaaacctgctgggcgacagcggactcagatgccttctggaatgtctgccgcaggtgcccatctccggtttgcttgatctgagtcacaacagcatttctcaggaaagtgccctgtacctgctggagacactgccctcctgcccacgtgtccgggaggcctcagtgaacctgggctctgagcagagcttccggattcacttctccagagaggaccaggctgggaagacactcaggctaagtgagtgcagcttccggccagagcacgtgtccaggctggccaccggcttgagcaagtccctgcagctgacggagctcacgctgacccagtgctgcctgggccagaagcagctggccatcctcctgagcttggtggggcgacccgcagggctgttcagcctcagagactccacaaggcacacagagaaactgtccttccccacactggaggcctgtgctttgggatttaagaaaaaaagaaagaaagaaagaaagaaggtttcagaggatactgaactgaggacaaaaataaactgaaacgaagttct

SEQ ID NO: 12994 - DNA, 21424 bp, Homo sapiens
tgtgttggtccctctttgtccgtctgtctaggtgccagatacatcccagtccctcctctcctgcaagcctcattctctgcctctgtgtctggggggtgggaaagcggctccttcccgcctctgttcagtggggcatgcagcactgtgtttttgtccctgggcaggctgacacattgtggcctccaagaaaagcacctagagcagctctgcaaggctctgggaggaagctgccacctcggtcacctccacctcgagtgagtggtttgtgtgttggaaggtgggtgggtggggccaattacagtgagttagtgttggtgtttgggtttggtttttaagatttagatcaactgttctttccctgctgaagtcagaaaccccttggagaatctggtgaaagttgtgactcttcctcccaagatacagatcccccatgtctgacacgctcggaggctcacccctggtccctcagaggtccacgaacctcagaataagaacctgggggagaccccagctgcccgtgccagatctgctgagatctggcctggcagcccagggctgtgtccagtttcaggaagttgagtaactggaatgcagggaccatgctgccagcaacccactccccacctgctaatgttctcccctcccttctccccacccccagcttctcaggcaatgctctgggggatgaaggtgcagcccggctggctcagctgctcccagggctgggagctctgcagtccttgaagtgagtagcccgctaggcagagcctctgaggctggggcagggggggagcattctctgtcccatccccctctttcctggggttattgtaaagattaaatcggaaaatgcatgaaaattgcccctaatacaatgtaagttctcggtgaaggctagctaatagatgattcttactcagagagtctgtgactcaataatcccacttctgattcaaggtttcacttctggaacctgtctccgcatctctgaacaggcttctgaggccaccctggggagggcaggtgtgggtgcgaagtatgactaacggctggcagttgttattctggccctggggtgccgggaggggctggggctgttagctggggtatggtcagggtagacagggagggtttgtaccagagaggacactcaagcagggtgcccagggctgccaaggatccctgagtacctggcagagagtgtgtaggaggaatccccaaagtttgcctgcaatggaccagagttcttgatccctaaatgcccttggtgcttttggctcacaaagcaccccctcctcccaggcacttctgggccaaagccagaggagcccaggggagaggtcacaggtcctatattccaggctgtctctgtgaacacgctttgctgtgtgattctgggcaagttacatcccctctccgagtccctggttcccagtcggtaaatacataaattgcaggcgtggcctctgttggtggctacgatctctgaaatgagtgctggggcctaaggaccccctgctcacaccctgtttttgtgcaatgctgggaaggaagggagttgccttggttcctgttcagggcctgcacctgggaaggaaggaaggtctaaccattgcaggcaaattacatgaagactggaggttttagtatgtcctcatgtgaccttcttattagtgtggactcgtgacctggtgctgtgagggtccacactcgccctaccagtgtccccgtgggaggggagtgtagcattaaatagtaaatagaaaacaataacaagttgacaggagaccctgaaagaaaggagacactttgttcctgctttctgcacaagagaccctgcattttcattttgtcctgggtaccacccctcccttatcaggtggagaaaaggaggcccagctccagccagaaagcactcctcagatccatcacagaccgagggacccactgggtgcccatctcagctctgtcaccaacatgtctcataaccttgggctagaccttgattctctctaggactctgtttccccatctccaccatgaggacttgcaaggggtgctctctgaccatcttgggttcagtgggttccgtcatctggaaccagggatccctcccccgccctgtgccctgaccacaaagaggatgtgtttgggtcctgagtgacctccattgtgccacccctgtgatctccagcctcagtgagaacggtttgtccctggatgccgtgttgggtttggttcggtgcttctccactctgcagtggctcttccgcttggacatcaggtgagcgtgcctctccgcccccagccctgcccctgtcccccatcccacaggtcatctgctcccacgtgggccccttgtccaccagtttcatgccaacctgtcatcctcagcaccttgggcagtaccagatctgcagagcatgtgatgggcgtccactgaatgaatgaatgatcaaatgaatgaataagtatggcctcacggatgctcaaatttctccaaattcaccattagagagttcattgactctgcctcactcgttctttggatagtccttagagatttttttttttaggattttttttttaattattatactttaagttctagggtacatgtgcacaacatacaggtttgttacatatgtatacatgtgccatgttggtatgctgcagagacttttaagaaaactgggggccaggcgcggtggctcacgcctgtaatcccagcattttgggaggccaaggtgggcggatcacgtgaggtcaggagtttgagaacagcctggccaacagggtgaaaccctgtctctgctaaaaataccaaaaaaaaaaaaaaaagtatctgggcgtggttgtgagcccttgtagtgccagccgctcaggagtcaggagaatcacttgaacccaggaggcgaaggttgcagtgagctgagatcgtgccactgcactccagcctgggcgacagagtgagactccatctcaaaaaaaaaaagaaaagaaaagaaaactgggagcttcctagttgccactggggactcagggacctgtcttaattgtgggagctgatgagaatataaaaggggaggcaccagccagccaagccaccccaggcactcagggcaccgcatccatgattttcaggggaggtctgcttccctttcccttccctaaggacccccaagaatgggaggtgccacagcagatggaccaggctcagttacttaactgctgcgagctcagagcaggtcccagagcctctccaggcctcagtttcctcatctgtaaaatggagataagaataattactggcctggcacagtggctcaagcctgtaatcccagcactttgggaggccaagacaggaggaggaggatcacctgagcctaggagtttgagaccagcctggacaacatggtgagacccccccatctctacagaaactttaaaaattagccaagcgtgatggcatgcacctacttgggaggctgaggtgggaggattgcttagactcaggagatcgaggctacagtgagttgtgatcacaccattgcactccagcctgggcaacagagcaagactctgtctcaaagaaaaaaaaatgtcaggcacaatggctcacatctgtaattccagcactttgggaggctaaggcaggaggatcgtttgagccatggagtttgagaccagcctgctcaacatggcaaaaccccatctctacaaaaaatacaaaaattagacagtcatggtggggcgttcctgtagtcccagctacttgggaggctgaggcagtaggatcagttgagcccggggaaggttgaggctgcagtgagccatgactgcaccactgcacaccagcctgggcgacagagcaagaccctttcttcgaaacaacaacaaagaagaatttcttacctcattgtttattgtgagaatcaaatgagaaatgtcgatggtgtgctttgcatgtgacttgatacatgtaattgttgcttaatctattccttgtttgctaagaaagcaggccaccccaggccctccttgccctgaccagtctgggttcttgccactgccagggaagttggtctttgaccattttcaaactgctgcttcctctctgcttccagctttgaaagccaacacatcctcctgagaggggacaagacaagcaggtgaggagggaacgctcggggtgggggagtcccctcccgctctggtccccgtctgttggaggtccccccacccccagacccatgctgaccactcagctctcagttaaaccacccaagtccggcacactaggtttaatcaccacttcagtaaccaccgccccccccataaattgtcagtaatcaactgccctgttttccccttggaaggaggcaatgcagatgggaggaagggagggatatggttgggagaggtcccagagcagggcaggtgcccgcagattgctgctgtgtgggaggagacaggagaacatttgtgcttctgcgtttcggggaattttgtagacccaccgctccatacatgtcactgccctttcacgctctgaaggcaggggccgtgggtgctctgaaaaaacattttccccgtcttcgcagtaaacaaccaatactagtttagctcttcatgatgttcccggctgccctctagtgggaccaggcctcttggcctcacttgggagcagtggcagcggacagggtgggcccatgtgcagctggctgggtggagagagtcacagctagtgtgtcaagaaaaggcactgccgtacagatgggctgtcaggagtcaggggtggctcaagcctgggtggtcttgcttcccaggataggatctctgtttctggggaacccccgggttcttgaggcccaaagaactgacgtacagggaggcagaagtcatgtgatgccaagcagtggtcagagaggctctgtcttgggtcctcctgcctgctcacctggacaggaacaagctgctggcttttctaactcaggcttcccttccctgagcctcagtttccccatctgaacaatgagggactgagctaggatctagtgactgcattgtctctgagatgccttccagccctgactttccaagtctgggagtccaatgtgggtgatctgaactttcctttctaaacgatccccctcctaggggtatatgggctgggctgggagtccgagggggtgatctgaactttcctttctaaatgatccccctcctagggatatgtgggccactggatctttgccagacttcccagctgcagccaagttcttagggttccgtcagcgctgcatccccaggagcctctggtactgtcccagcccttcttgtttgggggtaaccataatagggatgaggcgtcagagggggcagagctggcagggggctagggctggggattgggatagagggaagagagggagtttaagagaaaaggaaaagaaagaggcgtgggtgtgaggggtgctgggagttggggagctctggcccctgacgggcagctcagctggcccatgccccgcattctccttggagagaagattccacatttctgtgaagcaaacagagcagctcagccactccctgcctggggtctccatctgctctgggggacacccactttccagaaagaaaggggttggcctgtctccccactaatacactccccatctgcaagctctgccatgagaggctgtgagaccctgacttggccccacctctctctaggcctccagggaagtggaggcaagtgaggccctgggaaggacatttcaatttcactgttagccccagggcaatggggagccacgggggtaacagggagaggcctggtcagatgtgcagtgttaaaatgtgagacacttgtggggcagagagggattaaagggaggcaagagtggaagcccagagggtgttaaatggtcaaggtgagtgaggatggtggcctgggctctggagggggcggtggggaggacttggagagtcactgacaagggcagctgggaactcagggtcctgcactgtcactgtcagggcaggaggattgggggctgcaggggagactcgagagggaagcgagtgccccacaggggaaggggcctgtggcctcccacttagagtgagggatgctgggagaaggatagagcccctggggctagccagggaccctgggctttctctgattccctgccctgcccattgcccctttgcagcctcagtgagtgtcctctggagcccccaagcctcacccgcctctgtgccactctgaaggactgcccgggacccctggaactgcagtaagtaacgaggacacagccccagagggcaccatgtggggatctgcccagtgacctgggagggggcttcttggttagaagacaggtgagtctttctcgatttcttcccaccagccctgccccatgagagtcccctggcctttggtagaaacttggctgtctctcggcagcccccagccttaggcagcgcatgtctcccactgggagatgctgtgctggactggggaagccttcacctgcaccatccactcaactcagggcacctgggagccctgtccacctccaaccccacccctggagcctcaccagggcacccacttgaacctgcctgcatggctggagcgtagcacttctgaaagcccttcctcaaggcacccccactctccttggggttaccacctcactcgccccagaacatctgggtctgtaaccagagactggacctggaatcaggactcttggctcaaaagggatttaactccccgggcctcagcttcttcatctgcacagtggatggtcagcctttccttttattgtcattgtggtgattctattatagtaattaccttaaaataaagaaatccaagacaaaacctgcctcacctaaacaacctcttctctcatcaaatccatgttgtcatgtgtccacaggactgtctactccttgcctatttgcatattcagtttctacctgtttgcagtcataaactagtttcatgcactgtgttttcatagcatctgtgttttccattttgcttcagtcttttttcttgctttctagcccccatctcaaatgcccttccagcccttccaaccagataatccggtttgaccccctggagtgtggccttcccatgtccttctccaggttcaaacatataaccacaaaaccattatcagacctacactattttttttttctgagacagagttttgctcttgttgcccaggctggagtgcaatggcgtgatctcggcttgctgccacctctgcctcctgggttcaagcaattctcctgcctcagcctcctgagtagctgggattacaggcgcccgccatcatgcctggctaatttttgtatttttagtagaggcagggtttcaccatgttggccaggctggtctcgaactcctgacctcaagtgatccaccttcctcagcctcccaaagtgttgggattacaggcttgagccactgcacctggcccagacctaccctattaatggcaattccttaaagtcaaccaatggtcagtggtccctgattgtctcttacctgttttcacagagtatatactgatgccttttaatactaaattgccacagtacgggacgagctgcaagttactccaccacacccttctagagtctagatcaagggtgtccaatcttttggcttccctgggccacattggaagaagaaaaagaattgtcttgggccacacataaaatacactaacactagcgatagctgatgtgctaaaaaaaaaaaacaaaactccaaagaaaaatctcatagtgttttaagaaagtttacgaatttttgttaggccgtattcaaagccatcctaggctgcatgcagcaggccatgtggcttggacaacttggtctagattgaaatccaaactgcttctaggtgttgtgttttgttttgtgtagcactgcagtcagtgctacaaaaagcactcttacgtgatttgactgttaagtacctattgtataccatgcactgggccagatcctgggaacacaaggagactgggatgcgggctctgctggccaaggcaaatcatctgcagaggaagcttaatataaaaagcccactggcggcccggcacggtgactcacgcctataatcccagcactttgggaggccgaggtggctggatcatgaggtcaggagttcgagactagcctggccaacatagtgaaaccccatctctactaaaaatacaaaaattagccaggcatggtggtgcacccctgtaatcccagctactctggaggcaggcaggagacttgcttgaacccgggaggcagagattgtggtgagccaagactgcgccactgtcctccagcctgggcaacagagcaagactctgtctcaaataaataaataaataaataaataaataaataaataaagcccactggcagcactgggcggtctgagcacaggtgggagtttcaggtccccctccattacctgtggttggggaaagtgcaatagtgaatatgaaagcactttgtcaactgtagagtactgtgatcacttgcaggattattgctataaatagtcatcaaggtactcaatgctgaagtccagtgattccccggggttccaccggggaagccagggaagatagattgtggggctccatcccccctccctgaattcaagcactgcaggtctactttgcctgtgtacacatgggcataccatgtgggatgtggtaaagagtaaagattccattgctttaaaaaaaaaaaaaaggagggtgtaatcacctcctttgccaaccagagcccatggtgtatttgggggtctggtgggacaccatacgggatgtgtttctggaaagaccaccctcaataaaggccccagtcctgactgtgcctcaggggcccatgcccagtccctggggcagaaagggtagagttgggcctccagcctgggccctggcagaggctccaacatgaggctgctcctcccgccctaccctgccccccagctcactgagccagttgatgtagggcccctgtactccatgcctcccctccaaacagccagaggagaaagcagcagagatgggccaggcccttggaggccccggagaggggagagggcagcctgcagaggatgaaggaacagaaagagaggaagggggaggtggagaaggcagaaggagaacatagtagaggtctgcgggggttgggaagtggctccaggccccccaggaaggggctgtaggtaaaccccagggaactcagtgtcttgagttgtcctggtcctccatctagagcagagacagcaaggcaggtatctggagtttctcctaaatgcactgggttctgacgaattatctgaacaatgatgagctggttggtctggtgttaatgggcaactagagacccaagccagtccctgtctccttcgctgacctgttgtatgctgaatttccactgtcatatccactcctctgggttaaggcagcattgttttcttttcttttttatttttttgagatagagactcgctctgtcacccaggctggagtgcagtggtacgatcttggctcactgcaacctctgcctcccaggttcaagtgattcccatgcctcagcctcctgagtagctattactacaggtgtgcaccaccacgcctggctaatttttttttcgttttttgtagtagaggtggaatttcaccatgttgcccaggctggtcccagactcctgacctcagatgatccacccacctcagcctcccaaagtgctgcgattacaggcatgagccaccatgcccagctgcattcttttcttaacaaacatgttttgcggaacactaaccttcatggcccttaaaaattaattctgctagtccatttagtttggggaaaagtctgctgtagctccttggaaattcataatgcacagcagcctatcgcagcctcagagaagccctgcagcaaacaaaaccatttaatttggcttaaccccgtatttcccaaacttaaaagaccttcctcttcttccagcctcacggataacccatggacccagtgctgggagggaatgtttcaggtgaccctggttaggtcccatctccagaaggctctggctatgaggccgtgctccctgctttcctggaaggtttcccccacctcatccacctgctttgtttcacagattgtcctgtgagttcctgagtgaccagagcctggagactctactggactgcttacctcaactccctcagctgagcctgctgcagtaagacgagagtttttcctatttcccggttccttgtgctcgtgtttctaaggctcctccatggcaaagctgtacctgccctctaacccctcaaccccccgcctttaccccctccaaccccctctacccgctccattctttccttaggttgttttatcattttacctggcacaactggggactccaatctgcttccagctccaccctaatactttgtcaacctcagggggcgtcgtttgcctcctctgcgtctcagtttcctcatctgacaaatgggattaatattccccgcccattcccccagagttgggactcaaataagttattctaaaatcaccttaagaaatggaagatctgtgacaaatgagctgtccaacttctccccacccacggagggtcacccactcgtagaaaggggctgtacagatgtaggtcctgtacttatcacatgctgctttttaaaggtcaccgtcaaactcgcaaaaagggaatttaagcagaattcccccaaagtattaaaactattttctaatttcagctcagactggttagaattttaaaagtatttaggccatgtgtggtggctcatgcctgtaatcccggcactttgggaggccgaggcgggcagatcacctgaggtcaggagtttgagaccagcctggccaatgtggtgaaaccccgtctctactaaaaatacaaaaattagcccggtgtggtggtgggtgcctgtaattccagctacttgggaggctgaggcaggagaattgcttgaacttgggaggcggaggttgcagtgagccgagatcgcgccattgcactccagcttgggcgacaagagtgaaactccatctcagaaaaaaaaaaagaaaaaaagaaaaagaaagaattttagaaggatttactttaaacagtcttctagtggtgggaggcggggtgggaagcagctgcagctaagatgaaaaaatacagcaggaaagtaaatcataatgttaataacatcggtgcaaaggctggggctctctgggatgtctaagatggctcgcatcacctccaggatctcgcttatgcttgggttttatctgggagggagggaggagacgtgacaacattccaggggcaagtacagcccagctcacagcaccccatggcaccctgtaatagtcccaccctgcccggagataatgagtcagaaaggactcctttggacataaaaggtggcaggttaaaattgaacaggttggaaacctcagaccggagaggaacttctctttgcctaaatcacacagcttcacccctgactcctcgtccgcctttggagtggcgtggccagcctgaccccttgccagggtttaaactttgtagtactcaacgtgtagtgcttgtggccctactgtgggccaggcattgtgtgacgacacagcagaaaaagttgaccatgtccttatcttcttggagctcctcttacaatagtgggagctgaaaaataagtaaagtaaaatcaaataagatgaacttagccagtgataagagaattttctcgggatgtggtgaagagtggctggagaggtgatttagatgtggcagaagccatcagggaacatctctgaggagggatgctgagctgggacctaaaggaagagagagagctcgccttgtgaagagcagggaactgcattccaggcagagggaacggcatgtgtgaggccctgaggcatgattaagcttggtgggctccaggaacagcgcggaaccgagacagccagagcacagtgactggcagggacagtcctaggagaggaggaagagagagatgggctcgggttgggttgcatggggcctggcacccatggggagagtttagacttttgttcctgggaacatgaaagggagaggaataatttgggttttctttctttcttttttgtgggggagggtctcgctctgtcacacaggctggagtgcaatggcgcaatctcggctcactgcaacctccgcctcccaggttcaggcaattcttgtgcctcagcctcccaagtagctgggattacaggcgtgcaccatcatgcccagctaatttttgtatttttagtagagacagagtttaaccatgttgaccatgctggtctcaaactcccgacctcaagtgatccgcccgcctcggcttcccaaagtactgagattacaggcaggagccactgcacccgttcctcatttgggttttcaaaagttcagactgagtgctgggtagagaatggattgggagatacgagtggaaatgagagtgggaagagatgtgtgcagcagggtgaagggtgctgggggctgatcactgctggggtgggatagaagttggtagactcagggtggatcttgagagtggaatttacagacaagctgatagggggattactggatgaggcaaatggaggtgctgaggctgcctctgagggcagagtggacccatctcactttctctaaggcagtggtttccaactgggggtgattttcacccttgggagtcatttggaaatatctggagatatttttggtggtcatgactgcgggtgaggggtgctgctactggcatcgaatgaatagagatctgggatgctgctgaacatcctatagggcacaggagagcccacaacaaagaattattggacctcacatctcaatagtgctaaggtttaaaaactgtgtctgaagggcctgaagcttcccactctctgtgagcaaggactcgcctgtgaaatctgtgcttgcaggtaaaaacaatagtaataataacagcaagcacaggtcccatgcccggcagtgcacctgcatgatgtaattaaatcctcatatacctcgagagtcatacatgacgagtcttgatttccagataaggaaactgaagctcagagaggtgaagtcacttctccaaggtcacacagccaataagcagaactgggactcaaatccaaatctgcctgtccctcagccctatttgtgcctcttgatcccctgcctgcttccctattgccttgctgagctgctagccctccccaccctccctttccttaccctccaggctagccaggttccttgtccactcatcttgccggatctaccccctttccttttcaggctgagccagacgggactgtccccgaaaagccccttcctgctggccaacaccttaagcctgtgtccacgggttaaaaaggtggatctcaggtgggcattcccctgggacagccaggactcgtcctgaagggttgtgcctggagtctggtgggtatgagggggtaggatgaagacagtaggacccaactagaggctgggcttccggaggaggggtgctggccccgtgggggcatcctgaggctgtggccacagctgtctgacccaggtcctgtctgatccaggtccctgcaccatgcaactttgcacttcagatccaacgaggaggaggaaggcgtgtgctgtgggtaagcccccttgaaccatgcctaggcagctagttgatgttggggaccagtagatctgcctcctgggtggccagagcagtatgcagactgcctaccacaaaacattcccctggaacaaccctgcagagggacttgtttcacccagcatgaagaaacacaggtccgggtgggatctactgtgggggtgggagcagtggattctggacacttccagagggtccaagcttgagtggagacccacctggagcccagaggctgtgccctgggctagccaggccggagggggtctcagtggccaaacgccccatcccctgcttgtcccctttacctccgtccagcaggttcacaggctgcagcctcagccaggagcacgtagagtcactctgctggttgctgagcaagtgtaaagacctcagccaggtggagtaagttgagggaggaggaggaaggagaggagcatggacgcatgcctgaggggcactgaagggggtatgagggtccgtgtgtgcacatacactcatgtgtgcctgcctacacctctcaggaccagctgtcagggatgcctgggtcacatacccaaagcttccctgaatcaattttctctctcccgcccccactctcgccatggtggagctagttccatggtgtgccctctgacttgggcagccctcagcctcaagtatgtgcaagctctgctggcagatgggggctaaaacgcaggattcattgttggcccagcaggtggttaaaagtaccggatgactctgcctgaggagggacgcagagccagccagggtggggtcttgcagtctcttgtattgttgagatgtggtatctgcgtggcctgtcttggatattcaaatagtcagcccctgcatgggtggaataataatagctaacagctactgagcactttctccactgttctaagtgcttgacatgttctttttatgtttcccatatccctggatactagtattgttctcattttacagatgagggaactgagacacagagggtgtaagaacttgcccaaggtcacacagctagtaaaatgcagagtccctgctcagacgcattgggaatccagcctaggaccagtgggaaatagagagagcagtccgccaaaaatgccacacaattttcatttctgttgtgatgtggcagagaagaaaaatgtgactgataaaatcatggatttcttttttttttaagacctggggtctcactctgttgcccaggctggagtgcagtggtgcaatgataggtcactgcagcctccaactcctgggctcaagcgatcctcccacctcagcctctggagtagctgggactacaggcacacaccaacatgcctggctaatagtttagttttgtaagagatgaagtctcaccatgttccccaggttggtctcaaacttctgagctcaggtgatcctcagcctcccaggttgctgagattacaggcatgagccgctgtgcttggaatgtattttaaacagatatgaataagaaatatgtctttgagttttttgtttttcattatagagggaaatttttcttttctttctttctttttttttagatggagtctttctctgctgcccaggctggaatgcagtggcgcaatttcggctcactgcaacttccgcctcccaggttcaagcaattctcctgcctcagcctcccaaggagctgagattacaggcatgagccaccatgcctggctaattttggtatttttagtagagacggggtttcaccatgttggccaggctggtcttgaactcctgacctcaggcgatccgcctgcctcgccctcccaaagtgctgggattacagccttgagccaccgcacccagccaatttttcttattttaaagactattttattaagtggcttcataagacagaccaatttttaaatgacgtttctcaggaaaagatgaaattaacaaacatcaaaaatgtcacagacctaggaggaaaatcagatgttccgggacacactggttatattatttctgaaactgtagttaaaactagctgggcgtggtggctcacgcctgtaatcccagcactttgggaggccaaagcgggtggatcacctgaggtcaggagtttgagaccagcctgatcaacatggtgaaaacccgtctctactaaaaatacaaaaataattagccaggcatagtggcacatgcctgtaatcccagctacttgggaggctgaggcaggagaatctcttgaacctgggagacagaggtcgcagtgagccaagatcgtgccattgcactccagcctgggcaacagagcaagactccatctcaaaataaataaataaataaaaccacagaatgctgcaatgaagggaagtaagaaacttcaggtgaggtttccaatattgatattgcattcccagattaaaagaagaaatctatgggtttaatgcatcctgcaaacatttttttttcctgaatttcctctcattcaaaaactgtggatcccaaatgatgccggccaagggcgtggtgaaggcaaattggtttttctttaacccttgaaagcctgctggaggcacctgagctatgagtggtcacccgatatggaagaggaccaagaggatgggtttactgtggtgctggggaggggatagtagcagagaacgtaggagttgctggtcattctagtggtgatggaagggatggtgatggtggtactgggcttggtggtgtagaattgtggtgataatgaaagtggtggtggtgatggtggtaatactggtggtggtgacattggtggtggtggtgatggtggtgatactggtgatggtggtgatggtggtggcgctggtgaccctgacatggggtccagtagcagtgacagtggatgcaggctcctggtgactgaggagcatctcaggctgaggaggcacctctgatccccgccactgctccttaccccctacagtctctcagcaaacctgctgggcgacagcggactcagatgccttctggaatgtctgccgcaggtgcccatctccggtttgcttgagtaagtggaaagcagcataaaggacagatagcaaggaggaaggctcccctaggccaaaagcatgatgggggctccttctgagggcatcccccagagcaccagaggacaaggactgtggagggcaaggggcaattcttcccttgccttcactcccctggccttgggtcctttcctctgtccctcacacccaccatgggcagatcctccaccaaacacccaagagaggctgtgattcgtggcagggtgacacacccctacagccaaactgacctggggacagggaagcaacattccatccccaaccagctgatgcgggattgcagctgcctggctcctggtccatcccgtccctgaaattcttctgacccaatctgtggaacataaatgtggagatgtccctgtggcaggcaaggggccttaggaagtcatccacatggttgccccatctctcccgtgacctgctggagtgacagccagctccaggacaccacttgttgctaggcaactgagcttcgtgctcgggagtccttgacccatgcggggctagagctgccagcctggccttgccagtgcccagaccccagaccacaggggcagcgggcagggtgagtgcagcgctcaaggactcagggtctggtgccagttctgcctgtgtggggatggtatccttctgggcctcagtgtgtccatctggagaatagatgcttagacatggaggcttctcttcttggaaatgacagctggaagggagatggagggggctgggcagggctccaaggaggtcctgccctcactcccattctcatctccatttcccttctagtctgagtcacaacagcatttctcaggaaagtgccctgtacctgctggagacactgccctcctgcccacgtgtccgggaggcctcagtgaagtaaggggatgttggtccccgaaaagcccctttctgctggccaacaggtgcccctggctgatgatgggagaagcaaggcacccacactttgtggccttccatctgggtggcttggagcaacctctgcctttctctgaatctcagggtttcctgggcatgggatcataatttctatcccctgatgcccgggtgccatggggaccatggaggccatggggtgggaaggccaggtattgccatgctcacagaatgagtttgggggtctcctctggttctgaggcctccatcctcccttgtccttgtgggtgcagccccgcttccctctctgtgccctgtgggtgccctaggtgcctaggaagctggcatgtctgggcaccgtgcttccccaggcccttctctctgcagcctgggctctgagcagagcttccggattcacttctccagagaggaccaggctgggaagacactcaggtaatccctgcagggtgatgggacaggggacagagaggggagaggaggctgaccctatggcggcctccatggccccctcttccctgggccctctcctcctttagagagcagcttcaagctcactgcctgggtctgttcctccagatctgcccccgatgccctggtaactccagtctcagccagggccttggcattgaacttgtgcctcttagcccaccatcctaagcccaactcagcccaacattctcttccttgccatgtcctgactacaggccttgaggcttctgagtgtcacggttaaagattttgaagccaactgaaaataaatccctgatctgccacttaccagctatgtggccctggacaagtaaaatggggataataacacaacctaccccttagggttattgtgaggattaaatgagttaataagtataaagtgccaggaaaaggtctggctcatgggagtgctgtcagcagttattgtaactgttattattattattattattattattattattatcattatcattacccctggtagccctgactcactgccacggccagttcctttacatgtcttacttcagctgtgaacagggcctccaaactgatccctgcatcttatcaggcctcctcccctccattcactccacagcccccagagggatcttcacaacacacatctgacagtgcccctctgctactctgtgcccctcagtggctccccattaaccccagggtgaagttcaaagtccctagcatcttctccctcacagtctgatccaactgtcaccttccaccatgttccttcccacctcccccacaccacacacacgccctacacaccaacccatataccacagatacaccaagcacacccaaacacaccacacagcacgcagcacacacaacacacgcacaccacacagcacacacaacacacaaacgcaccacataccatacacataccacatacacacacatacaccacacacaccacacaatacacacaccccacaaaaacaaaccccccacatacatacctggcacattacaaatacagcacacacaccacataatacctacaaataccacatacacaacacacacacacacacacagttcagccataaccttcactatttgctcctagatcaagccctgcctgaagattctctgcctctgctcacaccgcactcagctcaacattctcttccttgccttttctgagataaaattctcccaatcctttaacacccagctcaaacatcagcccctcctggaagtatcccagcagccctgcctcatcagagtgaactgccccgaggttcactgggccctttcacttggctgggcccgtctgctggccacccagggctgagatgcctggacagcagagccccacggagaatcccaggcacacctccctccccagggagctcagccagtgctggtccgggagagtaaggcagtggttaagagcttggggtctgcagtcagactgacctggatggaaaccagattctgcccttctttcttatctgctgtgtgtccttgggttagtcagtttccccacctctaattggtgctatgagaattaaaggagaccctgcgggtaaggcaggaagtcccatgcacccagaggctggcacagtgcctgacctagagtcagcctccctaaataacttactcctaatactttcttacagggggtgtgggaggttcctccccaaagagacaggaagctcccagagcaggagctgcatatttggcctctcaggccctgctccaggcctttgccctcagaggtgggatgctcccccaataggccctcagggaggctgagatgaagctgagcagcagtgcccacaggcctcacccaggctctgccctggctttctgccctcaggctaagtgagtgcagcttccggccagagcacgtgtccaggctggccaccggcttgagcaagtccctgcagctgacggagctcacgtgagtgacccacccagcccgtgaggacagcagaggggtgggggcaccctgccagagccacctcagtgactgacctctgtctccaggctgacccagtgctgcctgggccagaagcagctggccatcctcctgagcttggtggggcgacccgcagggctgttcagcctcaggtacctcctcccccgctgcctccgggaggggccatggcatgaatgggagcaggggtgggcactggagtaagaggcccccaggatcatggccccagtcatttcctgtacccacaaccctgccatctggaccctgagcaaaccctgtccatctgtcccagagactccacaaggcacacagagaaactgtccttccccacactggaggcctgtgctttgggatttaagaaaaaaagaaagaaagaaagaaagaaggtttcagaggatactgaactgaggacaaaaataaactgaaacgaagttcttgtctgtctgttcactatgatcattttaaaacactcagaaaaagaagataccgaagtagaaagaataattttttaaaactcctattcccagaacctaggtttgacagttgttcatactttttttatatttgcttctatttttatttttatttcagctgaagcggtttcaagtaagttatagacctcataatccatcactcctaaatatttcaccgtgaagctccaaaaaataaggacatttttttcagtaatcacagttccatcaggacacctaagaaactcagttagcgattccttagtgtcgggtactacctagtctaatctaaaatgtccccattgtcccccagataagacagctggcttttgggatccaggatctgtcacatctggtctgcatttgcacgggatggcgatggtcttctgactcttctaacctgcggcatcactgcccccatcccctcaccacagctttctgtttcatgtcagtgtctgttgacaaaatcagcaactgtgtgtactgcagactgtcctgctcctgactctggtggctttctcatgatgtcatggcacgtgttcctctaaccccgactttcctggaaactggacgttagatcaaaaggctccatgacattcagtttcatgtttgtgcccaaaaaacttacgtcaccgacagagctgtgcacttctcattgcagcctgtgacaaggcacctaagaactgactgttccccaaaataacctg

SEQ ID NO: 12995 - DNA, 1686 bp, Homo sapiens
tgtgttggtccctctttgtccgtctgtctaggtgccagatacatcccagtccctcctctcctgcaagcctcattctctgcctctgtgtctggggggtgggaaagcggctccttcccgcctctgttcagtggggcatgcagcactgtgtttttgtccctgggcaggctgacacattgtggcctccaagaaaagcacctagagcagctctgcaaggctctgggaggaagctgccacctcggtcacctccacctcgacctcagtgagaacggtttgtccctggatgccgtgttgggtttggttcggtgcttctccactctgcagtggctcttccgcttggacatcagctttgaaagccaacacatcctcctgagaggggacaagacaagcagggatatgtgggccactggatctttgccagacttcccagctgcagccaagttcttagggttccgtcagcgctgcatccccaggagcctctgcctcagtgagtgtcctctggagcccccaagcctcacccgcctctgtgccactctgaaggactgcccgggacccctggaactgcaattgtcctgtgagttcctgagtgaccagagcctggagactctactggactgcttacctcaactccctcagctgagcctgctgcagctgagccagacgggactgtccccgaaaagccccttcctgctggccaacaccttaagcctgtgtccacgggttaaaaaggtggatctcaggtccctgcaccatgcaactttgcacttcagatccaacgaggaggaggaaggcgtgtgctgtgggttcacaggctgcagcctcagccaggagcacgtagagtcactctgctggttgctgagcaagtgtaaagacctcagccaggtggatctctcagcaaacctgctgggcgacagcggactcagatgccttctggaatgtctgccgcaggtgcccatctccggtttgcttgatctgagtcacaacagcatttctcaggaaagtgccctgtacctgctggagacactgccctcctgcccacgtgtccgggaggcctcagtgaacctgggctctgagcagagcttccggattcacttctccagagaggaccaggctgggaagacactcaggctaagtgagtgcagcttccggccagagcacgtgtccaggctggccaccggcttgagcaagtccctgcagctgacggagctcacgctgacccagtgctgcctgggccagaagcagctggccatcctcctgagcttggtggggcgacccgcagggctgttcagcctcagataagacagctggcttttgggatccaggatctgtcacatctggtctgcatttgcacgggatggcgatggtcttctgactcttctaacctgcggcatcactgcccccatcccctcaccacagctttctgtttcatgtcagtgtctgttgacaaaatcagcaactgtgtgtactgcagactgtcctgctcctgactctggtggctttctcatgatgtcatggcacgtgttcctctaaccccgactttcctggaaactggacgttagatcaaaaggctccatgacattcagtttcatgtttgtgcccaaaaaacttacgtcaccgacagagctgtgcacttctcattgcagcctgtgacaaggcacctaagaactgactgttccccaaaataacctg

SEQ ID NO: 12996 - DNA, 6505 bp, Homo sapiens
atggaccccgttggcctccagctcggcaacaagaacctgtggagctgtcttgtgaggctgctcaccaaagacccagaatggctgaacgccaagatgaagttcttcctccccaacacggacctggattccaggaacgagaccttggaccctgaacagagagtcatcctgcaactcaacaagctgcatgtccagggttcggacacctggcagtctttcattcattgtgtgtgcatgcagctggaggtgcctctggacctggaggtgctgctgctgagtacttttggctatgatgatgggttcaccagccagctgggagctgaggggaaaagccaacctgaatctcagctccaccatggcctgaagcgcccacatcagagctgtgggtcctcaccccgccggaagcagtgcaagaagcagcagctagagttggccaagaagtacctgcagctcctgcggacctctgcccagcagcgctacaggagccaaatccctgggtcagggcagccccacgccttccaccaggtctatgtccctccaatcctgcgccgggccacagcatccttagacactccggagggggccattatgggggacgtcaaggtggaagatggtgctgacgtgagcatctcggacctcttcaacaccagggttaacaagggcccgagggtgaccgtgcttttggggaaggctggcatgggcaagaccacgctggcccaccggctctgccagaagtgggcagagggccatctgaactgtttccaggccctgttcctttttgaattccgccagctcaacttgatcacgaggttcctgacaccgtccgagctcctttttgatctgtacctgagccctgaatcggaccacgacactgtcttccagtacctggagaagaacgctgaccaagtcctgctgatctttgatgggctagatgaggccctccagcctatgggtcctgatggcccaggcccagtcctcacccttttctcccatctctgcaatgggaccctcctgcctggctgccgggtgatggctacctcccgtccagggaagctgcctgcctgcctgcctgcagaggcagccatggtccacatgttgggctttgatgggccacgggtggaagaatatgtgaatcacttcttcagcgcccagccatcgcgggagggggccctggtggagttacagacaaatggacgtctccgaagcctgtgtgcggtgcccgcactgtgccaagtcgcctgtctctgcctccaccatctgcttcctgaccacgccccaggccagtctgtggccctcctgcccaacatgactcagctctatatgcagatggtgctcgccctcagcccccctgggcacttgcccacctcgtccctactggacctgggggaggtggccctgaggggcctggagacagggaaggttatcttctatgcaaaagatattgctccacccttgatagcttttggggccactcacagcctgctgacttccttctgcgtctgcacaggccctgggcaccagcagacaggctatgctttcacccacctcagcctgcaggagtttcttgctgccctgcacctgatggccagccccaaggtgaacaaagacacacttacccagtatgttaccctccattcccgctgggtacagcggaccaaagctagactgggcctctcagaccacctccccaccttcctggcgggcctggcatcctgcacctgccgccccttccttagccacctggcgcagggcaatgaggactgtgtgggtgccaagcaggctgctgtagtgcaggtgttgaagaagttggccacccgcaagctcacagggccaaaggttgtagagctgtgtcactgtgtggatgagacacaggagcctgagctggccagtctcaccgcacaaagcctcccctatcaactgcccttccacaatttcccactgacctgcaccgacctggccaccctgaccaacatcctagagcacagggaggcccccatccacctggattttgatggctgtcccctggagccccactgccctgaggctctggtaggctgtgggcagatagagaatctcagctttaagagcaggaagtgtggggatgcctttgcagaagccctctccaggagcttgccgacaatggggaggctgcagatgctggggttagcaggaagtaaaatcactgcccgaggcatcagccacctggtgaaagctttgcctctctgtccacagctgaaagaagtcagttttcgggacaaccagctcagtgaccaggtggtgctgaacattgtggaggttctccctcacctaccacggctccggaagcttgacctgagcagcaacagcatctgcgtgtcaaccctactctgcttggcaagggtggcagtcacgtgtcctaccgtcaggatgcttcaggccagggaggcggacctcatcttccttctttccccgcccacagagacaactgcagagctacaaagagctccagacctgcaggaaagtgacggccagaggaaaggggctcagagcagaagcttgacgctcaggctgcagaagtgtcagctccaggtccacgatgcggaggccctcatagccctgctccaggaaggccctcacctggaggaagtggacctctcagggaaccagctggaagatgaaggctgtcggctgatggcagaggctgcatcccagctgcacatcgccaggaagctggacctcagtaacaacgggctttctgtggccggggtgcattgtgtgctgagggccgtgagtgcgtgctggaccctggcagagctgcacatcagcctgcagcacaaaactgtgatcttcatgtttgcccaggagccagaggagcagaaggggccccaggagagggctgcatttcttgacagcctcatgctccagatgccctctgagctgcctctgagctcccgaaggatgaggctgacacattgtggcctccaagaaaagcacctagagcagctctgcaaggctctgggaggaagctgccacctcggtcacctccacctcgacttctcaggcaatgctctgggggatgaaggtgcagcccggctggctcagctgctcccagggctgggagctctgcagtccttgaacctcagtgagaacggtttgtccctggatgccgtgttgggtttggttcggtgcttctccactctgcagtggctcttccgcttggacatcagctttgaaagccaacacatcctcctgagaggggacaagacaagcagggatatgtgggccactggatctttgccagacttcccagctgcagccaagttcttagggttccgtcagcgctgcatccccaggagcctctgcctcagtgagtgtcctctggagcccccaagcctcacccgcctctgtgccactctgaaggactgcccgggacccctggaactgcaattgtcctgtgagttcctgagtgaccagagcctggagactctactggactgcttacctcaactccctcagctgagcctgctgcagctgagccagacgggactgtccccgaaaagccccttcctgctggccaacaccttaagcctgtgtccacgggttaaaaaggtggatctcaggtccctgcaccatgcaactttgcacttcagatccaacgaggaggaggaaggcgtgtgctgtggtctctcagcaaacctgctgggcgacagcggactcagatgccttctggaatgtctgccgcaggtgcccatctccggtttgcttgatctgagtcacaacagcatttctcaggaaagtgccctgtacctgctggagacactgccctcctgcccacgtgtccgggaggcctcagtgaacctgggctctgagcagagcttccggattcacttctccagagaggaccaggctgggaagacactcaggctaagtgagtgcagcttccggccagagcacgtgtccaggctggccaccggcttgagcaagtccctgcagctgacggagctcacgctgacccagtgctgcctgggccagaagcagctggccatcctcctgagcttggtggggcgacccgcagggctgttcagcctcagggtgcaggagccgtgggcggacagagccagggttctctccctgttagaagtctgcgcccaggcctcaggcagtgtcactgaaatcagcatctccgagacccagcagcagctctgtgtccagctggaatttcctcgccaggaagagaatccagaagctgtggcactcaggttggctcactgtgaccttggagcccaccacagccttcttgtcgggcagctgatggagacatgtgccaggctgcagcagctcagcttgtctcaggttaacctctgtgaggacgatgatgccagttccctgctgctgcagagcctcctgctgtccctctctgagctgaagacatttcggctgacctccagctgtgtgagcaccgagggcctcgcccacctggcatctggtctgggccactgccaccacttggaggagctggacttgtctaacaatcaatttgatgaggagggcaccaaggcgctgatgagggcccttgaggggaaatggatgctaaagaggctggacctcagtcaccttctgctgaacagctccaccttggccttgcttactcacagactaagccagatgacctgcctgcagagcctcagactgaacaggaacagtatcggtgatgtcggttgctgccacctttctgaggctctcagggctgccaccagcctagaggagctggacttgagccacaaccagattggagacgctggtgtccagcacttagctaccatcctgcctgggctgccagagctcaggaagatagacctctcagggaatagcatcagctcagccgggggagtgcagttggcagagtctctcgttctttgcaggcgcctggaggagttgatgcttggctgcaatgccctgggggatcccacagccctggggctggctcaggagctgccccagcacctgagggtcctacacctaccattcagccatctgggcccaggtggggccctgagcctggcccaggccctggatggatccccccatttggaagagatcagcttggcggaaaacaacctggctggaggggtcctgcgtttctgtatggagctcccgctgctcagacagatagacctggtttcctgtaagattgacaaccagactgccaagctcctcacctccagcttcacgagctgccctgccctggaagtaatcttgctgtcctggaatctcctcggggatgaggcagctgccgagctggcccaggtgctgccgcagatgggccggctgaagagagtggacctggagaagaatcagatcacagctttgggggcctggctcctggctgaaggactggcccaggggtctagcatccaagtcatccgcctctggaataaccccattccctgcgacatggcccagcacctgaagagccaggagcccaggctggactttgccttctttgacaaccagccccaggccccttggggtacttgatggccccctcaagacctttggaatccagccaagtgatgcacccaaatgatccacctttcgcccactgggataattgactcaggaaagaagagcctcggcagggcgctctgcactccacccaggaggaaggatacgtgtgtcctgctgcagtcctcagggagaacttttttgggaaccaggagctgggtctggacaaaggagtaccctgcattacgtgggatatgtgtgatcaattggggacatgcgacacacaatgagggtgtcatgacaatgcatgacacgtacggttatatgtggcagtgtgaccccttgacatgtggcgttacatgaaagtcagtgtggcacgtgttctgtggcatgggtgctggcatcccaagtagcaggatacatgattgttggtctatatatgacacatgacaaatgtccatgtcacaggactcatggctggccagatgacctcaggctggcccaagatctaatttattaatttttaaagcaaatacatatttatagattgtgtgtatggagcagctaagtcaggaaaagtcttccgcccgagctgggaggggagagtgtccatgcactgaccagtccaggggctcaagggccagggctctggaacaagccagggactcagccattaagtcccctcctgcctcaatcctcagcctacccatctataaacttgatgactcctcccttacttacatactagcttccaaggacaggtggaggtagggccagcctggcgggagtggagaagcccagtctgtcctatgtaagggacaaagccaggtctaatggtactgggtagggggcactgccaagacaataagctaggctactgggtccagctactactttggtgggattcaggtgagtctccatgcacttcacatgttacccagtgttcttgttacttccaaggagaaccaagaatggctctgtcacactcgaagccaggcttgatcaataaacacaatggtattcc

SEQ ID NO: 12997 - DNA, 4777 bp, Homo sapiens
acgtgatttctcggcagcagccgccagttccatgcactggcggagcagctctaggcggcggcttctactttcagtttcgtgcagagcgcggaggagccgcgagcgctgagggtgagtgccgggagctctgagggagtctgcactatggaaacaacctgtcaatccagctcaaggcacacatagcccagacacccatgagaccctctccgtggggaccctagagcacctatcatgaacgaggagaccaaggctggctcctcatggaccccgttggcctccagctcggcaacaagaacctgtggagctgtcttgtgaggctgctcaccaaagacccagaatggctgaacgccaagatgaagttcttcctccccaacacggacctggattccaggaacgagaccttggaccctgaacagagagtcatcctgcaactcaacaagctgcatgtccagggttcggacacctggcagtctttcattcattgtgtgtgcatgcagctggaggtgcctctggacctggaggtgctgctgctgagtacttttggctatgatgatgggttcaccagccagctgggagctgaggggaaaagccaacctgaatctcagctccaccatggcctgaagcgcccacatcagagctgtgggtcctcaccccgccggaagcagtgcaagaagcagcagctagagttggccaagaagtacctgcagctcctgcggacctctgcccagcagcgctacaggagccaaatccctgggtcagggcagccccacgccttccaccaggtctatgtccctccaatcctgcgccgggccacagcatccttagacactccggagggggccattatgggggacgtcaaggtggaagatggtgctgacgtgagcatctcggacctcttcaacaccagggttaacaagggcccgagggtgaccgtgcttttggggaaggctggcatgggcaagaccacgctggcccaccggctctgccagaagtgggcagagggccatctgaactgtttccaggccctgttcctttttgaattccgccagctcaacttgatcacgaggttcctgacaccgtccgagctcctttttgatctgtacctgagccctgaatcggaccacgacactgtcttccagtacctggagaagaacgctgaccaagtcctgctgatctttgatgggctagatgaggccctccagcctatgggtcctgatggcccaggcccagtcctcacccttttctcccatctctgcaatgggaccctcctgcctggctgccgggtgatggctacctcccgtccagggaagctgcctgcctgcctgcctgcagaggcagccatggtccacatgttgggctttgatgggccacgggtggaagaatatgtgaatcacttcttcagcgcccagccatcgcgggagggggccctggtggagttacagacaaatggacgtctccgaagcctgtgtgcggtgcccgcactgtgccaagtcgcctgtctctgcctccaccatctgcttcctgaccacgccccaggccagtctgtggccctcctgcccaacatgactcagctctatatgcagatggtgctcgccctcagcccccctgggcacttgcccacctcgtccctactggacctgggggaggtggccctgaggggcctggagacagggaaggttatcttctatgcaaaagatattgctccacccttgatagcttttggggccactcacagcctgctgacttccttctgcgtctgcacaggccctgggcaccagcagacaggctatgctttcacccacctcagcctgcaggagtttcttgctgccctgcacctgatggccagccccaaggtgaacaaagacacacttacccagtatgttaccctccattcccgctgggtacagcggaccaaagctagactgggcctctcagaccacctccccaccttcctggcgggcctggcatcctgcacctgccgccccttccttagccacctggcgcagggcaatgaggactgtgtgggtgccaagcaggctgctgtagtgcaggtgttgaagaagttggccacccgcaagctcacagggccaaaggttgtagagctgtgtcactgtgtggatgagacacaggagcctgagctggccagtctcaccgcacaaagcctcccctatcaactgcccttccacaatttcccactgacctgcaccgacctggccaccctgaccaacatcctagagcacagggaggcccccatccacctggattttgatggctgtcccctggagccccactgccctgaggctctggtaggctgtgggcagatagagaatctcagctttaagagcaggaagtgtggggatgcctttgcagaagccctctccaggagcttgccgacaatggggaggctgcagatgctggggtgagccaggccttggagctgagaagggtcttcagctggggatgcctggttagcaggaagtaaaatcactgcccgaggcatcagccacctggtgaaagctttgcctctctgtccacagctgaaagaagtcagttttcgggacaaccagctcagtgaccaggtggtgctgaacattgtggaggttctccctcacctaccacggctccggaagcttgacctgagcagcaacagcatctgcgtgtcaaccctactctgcttggcaagggtggcagtcacgtgtcctaccgtcaggatgcttcaggccagggaggcggacctcatcttccttctttccccgcccacagagacaactgcagagctacaaagagctccagacctgcaggaaagtgacggccagaggaaaggggctcagagcagaagcttgacgctcaggctgcagaagtgtcagctccaggtccacgatgcggaggccctcatagccctgctccaggaaggccctcacctggaggaagtggaaggaggaagttaagctgcagaaagataaacttgctcaaggccacacaggtaggaagagtctaggctagggttcaagcccagacagtctggctcgcagcctcatcctcataaccactgctacctctcttgctgagatctgccaagtagaaaccccaccacacctgggtctgccttccaaaccacagtccctcagggctccccccacccccttcatccttctcccagagtagagtgggataaccttctcttttcgggatggagaaattcccatggcgtccagcccctggctgaagccaataagagtagtgcttggggatggacggaggctctgtcacgaccctaggaggggcgcccctccaggaaacctccaagtgaacatgaaggcagatgatggaacgccaggatgtgttctgggtcgagtggccccacctcaggcctctcagggaaccagctggaagatgaaggctgtcggctgatggcagaggctgcatcccagctgcacatcgccaggaagctggacctcagtaacaacgggctttctgtggccggggtgcattgtgtgctgagggccgtgagtgcgtgctggaccctggcagagctgcacatcagcctgcagcacaaaactgtgatcttcatgtttgcccaggagccagaggagcagaaggggccccaggagagggctgcatttcttgacagcctcatgctccagatgccctctgagctgcctctgagctcccgaaggatgaggctgacacattgtggcctccaagaaaagcacctagagcagctctgcaaggctctgggaggaagctgccacctcggtcacctccacctcgacttctcaggcaatgctctgggggatgaaggtgcagcccggctggctcagctgctcccagggctgggagctctgcagtccttgaacctcagtgagaacggtttgtccctggatgccgtgttgggtttggttcggtgcttctccactctgcagtggctcttccgcttggacatcagctttgaaagccaacacatcctcctgagaggggacaagacaagcagggatatgtgggccactggatctttgccagacttcccagctgcagccaagttcttagggttccgtcagcgctgcatccccaggagcctctgcctcagtgagtgtcctctggagcccccaagcctcacccgcctctgtgccactctgaaggactgcccgggacccctggaactgcaccctgccccatgagagtcccctggcctttggtagaaacttggctgtctctcggcagcccccagccttaggcagcgcatgtctcccactgggagatgctgtgctggactggggaagccttcacctgcaccatccactcaactcagggcacctgggagccctgtccacctccaaccccacccctggagcctcaccagggcacccacttgaacctgcctgcatggctggagcgtagcacttctgaaagcccttcctcaaggcacccccactctccttggggttaccacctcactcgccccagaacatctgggtctgtaaccagagactggacctggaatcaggactcttggctcaaaagggatttaactccccgggcctcagcttcttcatctgcacagtggatggtcagcctttccttttattgtcattgtggtgattctattatagtaattaccttaaaataaagaaatccaagacaaaacctgcctcacctaaacaacctcttctctcatcaaatccatgttgtcatgtgtccacaggactgtctactccttgcctatttgcatattcagtttctacctgtttgcagtcataaactagtttcatgcactgtg

SEQ ID NO: 12998 - DNA, 3617 bp, Homo sapiens
ctgagctgcctctgagctcccgaaggatgaggctgacacattgtggcctccaagaaaagcacctagagcagctctgcaaggctctgggaggaagctgccacctcggtcacctccacctcgacttctcaggcaatgctctgggggatgaaggtgcagcccggctggctcagctgctcccagggctgggagctctgcagtccttgaacctcagtgagaacggtttgtccctggatgccgtgttgggtttggttcggtgcttctccactctgcagtggctcttccgcttggacatcagctttgaaagccaacacatcctcctgagaggggacaagacaagcagggatatgtgggccactggatctttgccagacttcccagctgcagccaagttcttagggttccgtcagcgctgcatccccaggagcctctgcctcagtgagtgtcctctggagcccccaagcctcacccgcctctgtgccactctgaaggactgcccgggacccctggaactgcaattgtcctgtgagttcctgagtgaccagagcctggagactctactggactgcttacctcaactccctcagctgagcctgctgcagctgagccagacgggactgtccccgaaaagccccttcctgctggccaacaccttaagcctgtgtccacgggttaaaaaggtggatctcaggtccctgcaccatgcaactttgcacttcagatccaacgaggaggaggaaggcgtgtgctgtggtctctcagcaaacctgctgggcgacagcggactcagatgccttctggaatgtctgccgcaggtgcccatctccggtttgcttgatctgagtcacaacagcatttctcaggaaagtgccctgtacctgctggagacactgccctcctgcccacgtgtccgggaggcctcagtgaacctgggctctgagcagagcttccggattcacttctccagagaggaccaggctgggaagacactcaggctaagtgagtgcagcttccggccagagcacgtgtccaggctggccaccggcttgagcaagtccctgcagctgacggagctcacgctgacccagtgctgcctgggccagaagcagctggccatcctcctgagcttggtggggcgacccgcagggctgttcagcctcagctgaagcggtttcaaggtgcaggagccgtgggcggacagagccagggttctctccctgttagaagtctgcgcccaggcctcaggcagtgtcactgaaatcagcatctccgagacccagcagcagctctgtgtccagctggaatttcctcgccaggaagagaatccagaagctgtggcactcaggttggctcactgtgaccttggagcccaccacagccttcttgtcgggcagctgatggagacatgtgccaggctgcagcagctcagcttgtctcaggttaacctctgtgaggacgatgatgccagttccctgctgctgcagagcctcctgctgtccctctctgagctgaagacatttcggctgacctccagctgtgtgagcaccgagggcctcgcccacctggcatctggtctgggccactgccaccacttggaggagctggacttgtctaacaatcaatttgatgaggagggcaccaaggcgctgatgagggcccttgaggggaaatggatgctaaagaggctggacctcagtcaccttctgctgaacagctccaccttggccttgcttactcacagactaagccagatgacctgcctgcagagcctcagactgaacaggaacagtatcggtgatgtcggttgctgccacctttctgaggctctcagggctgccaccagcctagaggagctggacttgagccacaaccagattggagacgctggtgtccagcacttagctaccatcctgcctgggctgccagagctcaggaagatagacctctcagggaatagcatcagctcagccgggggagtgcagttggcagagtctctcgttctttgcaggcgcctggaggagttgatgcttggctgcaatgccctgggggatcccacagccctggggctggctcaggagctgccccagcacctgagggtcctacacctaccattcagccatctgggcccaggtggggccctgagcctggcccaggccctggatggatccccccatttggaagagatcagcttggcggaaaacaacctggctggaggggtcctgcgtttctgtatggagctcccgctgctcagacagatagacctggtttcctgtaagattgacaaccagactgccaagctcctcacctccagcttcacgagctgccctgccctggaagtaatcttgctgtcctggaatctcctcggggatgaggcagctgccgagctggcccaggtgctgccgcagatgggccggctgaagagagtggacctggagaagaatcagatcacagctttgggggcctggctcctggctgaaggactggcccaggggtctagcatccaagtcatccgcctctggaataaccccattccctgcgacatggcccagcacctgaagagccaggagcccaggctggactttgccttctttgacaaccagccccaggccccttggggtacttgatggccccctcaagacctttggaatccagccaagtgatgcacccaaatgatccacctttcgcccactgggataattgactcaggaaagaagagcctcggcagggcgctctgcactccacccaggaggaaggatacgtgtgtcctgctgcagtcctcagggagaacttttttgggaaccaggagctgggtctggacaaaggagtaccctgcattacgtgggatatgtgtgatcaattggggacatgcgacacacaatgagggtgtcatgacaatgcatgacacgtacggttatatgtggcagtgtgaccccttgacatgtggcgttacatgaaagtcagtgtggcacgtgttctgtggcatgggtgctggcatcccaagtagcaggatacatgattgttggtctatatatgacacatgacaaatgtccatgtcacaggactcatggctggccagatgacctcaggctggcccaagatctaatttattaatttttaaagcaaatacatatttatagattgtgtgtatggagcagctaagtcaggaaaagtcttccgcccgagctgggaggggagagtgtccatgcactgaccagtccaggggctcaagggccagggctctggaacaagccagggactcagccattaagtcccctcctgcctcaatcctcagcctacccatctataaacttgatgactcctcccttacttacatactagcttccaaggacaggtggaggtagggccagcctggcgggagtggagaagcccagtctgtcctatgtaagggacaaagccaggtctaatggtactgggtagggggcactgccaagacaataagctaggctactgggtccagctactactttggtgggattcaggtgagtctccatgcacttcacatgttacccagtgttcttgttacttccaaggagaaccaagaatggctctgtcacactcgaagccaggcttgatcaataaacacaatggtattccacgtc

SEQ ID NO: 12999 - DNA, 2321 bp, Homo sapiens
gacacattgtggcctccaagaaaagcacctagagcagctctgcaaggctctgggaggaagctgccacctcggtcacctccacctcgagtgagtggtttgtgtgttggaaggtgggtgggtggggccaattacagtgagttagtgttggtgtttgggtttggtttttaagatttagatcaactgttctttccctgctgaagtcagaaaccccttggagaatctggtgaaagttgtgactcttcctcccaagatacagatcccccatgtctgacacgctcggaggctcacccctggtccctcagaggtccacgaacctcagaataagaacctgggggagaccccagctgcccgtgccagatctgctgagatctggcctggcagcccagggctgtgtccagtttcaggaagttgagtaactggaatgcagggaccatgctgccagcaacccactccccacctgctaatgttctcccctcccttctccccacccccagcttctcaggcaatgctctgggggatgaaggtgcagcccggctggctcagctgctcccagggctgggagctctgcagtccttgaagtgagtagcccgctaggcagagcctctgaggctggggcagggggggagcattctctgtcccatccccctctttcctggggttattgtaaagattaaatcggaaaatgcatgaaaattgcccctaatacaatgtaagttctcggtgaaggctagctaatagatgattcttactcagagagtctgtgactcaataatcccacttctgattcaaggtttcacttctggaacctgtctccgcatctctgaacaggcttctgaggccaccctggggagggcaggtgtgggtgcgaagtatgactaacggctggcagttgttattctggccctggggtgccgggaggggctggggctgttagctggggtatggtcagggtagacagggagggtttgtaccagagaggacactcaagcagggtgcccagggctgccaaggatccctgagtacctggcagagagtgtgtaggaggaatccccaaagtttgcctgcaatggaccagagttcttgatccctaaatgcccttggtgcttttggctcacaaagcaccccctcctcccaggcacttctgggccaaagccagaggagcccaggggagaggtcacaggtcctatattccaggctgtctctgtgaacacgctttgctgtgtgattctgggcaagttacatcccctctccgagtccctggttcccagtcggtaaatacataaattgcaggcgtggcctctgttggtggctacgatctctgaaatgagtgctggggcctaaggaccccctgctcacaccctgtttttgtgcaatgctgggaaggaagggagttgccttggttcctgttcagggcctgcacctgggaaggaaggaaggtctaaccattgcaggcaaattacatgaagactggaggttttagtatgtcctcatgtgaccttcttattagtgtggactcgtgacctggtgctgtgagggtccacactcgccctaccagtgtccccgtgggaggggagtgtagcattaaatagtaaatagaaaacaataacaagttgacaggagaccctgaaagaaaggagacactttgttcctgctttctgcacaagagaccctgcattttcattttgtcctgggtaccacccctcccttatcaggtggagaaaaggaggcccagctccagccagaaagcactcctcagatccatcacagaccgagggacccactgggtgcccatctcagctctgtcaccaacatgtctcataaccttgggctagaccttgattctctctaggactctgtttccccatctccaccatgaggacttgcaaggggtgctctctgaccatcttgggttcagtgggttccgtcatctggaaccagggatccctcccccgccctgtgccctgaccacaaagaggatgtgtttgggtcctgagtgacctccattgtgccacccctgtgatctccagcctcagtgagaacggtttgtccctggatgccgtgttgggtttggttcggtgcttctccactctgcagtggctcttccgcttggacatcaggtgagcgtgcctctccgcccccagccctgcccctgtcccccatcccacaggtcatctgctcccacgtgggccccttgtccaccagtttcatgccaacctgtcatcctcagcaccttgggcagtaccagatctgcagagcatgtgatgggcgtccactgaatgaatgaatgatcaaatgaatgaataagtatggcctcacggatg

SEQ ID NO: 13000 - DNA, 465 bp, Homo sapiens
gacacattgtggcctccaagaaaagcacctagagcagctctgcaaggctctgggaggaagctgccacctcggtcacctccacctcgacttctcaggcaatgctctgggggatgaaggtgcagcccggctggctcagctgctcccagggctgggagctctgcagtccttgaacctcagtgagaacggtttgtccctggatgccgtgttgggtttggttcggtgcttctccactctgcagtggctcttccgcttggacatcaggtgagcgtgcctctccgcccccagccctgcccctgtcccccatcccacaggtcatctgctcccacgtgggccccttgtccaccagtttcatgccaacctgtcatcctcagcaccttgggcagtaccagatctgcagagcatgtgatgggcgtccactgaatgaatgaatgatcaaatgaatgaataagtatggcctcacggatg

SEQ ID NO: 13001 - DNA, 1894 bp, Homo sapiens
ctgacctgcaccgacctggccaccctgaccaacatcctagagcacagggaggcccccatccacctggattttgatggctgtcccctggagccccactgccctgaggctctggtaggctgtgggcagatagagaatctcagctttaagagcaggaagtgtggggatgcctttgcagaagccctctccaggagcttgccgacaatggggaggctgcagatgctgggcctgagcagcaacagcatctgcgtgtcaaccctactctgcttggcaagggtggcagtcacgtgtcctaccgtcaggatgcttcaggccagggaggcggacctcatcttccttctttccccgcccacagagacaactgcagagctacaaagagctccagacctgcaggaaagtgacggccagaggaaaggggctcagagcagaagcttgacgctcaggctgcagaagtgtcagctccaggtccacgatgcggaggccctcatagccctgctccaggaaggccctcacctggaggaagtggacctctcagggaaccagctggaagatgaaggctgtcggctgatggcagaggctgcatcccagctgcacatcgccaggaagctggacctcagtaacaacgggctttctgtggccggggtgcattgtgtgctgagggccgtgagtgcgtgctggaccctggcagagctgcacatcagcctgcagcacaaaactgtgatcttcatgtttgcccaggagccagaggagcagaaggggccccaggagagggctgcatttcttgacagcctcatgctccagatgccctctgagctgcctctgagctcccgaaggatgaggctgacacattgtggcctccaagaaaagcacctagagcagctctgcaaggctctgggaggaagctgccacctcggtcacctccacctcgacttctcaggcaatgctctgggggatgaaggtgcagcccggctggctcagctgctcccagggctgggagctctgcagtccttgaacctcagtgagaacggtttgtccctggatgccgtgttgggtttggttcggtgcttctccactctgcagtggctcttccgcttggacatcagctttgaaagccaacacatcctcctgagaggggacaagacaagcagcctcagtgagtgtcctctggagcccccaagcctcacccgcctctgtgccactctgaaggactgcccgggacccctggaactgcaattgtcctgtgagttcctgagtgaccagagcctggagactctactggactgcttacctcaactccctcagctgagcctgctgcagctgagccagacgggactgtccccgaaaagccccttcctgctggccaacaccttaagcctgtgtccacgggttaaaaaggtggatctcaggtccctgcaccatgcaactttgcacttcagatccaacgaggaggaggaaggcgtgtgctgtggcaggttcacaggctgcagcctcagccaggagcacgtagagtcactctgctggttgctgagcaagtgtaaagacctcagccaggtggacctgggctctgagcagagcttccggattcacttctccagagaggaccaggctgggaagacactcaggctaagtgagtgcagcttccggccagagcacgtgtccaggctggccaccggcttgagcaagtccctgcagctgacggagctcacgctgacccagtgctgcctgggccagaagcagctggccatcctcctgagcttggtggggcgacccgcagggctgttcagcctcagagactccacaaggcacacagagaaactgtccttccccacactggaggcctgtgctttgggatttaagaaaaaaagaaagaaagaaagaaagaaggtttcagaggata

SEQ ID NO: 13002 - DNA, 1635 bp, Homo sapiens
ccccacgactggcaccctgctttccccattcactgccttgtctccacccctcgacctccttgctctcctgccgctgactttgggacccctaccctgcaggctgtcctggaatctcctcggggatgaggcagctgccgagctggcccaggtgctgccgcagatgggccggctgaagagagtggagtatgaggggccgggggaggaatgggacgggctaaagggggacctacatcccgggaacaccaagaggccactgggtcagtcccctgcctcccagaaagcccttccttgagttgcacactctggcctgttccaagcccctgccaggcttagttccccctgggttctagccttcagccttcctgctgcacctgccaccagtcccctgttgtcttttgggttccctgagaaggtagtgtgggagactgtgtcccctgaccttggcctgaggaagggacctaggaaactctcacacccattctcatggccgtgtttctctttcccctcccctcactgtccactgagaagcctggagaagaatcagatcacagctttgggggcctggctcctggctgaaggactggcccaggggtctagcatccaagtcatccggtaacagaggcctgcaggggcagggatggtgggtgggaggctacaccaacccccagatctaatgggactccctggaggaggcggcagggcctgggctggggattatcaaaggagacttggaccactccaccaagaatttggcagcaagcagacttggatcaaaccccagctctgccacttgccaactgtgtaactttgtagccataactcaacctctctgaaccccaattttctcatctgtgaaatggggatactgatagtatctacctcagagagttgtgaagactaaatgagcatataaagcactgaacccaatgcctggcacatagtaagcacttaaaatggcagctataatcagagccatcacatacagttgtataggttgtgcactgcacaagggcattaaacctaaggggcaccattcacattgtcaacctgctagatttctagcagatgagagtaaagtaccttgttctaccaaaatcatatattatgacaatttcagacagatggaagtaaaacatcttgaagaaagagggtcttttccttatttgcacaaatgtgtcatatgagtgtggccttagctggcatcactatctcccagggaggaaggttgagttggaggactcaggaggcaggtgtggggtacaccctctccctaggtcagctatgctggtctaacacctgcctctgccaggtaactctaggcacagctctacctttttgggcctcagcctcccaatctgcagatacgacagatggcaaagatgggaggatgaatgagtgcctatatctgtgccccacagcctctggaataaccccattccctgcgacatggcccagcacctgaagagccaggagcccaggctggactttgccttctttgacaaccagccccaggccccttggggtacttgatggccccctcaagacctttggaatccagccaagtgatgcacccaaatgatccacctttcgcccactgggataattgactcaggaaagaagagcctcggcagggcg

SEQ ID NO: 13003 - DNA, 484 bp, Homo sapiens
ccccacgactggcaccctgctttccccattcactgccttgtctccacccctcgacctccttgctctcctgccgctgactttgggacccctaccctgcaggctgtcctggaatctcctcggggatgaggcagctgccgagctggcccaggtgctgccgcagatgggccggctgaagagagtggacctggagaagaatcagatcacagctttgggggcctggctcctggctgaaggactggcccaggggtctagcatccaagtcatccgcctctggaataaccccattccctgcgacatggcccagcacctgaagagccaggagcccaggctggactttgccttctttgacaaccagccccaggccccttggggtacttgatggccccctcaagacctttggaatccagccaagtgatgcacccaaatgatccacctttcgcccactgggataattgactcaggaaagaagagcctcggcagggcg

SEQ ID NO: 13004 - DNA, 2702 bp, Homo sapiens
atgatgcatcttaaatacaggaggtacatgtatgtggcaaaaatggcaacatcttgtgaacaacgtcatgattcaaacttgacggggaggggagcagggaggaaggtaacctgcaccctgacgtcttcaggggaggacacacaagcaccctatcaggtggcctctcttgaaaacccttgcccccacgactggcaccctgctttccccattcactgccttgtctccacccctcgacctccttgctctcctgccgctgactttgggacccctaccctgcaggctgtcctggaatctcctcggggatgaggcagctgccgagctggcccaggtgctgccgcagatgggccggctgaagagagtggagtatgaggggccgggggaggaatgggacgggctaaagggggacctacatcccgggaacaccaagaggccactgggtcagtcccctgcctcccagaaagcccttccttgagttgcacactctggcctgttccaagcccctgccaggcttagttccccctgggttctagccttcagccttcctgctgcacctgccaccagtcccctgttgtcttttgggttccctgagaaggtagtgtgggagactgtgtcccctgaccttggcctgaggaagggacctaggaaactctcacacccattctcatggccgtgtttctctttcccctcccctcactgtccactgagaagcctggagaagaatcagatcacagctttgggggcctggctcctggctgaaggactggcccaggggtctagcatccaagtcatccggtaacagaggcctgcaggggcagggatggtgggtgggaggctacaccaacccccagatctaatgggactccctggaggaggcggcagggcctgggctggggattatcaaaggagacttggaccactccaccaagaatttggcagcaagcagacttggatcaaaccccagctctgccacttgccaactgtgtaactttgtagccataactcaacctctctgaaccccaattttctcatctgtgaaatggggatactgatagtatctacctcagagagttgtgaagactaaatgagcatataaagcactgaacccaatgcctggcacatagtaagcacttaaaatggcagctataatcagagccatcacatacagttgtataggttgtgcactgcacaagggcattaaacctaaggggcaccattcacattgtcaacctgctagatttctagcagatgagagtaaagtaccttgttctaccaaaatcatatattatgacaatttcagacagatggaagtaaaacatcttgaagaaagagggtcttttccttatttgcacaaatgtgtcatatgagtgtggccttagctggcatcactatctcccagggaggaaggttgagttggaggactcaggaggcaggtgtggggtacaccctctccctaggtcagctatgctggtctaacacctgcctctgccaggtaactctaggcacagctctacctttttgggcctcagcctcccaatctgcagatacgacagatggcaaagatgggaggatgaatgagtgcctatatctgtgccccacagcctctggaataaccccattccctgcgacatggcccagcacctgaagagccaggagcccaggctggactttgccttctttgacaaccagccccaggccccttggggtacttgatggccccctcaagacctttggaatccagccaagtgatgcacccaaatgatccacctttcgcccactgggataattgactcaggaaagaagagcctcggcagggcgctctgcactccacccaggaggaaggatacgtgtgtcctgctgcagtcctcagggagaacttttttgggaaccaggagctgggtctggacaaaggagtaccctgcattacgtgggatatgtgtgatcaattggggacatgcgacacacaatgagggtgtcatgacaatgcatgacacgtacggttatatgtggcagtgtgaccccttgacatgtggcgttacatgaaagtcagtgtggcacgtgttctgtggcatgggtgctggcatcccaagtagcaggatacatgattgttggtctatatatgacacatgacaaatgtccatgtcacaggactcatggctggccagatgacctcaggctggcccaagatctaatttattaatttttaaagcaaatacatatttatagattgtgtgtatggagcagctaagtcaggaaaagtcttccgcccgagctgggaggggagagtgtccatgcactgaccagtccaggggctcaagggccagggctctggaacaagccagggactcagccattaagtcccctcctgcctcaatcctcagcctacccatctataaacttgatgactcctcccttacttacatactagcttccaaggacaggtggaggtagggccagcctggcgggagtggagaagcccagtctgtcctatgtaagggacaaagccaggtctaatggtactgggtagggggcactgccaagacaataagctaggctactgggtccagctactactttggtgggattcaggtgagtctccatgcacttcacatgttacccagtgttcttgttacttccaaggagaaccaagaatggctctgtcacactcgaagccaggcttgatcaataaacacaatggtattcca

SEQ ID NO: 13005 - DNA, 1896 bp, Homo sapiens
atgatgcatcttaaatacaggaggtacatgtatgtggcaaaaatggcaacatcttgtgaacaacgtcatgattcaaacttgacggggaggggagcagggaggaaggtaacctgcaccctgacgtcttcaggggaggacacacaagcaccctatcaggtggcctctcttgaaaacccttgcccccacgactggcaccctgctttccccattcactgccttgtctccacccctcgacctccttgctctcctgccgctgactttgggacccctaccctgcaggctgtcctggaatctcctcggggatgaggcagctgccgagctggcccaggtgctgccgcagatgggccggctgaagagagtggagtatgaggggccgggggaggaatgggacgggctaaagggggacctacatcccgggaacaccaagaggccactgggtcagtcccctgcctcccagaaagcccttccttgagttgcacactctggcctgttccaagcccctgccaggcttagttccccctgggttctagccttcagccttcctgctgcacctgccaccagtcccctgttgtcttttgggttccctgagaaggtagtgtgggagactgtgtcccctgaccttggcctgaggaagggacctaggaaactctcacacccattctcatggccgtgtttctctttcccctcccctcactgtccactgagaagcctggagaagaatcagatcacagctttgggggcctggctcctggctgaaggactggcccaggggtctagcatccaagtcatccgcctctggaataaccccattccctgcgacatggcccagcacctgaagagccaggagcccaggctggactttgccttctttgacaaccagccccaggccccttggggtacttgatggccccctcaagacctttggaatccagccaagtgatgcacccaaatgatccacctttcgcccactgggataattgactcaggaaagaagagcctcggcagggcgctctgcactccacccaggaggaaggatacgtgtgtcctgctgcagtcctcagggagaacttttttgggaaccaggagctgggtctggacaaaggagtaccctgcattacgtgggatatgtgtgatcaattggggacatgcgacacacaatgagggtgtcatgacaatgcatgacacgtacggttatatgtggcagtgtgaccccttgacatgtggcgttacatgaaagtcagtgtggcacgtgttctgtggcatgggtgctggcatcccaagtagcaggatacatgattgttggtctatatatgacacatgacaaatgtccatgtcacaggactcatggctggccagatgacctcaggctggcccaagatctaatttattaatttttaaagcaaatacatatttatagattgtgtgtatggagcagctaagtcaggaaaagtcttccgcccgagctgggaggggagagtgtccatgcactgaccagtccaggggctcaagggccagggctctggaacaagccagggactcagccattaagtcccctcctgcctcaatcctcagcctacccatctataaacttgatgactcctcccttacttacatactagcttccaaggacaggtggaggtagggccagcctggcgggagtggagaagcccagtctgtcctatgtaagggacaaagccaggtctaatggtactgggtagggggcactgccaagacaataagctaggctactgggtccagctactactttggtgggattcaggtgagtctccatgcacttcacatgttacccagtgttcttgttacttccaaggagaaccaagaatggctctgtcacactcgaagccaggcttgatcaataaacacaatggtattcca

SEQ ID NO: 13006 - DNA, 2882 bp, Homo sapiens
gtgcagagcgcggaggagccgcgagcgctgagggtgagtgccgggagctctgagggtgagtgccgggcgtgccgcggggctgcgggacccgggctggggcgagcggaagggagaggatcggggttcgaattctgcacggagaggggtggaggggatgtcagaggccctggagcgggaggtgcgggtggccgggtggctggccgatggatagctgggtaagcggacagggcgccagtggcccggcagcgcgcacagcatgcgccccggcagtttggaggaagagttgccggcccgcagaggatggcagatgagggtcgcctggatggggggacacagtaagcggctgtgctcccctccctgcgcagctcctgtcacctaccggatccacccactctctctgtcttttactttgcaacttttcattgattttaaaacaattacggaagttacactgttcattgtacgcaatttagactttttggcctaaacaactttttattgtggaaaattccaaacatatacaatagtagaaggaatagaattaggttgagccttctgcacctgcgggttttcatataatgaagccccacctatccacgttcagcttggacagtcacgaccccaaggccacctactcacgaccccaaggccacctaggtagcccaatctccaccgctggttattttgaaacaaatggcagacagcatagcatctcaactgaggtatttcagaatgtactaaaagataaggcatcttttaaaaacaaaaccacagtaccaccagcatactacaaacattttaatagttattccttaatgtcaaatctccagattatttctaaggaacatttaacctcataagtgataggtgaatacgtgggtgttgttttgttacttgctttctgcattcccatgtggttttcggtcactattctcacccagaaagccaggacctgaaactggctggggtgatcattcgaggaggtcggaagaggctcctaccttcagtgccgtttgcgtccattttataagttggagttcttatgtttccttttttaaaaggttgaagtttctgcagacctaaaaagcagtttgaaaactggcagttcccagcctctaaaacccgggggtagcaggaggcagagagtaccccggggccagatcctggagcctcattgtcccttcaaatcaccttccgtttctctaagggagaaataaaccttgaaaagccatgggcttttcagatgtatctagatgtatctgatgcttttcaggtgtatctagactcccatccagcgtgctttctgcaaaacttactgaaccatagcccagaatggccatccatgatgcccacccgccttgtctcctgaagcacattgccaggtggacctgcacatggtgtggacggcagacagactggggctctcaacaactggtatttgctggatgaccatgaactaaccattcaatttctcgaaactttggtttctcgtctgtaaaatgaacatatgcaaatctatcctacaaagtgtgttttgtggattgaatgagatgatacacgcccacccagtgccttgatcaaccttaaaatgctgcacaagtgtgaggggagatggatccttgaagaagacagacaagcagaggggaaagatcttggaagagtttcacaatatgctgaactttattcctggatcagatacagagctgtccgggtgtccacagggccgggtcagcctcctcagaccccaacacacataccctcttcccctctgaggaaaattcagcaaaacttcttttgctgttgttgttctttattccttttttttttttttttttttttgacgaagtctcactctgttgctcaggctggagtgtagtggcacgatcttggctcactgcaacctccatctcctgggttcaagcgattctcctgcctcagcctcccgagtagctgggattataggcgcccgccgctacacccagctaatttttgtatttttagtagagatggggtttcactatgttcgccaggctggtgtcaaactcccaacctcagatgatccacccgcctcggcctcctgtgggattataggcgtgagccatcttgcccggactcctttttttttttttttttttttttaatagacatgaggtctcaaactcctggcctcaagtgatcagtctgcctctgcctcccaaagtgttgagattatgggcgtgagccaccacacccagccataacttcttagcatgacttttcccatttgttatgagttcaattgtgcctccccacaaaagatatgctgaaggcctaaccctcggcgcctcctaacgtgaccttatttggaaatagggctgttgcagatataactggtgaagatgaggtcatactggagtaggatgggccttgaatccaataggaccggtgtccttataagagaggagatggacacatgaagacagagacatacggggatcagacaatcatggacggaggaggaagagagtgcggcgatgcatctaggagccacaggacacctagaatggccagcagccggtgggaaccaggagaggcaaggacggatcctctcctccagccttcagagggagcccggccctgaccacacctcgatctcagactctgacctccagaactgcgagagaagaaatctcagttgttttaatgtacgcagcttgtggcactttgtgacagcagatacagcagtactgtgacaacactaggaaacgaatacaccatcccagcatctctgctctgttttccatacagaattgaactaaggaccaggcaagctaatgcaagtccaaacactgtaaaaactttggaggcaatctaaggatgtgagccagatttgtttgccagat

SEQ ID NO: 13007 - DNA, 563 bp, Homo sapiens
gtgcagagcgcggaggagccgcgagcgctgaggggctgttgcagatataactggtgaagatgaggtcatactggagtaggatgggccttgaatccaataggaccggtgtccttataagagaggagatggacacatgaagacagagacatacggggatcagacaatcatggacggaggaggaagagagtgcggcgatgcatctaggagccacaggacacctagaatggccagcagccggtgggaaccaggagaggcaaggacggatcctctcctccagccttcagagggagcccggccctgaccacacctcgatctcagactctgacctccagaactgcgagagaagaaatctcagttgttttaatgtacgcagcttgtggcactttgtgacagcagatacagcagtactgtgacaacactaggaaacgaatacaccatcccagcatctctgctctgttttccatacagaattgaactaaggaccaggcaagctaatgcaagtccaaacactgtaaaaactttggaggcaatctaaggatgtgagccagatttgtttgccagat

SEQ ID NO: 13008 - DNA, 2734 bp, Homo sapiens
tctcagggtttcctgggcatgggatcataatttctatcccctgatgcccgggtgccatggggaccatggaggccatggggtgggaaggccaggtattgccatgctcacagaatgagtttgggggtctcctctggttctgaggcctccatcctcccttgtccttgtgggtgcagccccgcttccctctctgtgccctgtgggtgccctaggtgcctaggaagctggcatgtctgggcaccgtgcttccccaggcccttctctctgcagcctgggctctgagcagagcttccggattcacttctccagagaggaccaggctgggaagacactcaggtaatccctgcagggtgatgggacaggggacagagaggggagaggaggctgaccctatggcggcctccatggccccctcttccctgggccctctcctcctttagagagcagcttcaagctcactgcctgggtctgttcctccagatctgcccccgatgccctggtaactccagtctcagccagggccttggcattgaacttgtgcctcttagcccaccatcctaagcccaactcagcccaacattctcttccttgccatgtcctgactacaggccttgaggcttctgagtgtcacggttaaagattttgaagccaactgaaaataaatccctgatctgccacttaccagctatgtggccctggacaagtaaaatggggataataacacaacctaccccttagggttattgtgaggattaaatgagttaataagtataaagtgccaggaaaaggtctggctcatgggagtgctgtcagcagttattgtaactgttattattattattattattattattattattatcattatcattacccctggtagccctgactcactgccacggccagttcctttacatgtcttacttcagctgtgaacagggcctccaaactgatccctgcatcttatcaggcctcctcccctccattcactccacagcccccagagggatcttcacaacacacatctgacagtgcccctctgctactctgtgcccctcagtggctccccattaaccccagggtgaagttcaaagtccctagcatcttctccctcacagtctgatccaactgtcaccttccaccatgttccttcccacctcccccacaccacacacacgccctacacaccaacccatataccacagatacaccaagcacacccaaacacaccacacagcacgcagcacacacaacacacgcacaccacacagcacacacaacacacaaacgcaccacataccatacacataccacatacacacacatacaccacacacaccacacaatacacacaccccacaaaaacaaaccccccacatacatacctggcacattacaaatacagcacacacaccacataatacctacaaataccacatacacaacacacacacacacacacagttcagccataaccttcactatttgctcctagatcaagccctgcctgaagattctctgcctctgctcacaccgcactcagctcaacattctcttccttgccttttctgagataaaattctcccaatcctttaacacccagctcaaacatcagcccctcctggaagtatcccagcagccctgcctcatcagagtgaactgccccgaggttcactgggccctttcacttggctgggcccgtctgctggccacccagggctgagatgcctggacagcagagccccacggagaatcccaggcacacctccctccccagggagctcagccagtgctggtccgggagagtaaggcagtggttaagagcttggggtctgcagtcagactgacctggatggaaaccagattctgcccttctttcttatctgctgtgtgtccttgggttagtcagtttccccacctctaattggtgctatgagaattaaaggagaccctgcgggtaaggcaggaagtcccatgcacccagaggctggcacagtgcctgacctagagtcagcctccctaaataacttactcctaatactttcttacagggggtgtgggaggttcctccccaaagagacaggaagctcccagagcaggagctgcatatttggcctctcaggccctgctccaggcctttgccctcagaggtgggatgctcccccaataggccctcagggaggctgagatgaagctgagcagcagtgcccacaggcctcacccaggctctgccctggctttctgccctcaggctaagtgagtgcagcttccggccagagcacgtgtccaggctggccaccggcttgagcaagtccctgcagctgacggagctcacgtgagtgacccacccagcccgtgaggacagcagaggggtgggggcaccctgccagagccacctcagtgactgacctctgtctccaggctgacccagtgctgcctgggccagaagcagctggccatcctcctgagcttggtggggcgacccgcagggctgttcagcctcaggtacctcctcccccgctgcctccgggaggggccatggcatgaatgggagcaggggtgggcactggagtaagaggcccccaggatcatggccccagtcatttcctgtacccacaaccctgccatctggaccctgagcaaaccctgtccatctgtcccagagactccacaaggcacacagagaaactgtccttccccacactggaggcctgtgctttgggatttaagaaaaaaa

SEQ ID NO: 13009 - DNA, 575 bp, Homo sapiens
tctcagggtttcctgggcatgggatcataatttctatcccctgatgcccgggtgccatggggaccatggaggccatggggtgggaaggccaggtattgccatgctcacagaatgagtttgggggtctcctctggttctgaggcctccatcctcccttgtccttgtgggtgcagccccgcttccctctctgtgccctgtgggtgccctaggtgcctaggaagctggcatgtctgggcaccgtgcttccccaggcccttctctctgcagcctgggctctgagcagagcttccggattcacttctccagagaggaccaggctgggaagacactcaggctaagtgagtgcagcttccggccagagcacgtgtccaggctggccaccggcttgagcaagtccctgcagctgacggagctcacgctgacccagtgctgcctgggccagaagcagctggccatcctcctgagcttggtggggcgacccgcagggctgttcagcctcagagactccacaaggcacacagagaaactgtccttccccacactggaggcctgtgctttgggatttaagaaaaaaa

SEQ ID NO: 13010 - DNA, 2681 bp, Homo sapiens
gtttttggttctgttcctgaagcagccactttgtgtatgaccttaagcaagttctctaactctctgaaccttggtgttcctcacctgtaaaatggggacgataataaacccacctttccagatggccccaagccctgagtttggcccacattttatgatcaatgtgtgaccgccattattacggatcattagtcttggtccatgtggttcagaacatagaactgctgcctgcctgacctcagtaattcatgcagagaaacagcatttggacctcccagtacagttcattttgtagaatttttacactgtgtggatataagtggctgtcttggaggtccctaggcttgctaagcacagaggcctcagacccccagactggacagtgccccacccccagatgtcaagttcacctggcctcctcttctccagcctcagtcaccttctgctgaacagctccaccttggccttgcttactcacagactaagccagatgacctgcctgcagagcctcaggtgagtgaccgagcggccccatgggaatgagtgggaagaaacacttcccactcagttgggaccacatccagggaagcactgaggccacctcccaggggatcctttgcggatccctcccaggcccatccctgtgccctcccaggtgggtgcccactgctcttgccttctaatgccatcagcttcctcctggttacaaaagtggcctaaagggcttaggcccacgtcgtagaacaacccttgaggcacacacacagttcaccctgggctcttgttaaaatgctcattctgattccccaggtctggaattctgcctagactgtgcttttttttttttttttttttttttttttttttttttttttttgagttggggcctcactgtgtggcccaggctggagtgcagtggcaatgcacaggtgcaatcgtgttgcactgcagcctcaaactcctgggcgaacgtgatcctcctgcctcaccctcctaagcagctgggactacaggcctaaggcgttgcacccaaacttagcatttctttttttgtttgtttgtttttgagacagagtttcgctcttgttgcccaggctggagtgcaatggcacaatctcagctcactgcaacctccgcctcccgggttcaagcgattctcctgcctcagcctcccgagtagccgggattataggcatgtgccaccacgcccggctaatttttgtatttttggtagagacagtgtttctccatgttggtcaggctggtcttgaacgtccaacctcaggtgatctgcccacctcggcctcccaaagtgctgggattacaggcgtgagccaccacgcctggcttcagactctgcattttctaacaagcttccgggtggtatcaattctgggggccacggtcagcactttgagtagtgtgggtctagactcagatggggtggccttcctacactccctttgtgatttcactccctgctgctaggataaataaacatgacacttactttcaatgtgatttttcaaaacatgaaatcttgtgactaaaaacaaatccaagcagtgacacaaagcattgctttgtttatatccaagtacacctcctaccccctacctcgggcagagcagagtaggtaggaaatgaggttagagagttccaggaggttatatcatattggaccatttcacccaaaattaatttactgaaaggtgatccattaaagtgtatttatttatttctattttatttttattttttgagacacagtctcactctgtcgcccaggctggagtgcagtggcatgatctcacttcactgcaacctctgcctcctgggttcaagcgattctggtgcctcagccgcccaagtagctgggattacaggtatgcaccaccacgcccagataatttttgtatatttttagtacaaatggggtttcaccatgttggccgggctggtctcgaacccctgacctcaaatgatccacctgcctagactccgaaagtgctgggaatacaggtgtgaaccactgctcccagccccattaaaatttaatttgcaaaataaaagaaagtaaaaacaacatgcaaacaaatacttcccaaggggctaagaccatttgcctcagctatttattgttttttcctacccaggcagagcaaggtcagggctcagtaaagacaataccctgggtttaaggaaaaacctaccatttgcatggatgagaacacatatgcccctgagaactgatctgcgtgaatcagagaatcccacgtgaaagtggcattcagccgggccagcccggagatccctgacacagaggctgaggtgaagcttggcaaagaaatgtagagactcctcctgggccaggggctctggatttgtttccacccagcctgcaagtccctaagtctctggccagtcacagctcactgctggctctcaagttttctcacctggacactggggacaataattcccaccttgctcaccactccccacctgccatgacccccagaagttttgctaccagcatatgaattcctgggcgtgtaaggctttgcaaactgtagagttcttagcacagcacctgcaaaggcctttaagctcctgaaagcctcttggtctattccctgcttttccagactgaacaggaacagtatcggtgatgtcggttg

SEQ ID NO: 13011 - DNA, 546 bp, Homo sapiens
gtttttggttctgttcctgaagcagccactttgtgtatgaccttaagcaagttctctaactctctgaaccttggtgttcctcacctgtaaaatggggacgataataaacccacctttccagatggccccaagccctgagtttggcccacattttatgatcaatgtgtgaccgccattattacggatcattagtcttggtccatgtggttcagaacatagaactgctgcctgcctgacctcagtaattcatgcagagaaacagcatttggacctcccagtacagttcattttgtagaatttttacactgtgtggatataagtggctgtcttggaggtccctaggcttgctaagcacagaggcctcagacccccagactggacagtgccccacccccagatgtcaagttcacctggcctcctcttctccagcctcagtcaccttctgctgaacagctccaccttggccttgcttactcacagactaagccagatgacctgcctgcagagcctcagactgaacaggaacagtatcggtgatgtcggttg

SEQ ID NO: 13012 - DNA, 17084 bp, Homo sapiens
acagatgaggacgctgaggtacgaagaggctgcgtaacctaccagggtcacacagctttggtgtggagtagggactcaaatccagggccctggtacggaggcatttgccctcaccaagattcaggcactgagagaagctgacgggcctagagaatggcaagacttgagatagcagaaggaaggagagagggtgagaaatggatccccgtgctgaggtctggtctggaaggagaagtctgcaaggtaggaaaaagaggaaaggggacgtgaggtagggaagcaggatgtgcaaggcggggacttgtgaaagagaatgccggggggtggtgagcagcatctcatgggcaggtcagcaggtgcaggagaggcctaggagggccggggactggatgatgaaagggcatttgtttatttatcctttgtttttgttttttgttgtttaaattgagaccagctctcacaatgttgcccaggctcgtctcgccaactgtctgcccactcctggcctcaaacgatcttcctgcctcagcctccaaaagtgttgggattacaggcataagccaatgtttattcgtcctgagccttccctggacacctgatatgtagctgctttgtggtggtcacagttccatggtgtgactttatcctggaggcagtgggatgctgatagcaagttcagacaggcatgaggccagaccagagctgagttttcaagataactccagccagaggtatgcgtgcatgtgcacatgtgggtacatgtatgtgtgtgcacgtgcatgtgtgtatgagtgtggactagagatggaatggctttctgagcaaagggaacagccaaggcaaaggcctgtgggctgcagggagagaacaaggtttgatctctgcactccctcctctaagctctgtgtcaacagcattttcaggacagcaggaaggattcccaaagagcacagcagcgagggcagttggagggaggcgtctgctgggacactgaaaccagggtggggtaaactcccctcgcacctcctcagactcagagcccccataaatcttccaggtgcaccccagcccttttccctctctctgtctgaactggggtggcatgatcccaggactgcaactccacgtgtctggattccccttactgactgcgtgaccctggccattttccctccacctttctctcagcgcccccatttgattactcggcctcaggggtgcactggggattcttagaggtaacacttcgaacggaaagccagaggtcctggtgccaaaatgcaaatgtgagggcttgaaagttcatcgggttttattttctctgttccgtttgcagtagctcttctttcttgttttctatagaacagtaaaaaactttatgcatttgaatatcgtgaaccttgtaattcatatgcaatataaaaactactagctatgcatggagaaatcaattgaagaacagtggcttagcatgtctttctcattctttgatggctacctcaaatcaaatcaatatgaacttggggtcaggcatggtggctcacacctgtaatcccaacacttggggaggccaaggcaggaggatcacttgagcgcaggaatttgagactagcttgggcaacatagcgggacctcatcttaatattaaaaaaaaaaaaaagagaaagaaaaaaagtgaacttgggaggtttgaatgacaactcgtatagctgaagtaatagatatattcaacttttaaaacttaattttcattagataacacatgcatatggtataacattctaggccaggtgcagtggctcacatctgtaatcccagcactttgggaggccaaggtgggcagattgcttgagcccaggagttgaagtctagcttgggcaagatggcaaaaccccatctctgcaaaaaacacaaaaaattagctaggtgtggtggtgtgcacttgtagtcccagctactcaggaagctgaggtcggggaatcatataagcccaggaggtggagactgcagtgagccacgaccacaccactgcactccagcctgggtgacagagcaataccctgtctcaaaaaaaaaaggaaaaaaaattcctttcactggggacaattacctttatgaatttcttccagaaatattaatgtatttgtatacacatttttttttgagacagggtctcactctgtcacccaggctggagtgcagggatgcaatcttggctcactgcagcctggatacccccaggctcaagcaatcctcccacctcaaccttgcgggtagcttggacaacatgtgtgcaccaccactcctggctaatttttgtattttttgtcaagatggggttttgccatgttacccaggctcgtctcaaactcctgacctcaagtgatctgcccgcctttgcccctcaaagtgctgggattacaggcatgagccaccatatttattttttctttacacaaaggaagcatattctacaccctgttttgccccggctctcttttaaaaaacagtgtatcttggataccattccatatcattccataaagttcatcttcatcctctttttttttttttttttttttttgagacagggtttcactctgtcgcccaggctggggtgcagtggcactatctcagcttacctcaacctcccgggctcaagtgatcctcccacctcagcctcctgagtggctggatgctgcttctttctttttgatggctgcaaagaattccattgtatagatgtgccataatttaatcataatatgtcctctttgatcatttaggtttttccaatcttttgctattacaagcaaggccacgttaaatatccctgggcatattattttgcacattatgaagatatctgtaggctaaatacctgtgtatggaattgctcagtgtgattacatggcatttaccactttggtagataaaggttgtatcctgttacatgtccacggatgaatttcttccagaaatattcatgtatttgtatacacattttttgagacagggtcacaaaaccgttaacacattattattattattattattattattatttcacattatttagggaagtttcatttttttgtgagctatcactgataatttcttatttactcatcatcttgtatttctcttccttgcacattggggaaatgtctattctagtttttaatgtaaatgttcttgtggcttttttagaaaaaatcaaaatgtgcacattaaaaagtttgaatggttcaaaaggtcctaaaaagggtccacagtggaaaaggctctcctttcccagcaggcccagatccctcctcagacacaagcctgtcgtcagtttcctgtgtagcttcccagagttggtcactatgtatgcaaatacacacacatttaaaatatacacactccacgtccacgtggaatgatgcaaagcatctaagtgcccgttaattcacaaccttgccaactcagtaatatccttgcgaatctaatagctagaaaatggtgtatctttttagttctaatgtattatatttattctattttctgtgagcttgaacatcttttcatatatttaaaagtcattggggccaggggtggtggctcatgcctgtaaccccagcactttgggaggccgaggcaggtagatcacctgaggtcagaagttcgagaccagcctggtcaacatggtgaaactcagtctctattaaaaatacaaaaaaaaaaaattaatcaggcatggtggctcgtgcctgtaatcccagctattgggaggctgaggcagaagaattgcttgaactggggaggtggaagttgcagtgagtggagatcgtgccactgtactccagcctgggcaacagagtgagactctgtctcaaaaaaaaatttttaaatgtcattggtgtttcccttttttgtaaaccttttatgttctttgcctagttttctatgaggtcattggctttttcagtgttggtttttagtaactctcgatttattaaaacatttatacatttatagctttgtttatgatgtatacatttataaccttgtctgtgatgcagatatttttccaatttgtcatctggcttttgaccttatctgtggtattctttgacaatacaaaaattttaatttatatctgatcagtttcatccagttgtttttttcttttttcatgatttctgagttttgtgtcatgcttagcaagatgctctctactctgaaattattttctgtaaaatatttttttcagccaggcatagtggctcacacctgcaatcccagaactttgggaggtagaggtggaaggattatttgagtccaggagttcaaggccagcctgggcaacagagcaagaccccgcctctattttttaaaagagaaatttttttaaaatactttttcccatgttttgtttgagcacttacattttcttaacttttttgtcgtgaaacataacacatagaaaaatgtaatgtaagtgtacaacttcatgaattgttataaattgaacatatagctttctggtactttcatggtttaacttcttacatttaaattttggtttcatctagactttattttgatataattgtgaaatagaaatccatttttattctaaaagaacactttttaaatgttcatgaaatgttttaaaatttattatataccaagcaagaaaaaatctcaacatagtcctcaaagcagaaattgcacaggacttattctttgtacagtgtaatgcacaaaaactaataagaaagccttaaaaacaaccctttattaaattactccattccaaattataatttcaatctacttagcacataagtattgatatacatttatcgaaattggccaaaagtgttttattattttttaaaagaaaaagcctagcaatggcttaagcaataaagtttttaattttaaagaataacaaacagcctcactaaatcagaggaaagaaataaaaagataaaagcaaaaattacagaactagaaaagggaccattccagcaaaattgataaatgaaaacaaaaatttgtttttcaaacataagagttaccaacggctggtgaatctaaaaagaagaaaaaacaaagtaaactaaattaaatgtgaagccatgaagagatttaaaattataagaaaataggccgtgcacggtggctcacgcctgtaatcccagcactttgggaggccgaggtgggtggatcatgaggtcaggagcttgagacccgcctggccaacatggtgaaaccccgtctctaccaaaaatacaaaaattagctggctgtggtagcatgagcctgtagtcccagctacttaggaggctgaggcgggagaatcacttgaacccaagaggtggaggttgcagtgagccgagaccttgccattgctctccagcctgggtggcagagtgagattccgtctcaaaaaataaataaataaataaagctgggcgcagtggctcatgcctctaatcacagcactttgggaggccgaggtgggcggatcacaaggttaggagatcgagaccatcctggctgacatggtgaaaccccgtctctactaaaaatacaaaaaatgagctgggcatggtggcgtgtgcctgtggtcccagctactcgggaggctgaggaaagagaatggcgtgaacctgggaggtggaggttgcagtgagctgagatcacgccactgcactccagcctgggcgacagagtgagactccatttcaaaaaaaaaaatacaagaacatattatatacaactgtgagctacaccatgtttgaacatcttgacaaaatgagcaactttctcaaaactaaattgccaaatgttcatttttaaaaagccaaaaataaccaaccaacacaatgaggataaatttaaagtgatcaagtttgatttttttaaaaaactgttcaaacatcttggtagtgctgggcaggaagttggctttcattctgggtgagatgagaaggctctaaggggcataggacctgatgtcatgggacctgatgcaggctctgtcttaatagctgactcctgcgtggagtaggttattgggggatgggtggacagagaccagggaggaggctggtgcaggaatcccagtgagaaatgatggtgtccaggctaggccatagcagtagaggaagcaagattctggaatgcacttggaaaatgaagccatctttgggcttgagctcaaggaagcatgaagctgcccctaactgaagtggggaaggtggtctggggagcagtttaggaggagagatcaggagctcagtttcggacttggaaattttgaaacgcacatgaggcatccaggtggagttgggagaattaaataatgctgaaaggtactcacttggcaagtagcaaatattcgctatattgtctgttcaactttgtcaactgcttttccagtagaaatgtagtgtccttatcacacatgcataaatgttaaactcaaaagtaaaatgaaatattttctcagtagatatgaataactttttaatttttttgttttttgacatgcggtctcactctgttgcccaggctggagtggggtggcgagatcatagctcactgcagcctcaaactcctgggctcaagcaatcctctgccacagcctcccgattagctgggactacaggcacacaccaccacgcccagctaatcttttattttttgtagagactgagttgcacaatgtagcccaagctggtctccaactcctgagctcaagctatcctcccacctcggcctcccaaagtgttgggattacaggcgtgagccactgcacctggctgctttttaattgtaatattcatcctccatccatcatacttagtgcaaatatttttccccacctattgccttcctatttctcttttatttcacgtcatttagggaagtttcatttttttgtgagctatcactgataatttcttatttactcatcatcttgtatttctcttccttacacattggggaaatgtctattctagtttttaatgtaaatgttcttgtggctttttttaaaaaaaaatcaaaatgtgcacattaaaaagtttgaatggttcaaagggtcctaaaaagggtccacagtgggaaaggctctcctgtcccagcaggcccagacccctcctcagacacaagcctgtcatcagtttcctgtgtagcttcccagagttggtctctatgtatgcaaatacacacacatttaaaatatacacatgccacagctttttaaaatttgaatttatgggccatgtgcagtggctcacgcctgtaaccccaacactttgggaggccgaggcaggtggatcacctgaggtcaggagttcgagaccaacctgaccaatatggtgaaaccccgtctctactaaaaatacaaaaattagctgggcatggtggtgggtgcctataatcccagcttctcaggaggttgagacaggagaatcgcttggacccaggaggcagaggttgcagtgagctgagatcgtgccactacactcaagtctaggcgacagagggagactccgtctcaaaaaaaaaaaaaaaaattgaatttagactcaggtgcagaggctcacgcctgtaatcccagcacttacggaggctgatgaggggagaatcacttgagtccagtagttcaagaccagcctgggcaacacagggaaactatgtctctacaaaaaaattaaaattagcctggcatggtggagtgtgcctgttgtctcacctactcaggagggtgaggcaggggaatcacttgaactcaggagtaggaggctgcatgagctatgattgcaccactgcactccagcctgggtgacagagcaagaccctgtgtcaaaaaaaaaaaaaaagaaaagaaaattagactaccatcatagatggtacaaacacttcccagtttgttgctttcgttttgtttgttgccatttttactatacagaaaaaaaaggcaataaagaatacattattataatatgttaatttctactgcattatttttaacaacttcattgaggtgtaatttacataccgtaaaatctatccattttaggtgtaggattcagtgatttctggtaaatttactgagttatgtgaccatcaccacaatctggttttgggacattttcattactgccataatattcctcaaacccatttagaatcattcctatttctgctcccaggcccaggcaaccagtaatctacttgctgtttcaatagatttgccttttctggatgttttacataaatagaatcatacaatacgtgatctttagtgatcttttttcacatggcataaacttggttcctttttatgttgaataatattccattgtatagatatgtcacagtttgtttctccattcatgagcttttgggtatttgggttgatttcactttttgactgttatggataatgctggtacaaacattcatatacaagtttttgtgtagatgtatattttcatttctcttggaatagacctaggcgtggaattgctggattagatggtaattctattgttttacattctaaggcaggggtccccaacccccaggctacagatcagtgtcggttcatggcctgttaggaactgggccgcacagcaggtggtgagcggccatcgggcgagtattactgcctgagctctgcctcctgtcggatcagcggtgccattagattctcataggagcacaaacccagttgtgaaatgcgcatgtgagggatctaggttgcgagtttctgatgagaatctaatgataaatgtaatgagcttgaatcatcccgaatccatcccccaaccccaacccccgtccggggaaaaaatgatctctcatgaaatcagtccctaggccaaaaagtctggggactgctgttctaaggaactgccaaaactgccaaactgtttttcagagtggctggaccattttacattcccaccggcaatatatacggtgtcctgtttctttacatcctcatcaacatgtgtctttttcattacagccattctatgtgggtgtgaaatgctatgtggctgtgtttttcatttccatgcagaaatttttaatttaattgcttagttaaaaataattctttaaatttaaaacactcatattgccatatgtatatttttatactacaaagtgatacaatttttgttaattttcttgccttgattactctttacctgtatagtatttaaatctttacataagatcacaattatagtgaatagtaatttattcaactcaaaatcttcataggatttagaaaatttaagtcctttaccaaagggattgacttctaacttcattaaaggttgcgaacagtatcaaatccttggtaaagccacattcaatctttggcactccaggattttgagctataactgtagtgatcactaatatgtcatttctaagctgacggtcataatgactaaaacctctcatagattttaaaatacttccttcaaagtcagtaaacattccaagttactaagctgttgaacaatttcttattttgaagattttttctgataagttccaaagtgtttctgatgaaggaaataaaagctgtccagagaaatctgagtcattgaggtgagcacagattccattggctgcttgtgctttcatcattacagtacaattaacttcagaagtcgagagatgctgcagaattttaagtacccaaagtttctcaacaagttgattttcaagcaaggtcattaactgggccattgtttttgccaatcctccaacttcagccatttgaatcttgtatgatgaactcacttgctggtaacctggaatatgctcctttggtggttgtgcctgataaaagtcaacaatacgtttacaattttttatcctcaattcagaacttggtattttcattaagtcacccagaagcgcaactgaactagcagtatctccagcataagttatttcatccgatactttctttttcaaaaatggcaagccacactattttatgatatcatatgcagattctacaaaatgcggctggttttcaatttttactgcacacagattcagaatttcaaatgtctgtactaaatcccttaagggaagttcattctgataacactgtaccagtttcttgacagatttaagttgcttttcttctaagccttctttagcagtctcttcaaaaagtttgatgacaccattaaggtccacaggcttcaaaacaccagttccacatggcgagggaggccttgggaaacatcatcatgatggaaggcaaaggggaagtaaagaccttcttcatggtggcaggaaagagacagcatattgctatgtattttaacaccacttatttccccccttttttctttcaatatcatggattaaatagtgtattttaaatgagtgtgaggctcacttggactctattccatccctttggccaatttttttccatttttaatccaagaatcttaaagtttgaatgatggtcaccttgttatatattttattatgtttggaagcttttttgctattgtctgatcctcccaacaaatagccttttgatagaattgcctttattcgtttctttatatctaattctaacttaagattagacttaaaagtaacttcagcggttttattatgaaatatttaaggcatataaatactgcctcttttctctaaatgactgctaatataattttaccaagttctgttaaagtatcctgttgtacataaagtgctgttgttttttatctgcctgttaacttagagtgggttttattttctttcactttctgtggtcgaaggcaagtatgtcttagtcagtttgggctgttataatgaaacactgtagactgggtggcttaaacaacagaaacttgtttctcacgttctgaaagccgggaagtccccaatcagggagccagcaggcctggtgtctggagaggatgcgcttcctggtttgcagacggcaccttctcattgtgtcctcacagggcagagagcaaaaagaaagggcaagcgctctccagcctcttcctttttcctttttttttttgtttgtttgagatggagtcttgctctgttgcccagactggagtgcggtggcatgatcttggctcaatgcaacctctgcctcctggcttcaagtgattctcctgcctcagcctcctgagtagctgggactacaggtgcctgccaccatgcctgactaatttttatgtttttattagagatggggtttcatcatgttggccagactggttttagactcctgacctcaagtgatctacctaccttggcctcccaaagtgctgggattacaggcgtgaaccaccgcacccggcctccagcctcttcttgtgagggcagtaatcccatcataaggggtccaccctcttgacctaatcacttcgcaaaggtcccacttccaaataccatcacactgggtatttaggcttcaccaggtgaattggtgggggaggtgggacacaaacattcagtccacggcaagtttttatctcaatttgctaaagcctctctttatttctcctgttacagtgtgataatgttttttaaaatatcatttagctggctgtggtgacccatgcctgcagtcccagctactcaggaggctaaggcaaaaggatcacatgaacctaggagtttgaatccagcctgggcaacatagaaagaccctgtctcttaaaaaaataaataaataaataaataaataaataaataaataaataaataaaggaaagaggctgggcacagtggctcatgcctataatcccagcactttgggaggccgaggcgggcagatcacctgaagtcgggagttcaagaccagcctgaccaacatggagaaaccccttctctactaaaaatacaaaattagccgggtgtagtggcacatgcctgtaatcccactacttgggaggctgaggcaagagaattgcttgaaccagaaggtggaggttgtggtgagccgagatcatgccattgcactccagcctgggcaacaagaatgaaactccatctcaaaaaaaaaaaaaaaaaaaaaaagaaagaaaagaaaagaagcacttaaagaggctgaggcaggcagatcacttgaagtcaggagttcaagaccagcctggccaacatggtgaaacctagtctctactaaaaatactagaattagccagacgtggtggcacatgcctgtaatcccagctactcgggaggctgaggcatgagacttgcttgaacctaggaggtggaggttgcagtgagctgagaacatgccattgcactccagcctgggcaacagagcaagactccatctcaagaaaaaagaaagagagagaaagagaaatatagacatatgttattagtcccccaggacctcttcaaaagatctctcttttcctttcttatttctaattaccatactacataccacctccattatgtcagaatgtgccctatttacgtggatttgtctaaagtcatggaactctgagttacattccccgtatttcacagagacacaatcagagcacacgctgatcttccgcctctcttcatttcctccatgtactctgtagctacctgttctcttctttgttcgtaggaagatctctgttgcgtggtgtgggagtttgtgccagctcatctttttattgtgctttctgtgagcagctatcaatgcctccaggtcttctctttaagaagaatgtttactctcaattgtttaaaaaactaactaaataggaagaagattgcaaatcctaacctttttggggttttatattgggggcaaaagttggcatctgcagtaaggattatttcattttcatctgaataaatgagcagtaataactttgctgacttgcagggctcattgtgatgccaaaggacattgtaaggtgcatatctgaattggaggaggaagaggggcatcctctgagccaggtgtggcaggaggtgacatcaaggagggttaggctgcgtaaacccagggacacaaggagctgcagtcggggaagaacaaggtctagcggatggagttggggggactgtgtctggagccaatgttctcagatgtgtctccggcaggcaggggcaagggctggtgcctggtttacagcattccttttggagtctggaatagtggggaaaactccctgtcttctctccccttaggagtctgcactatggaaacaacctgtcaatccagctcaaggcacacatagcccagacacccatgagaccctctccgtggggaccctagagcacctatcatgaacgaggagaccaagtaggtgatttttctctccccttcacctcctcttttcccctcctatctacttcgtcacttttctcctactgccaagactggtccctacccaaatctgccttactgggctgcccccaacacaacaaacctgcccttgaccatcattcagcatgagaatgtaatgatcagacacagaaaatcaggaagagttttgagacagcatctaatctacccattttagagatggtatgactgaggcttatataggaaaaaggcttgctcaaggtcacactatgagtgtatcagctaggataggccaggttacactgtagtacatgcaccctccaaagtcccagtgactcatggcaacaaaagtttatttcctgctcttgcttcctgtctcgtgtggattgactgggattgctcctccacatcatcctgtctcccacactcaggctaacagggtagccatgatttgcaatatttctggtccctggagtagaaaaaaagaaaaagtactgtcaattacaccttggttcttaaaacaactacaggcatgacatgagtcttttttagcatgtttcattgaccaaagcaagtttcatggctgtgcccaatttcaaggaggcagagaagtgtaatcccaccaaaggcctagaaagaggagaaagagtatctgtgaacagccctaatgcctaccacagagaattagtaacagagctgggccatggatctttcaaccatcgtcctctgtctccaagattattccccatggaaatctcaatgactgataatgatgccatgtgctttttctcctgaggatggttagccttaaagagatttgtgtcatatcctaaggggatagaacactaatgatggaaacaaaggtattgtgttagactggctggaggagaaatttgaggatgagaaacatcaccagaaatcacaccatccaggcactacttacttccatctggtgccatgctgccctggaccatttcttcatgggtagcatggatgctggacaccatagcctggaaaagaagttatgccctaggctatggccacatccttttgccgagatcacacaaaatccagggacttagccttgtctggtgccatctaggcctccaaggccttggaaatttactggcctgggaggcaagaaacctcagttctcctcctgcctctgtcatggacttgctgtgtgactgtgggcacaccctttgcccttccttggccatggtctttccgtctgcttagtggaggtggtgatccctgcctgaggatcatggtgtgagcatgtttcataaattctaagactctctgcctgagtgaggacctattgctattagcccagttgaggagaaatgaccagtggggctgacagtacatccaagtatgtctctactgcatgcccagggagcagctgggctctaaaccccaggacgcatagtactggcctcagcctctgggaattgggaaggctggcttctgggtggacctcctactcttttcagagttagaggtggactctctggagttgtgaggataaaataaggtatataaagcacttagacagtgcctaatacacagtgagtgctttccaagtgtgtactgctatgaggaaggacatagtaccagaaagtacatccggaaatgtgatagcatagtccactagatgatggaccaccatttagttggccaatccccaactgttggacatttaggttgtttccaatttttaataattataaataatcttgcagtgagcatctttgcaattaaatattgtatatacgttcatgatcgtttgccaaggttagagtcctagaaatggaattactgaatcaaaggaactgcacattatttaggcttttgctgtgtaaatgccccgtgccctctattggtacttctagaaggaggtggtttaagagttccagttcggccatcatgatggctcacacctgtaatcccagcactttgggaggccgaggtgggcagatcaccctgaggtcaggagtttgagcccagcctggccaacatggtgaaaccccatctgtactaaaaattacaaaaattagctgggcattgtggtgtgcacctgtaatcccagctactcgggaggctgaggcagaagaatcgcttgaacccgggaggcggaggctgcagtgagccgagattgcaccattgcactccagcctgggtgacagagcgagactctgtctcaaaaaaaaaagagttccagttcagaagggaagaatttgcttagcaaaagaggtgatggtctgtgttagctaggattagagttcactgtgagtagcagaaagcactaaacaacagtggcttaaccagaatggaagtgtatttccctgccatgtaacagaagtccaaagtcagtgagcacagggcagatgggcagctttaccttccaccttcctcagtatgggttccacctcatgattcaatatggctgcccaagatccagccatcccatcaacaatccagacaacaggaaggagcaaagaagaatagacaacatttctacttacattccactggccaaattacatggctacatataactgcaagggagactgggatataataatctattctagatgaccagagaatatttagtagttctaatactgaggaagaagggaagaacagattttgggagacaactagttgtctctgccatgaggttagctcagactgagagcagcataaatggttcatggaaataagaatgagtaatgcatcctcacgggactgtccacaggggatgaacaagaccattccagagagccagggtgcaggcacaaatggagtagggagggggtgcagaagaaacagactgatctctggagctgatccctgggcagagacatcaagactccatggagaggccacttccctgcctattttatgtcgctcaaatgtagggactggttcttgactgcttgacttccctagaaactcccttatcccccaactcaccttccccagatcaccttccccctagttcatctgtaccccactcacctgccctcaggtcacctgccccacaactcacctgttctccatctaatcttcctcccagctcccctgtcccccaaatcacctgcccccaatttgcttgtcctccagctcaccggttccccagctcatcttccttccagttcccctgtcccccagctcacctgcctgccctcagttcacctgtcccccagttcatcttcctcctagctcccctgtcccctagctcacctgtgccccagctcccctgtcccccagttcccctgtcccccagctcacctccccctcagctctcctgtcccccagctcatctgcccccagtttacctgtcccctagctcacctcccccccagtttacctgtcccccagctcacctccccccagtttgcctgtcccccagctcaactccccccaagttcccctgtccctcagctcatctgcccccagtttacctgtccccctcaactcacctatcttccctgtccctccagggctggctcctcatggaccccgttggcctccagctcggcaacaagaacctgtggagctgtcttgtgaggctgctcaccaaagacccagaatggctgaacgccaagatgaagttcttcctccccaacacggacctggattccaggaacgagaccttggaccctgaacagagagtcatcctgcaactcaacaagctgcatgtccagggttcggacacctggcagtctttcattcattg

SEQ ID NO: 13013 - DNA, 594 bp, Homo sapiens
acagatgaggacgctgaggtacgaagaggctgcgtaacctaccagggtcacacagctttggtgtggagtagggactcaaatccagggccctggtacggaggcatttgccctcaccaagattcaggcactgagagaagctgacgggcctagagaatggcaagacttgagatagcagaaggaaggagagagggtgagaaatggatccccgtgctgaggtctggtctggaaggagaagtctgcaaggagtctgcactatggaaacaacctgtcaatccagctcaaggcacacatagcccagacacccatgagaccctctccgtggggaccctagagcacctatcatgaacgaggagaccaaggctggctcctcatggaccccgttggcctccagctcggcaacaagaacctgtggagctgtcttgtgaggctgctcaccaaagacccagaatggctgaacgccaagatgaagttcttcctccccaacacggacctggattccaggaacgagaccttggaccctgaacagagagtcatcctgcaactcaacaagctgcatgtccagggttcggacacctggcagtctttcattcattg

SEQ ID NO: 13014 - DNA, 5832 bp, Homo sapiens
gtccgagctcctttttgatctgtacctgagccctgaatcggaccacgacactgtcttccagtacctggagaagaacgctgaccaagtcctgctgatctttgatgggctagatgaggccctccagcctatgggtcctgatggcccaggcccagtcctcacccttttctcccatctctgcaatgggaccctcctgcctggctgccgggtgatggctacctcccgtccagggaagctgcctgcctgcctgcctgcagaggcagccatggtccacatgttgggctttgatgggccacgggtggaagaatatgtgaatcacttcttcagcgcccagccatcgcgggagggggccctggtggagttacagacaaatggacgtctccgaagcctgtgtgcggtgcccgcactgtgccaagtcgcctgtctctgcctccaccatctgcttcctgaccacgccccaggccagtctgtggccctcctgcccaacatgactcagctctatatgcagatggtgctcgccctcagcccccctgggcacttgcccacctcgtccctactggacctgggggaggtggccctgaggggcctggagacagggaaggttatcttctatgcaaaagatattgctccacccttgatagcttttggggccactcacagcctgctgacttccttctgcgtctgcacaggccctgggcaccagcagacaggctatgctttcacccacctcagcctgcaggagtttcttgctgccctgcacctgatggccagccccaaggtgaacaaagacacacttacccagtatgttaccctccattcccgctgggtacagcggaccaaagctagactgggcctctcagaccacctccccaccttcctggcgggcctggcatcctgcacctgccgccccttccttagccacctggcgcagggcaatgaggactgtgtgggtgccaagcaggctgctgtagtgcaggtgttgaagaagttggccacccgcaagctcacagggccaaaggttgtagagctgtgtcactgtgtggatgagacacaggagcctgagctggccagtctcaccgcacaaagcctcccctatcaactgcccttccacaatttcccactgacctgcaccgacctggccaccctgaccaacatcctagagcacagggaggcccccatccacctggattttgatggctgtcccctggagccccactgccctgaggctctggtaggctgtgggcagatagagaatctcagctttaagagcaggaagtgtggggatgcctttgcagaagccctctccaggagcttgccgacaatggggaggctgcagatgctggggttagcaggaagtaaaatcactgcccgaggcatcagccacctggtgaaagctttgcctctctgtccacagctgaaagaagtcagttttcgggacaaccagctcagtgaccaggtggtgctgaacattgtggaggttctccctcacctaccacggctccggaagcttgacctgagcagcaacagcatctgcgtgtcaaccctactctgcttggcaagggtggcagtcacgtgtcctaccgtcaggatgcttcaggccagggaggcggacctcatcttccttctttccccgcccacagagacaactgcagagctacaaagagctccagacctgcaggaaagtgacggccagaggaaaggggctcagagcagaagcttgacgctcaggctgcagaagtgtcagctccaggtccacgatgcggaggccctcatagccctgctccaggaaggccctcacctggaggaagtggacctctcagggaaccagctggaagatgaaggctgtcggctgatggcagaggctgcatcccagctgcacatcgccaggaagctggacctcagtaacaacgggctttctgtggccggggtgcattgtgtgctgagggccgtgagtgcgtgctggaccctggcagagctgcacatcagcctgcagcacaaaactgtgatcttcatgtttgcccaggagccagaggagcagaaggggccccaggagagggctgcatttcttgacagcctcatgctccagatgccctctgagctgcctctgagctcccgaaggatgaggctgacacattgtggcctccaagaaaagcacctagagcagctctgcaaggctctgggaggaagctgccacctcggtcacctccacctcgacttctcaggcaatgctctgggggatgaaggtgcagcccggctggctcagctgctcccagggctgggagctctgcagtccttgaacctcagtgagaacggtttgtccctggatgccgtgttgggtttggttcggtgcttctccactctgcagtggctcttccgcttggacatcagctttgaaagccaacacatcctcctgagaggggacaagacaagcagggatatgtgggccactggatctttgccagacttcccagctgcagccaagttcttagggttccgtcagcgctgcatccccaggagcctctgcctcagtgagtgtcctctggagcccccaagcctcacccgcctctgtgccactctgaaggactgcccgggacccctggaactgcaattgtcctgtgagttcctgagtgaccagagcctggagactctactggactgcttacctcaactccctcagctgagcctgctgcagctgagccagacgggactgtccccgaaaagccccttcctgctggccaacaccttaagcctgtgtccacgggttaaaaaggtggatctcaggtccctgcaccatgcaactttgcacttcagatccaacgaggaggaggaaggcgtgtgctgtggcaggttcacaggctgcagcctcagccaggagcacgtagagtcactctgctggttgctgagcaagtgtaaagacctcagccaggtggatctctcagcaaacctgctgggcgacagcggactcagatgccttctggaatgtctgccgcaggtgcccatctccggtttgcttgatctgagtcacaacagcatttctcaggaaagtgccctgtacctgctggagacactgccctcctgcccacgtgtccgggaggcctcagtgaagtgcctaggaagctggcatgtctgggcaccgtgcttccccaggcccttctctctgcagcctgggctctgagcagagcttccggattcacttctccagagaggaccaggctgggaagacactcaggctaagtgagtgcagcttccggccagagcacgtgtccaggctggccaccggcttgagcaagtccctgcagctgacggagctcacgctgacccagtgctgcctgggccagaagcagctggccatcctcctgagcttggtggggcgacccgcagggctgttcagcctcagggtgcaggagccgtgggcggacagagccagggttctctccctgttagaagtctgcgcccaggcctcaggcagtgtcactgaaatcagcatctccgagacccagcagcagctctgtgtccagctggaatttcctcgccaggaagagaatccagaagctgtggcactcaggttggctcactgtgaccttggagcccaccacagccttcttgtcgggcagctgatggagacatgtgccaggctgcagcagctcagcttgtctcaggttaacctctgtgaggacgatgatgccagttccctgctgctgcagagcctcctgctgtccctctctgagctgaagacatttcggctgacctccagctgtgtgagcaccgagggcctcgcccacctggcatctggtctgggccactgccaccacttggaggagctggacttgtctaacaatcaatttgatgaggagggcaccaaggcgctgatgagggcccttgaggggaaatggatgctaaagaggctggacctcagtcaccttctgctgaacagctccaccttggccttgcttactcacagactaagccagatgacctgcctgcagagcctcagactgaacaggaacagtatcggtgatgtcggttgctgccacctttctgaggctctcagggctgccaccagcctagaggagctggacttgagccacaaccagattggagacgctggtgtccagcacttagctaccatcctgcctgggctgccagagctcaggaagatagacctctcagggaatagcatcagctcagccgggggagtgcagttggcagagtctctcgttctttgcaggcgcctggaggagttgatgcttggctgcaatgccctgggggatcccacagccctggggctggctcaggagctgccccagcacctgagggtcctacacctaccattcagccatctgggcccaggtggggccctgagcctggcccaggccctggatggatccccccatttggaagagatcagcttggcggaaaacaacctggctggaggggtcctgcgtttctgtatggagctcccgctgctcagacagatagacctggtttcctgtaagattgacaaccagactgccaagctcctcacctccagcttcacgagctgccctgccctggaagtaatcttgctgtcctggaatctcctcggggatgaggcagctgccgagctggcccaggtgctgccgcagatgggccggctgaagagagtggacctggagaagaatcagatcacagctttgggggcctggctcctggctgaaggactggcccaggggtctagcatccaagtcatccgcctctggaataaccccattccctgcgacatggcccagcacctgaagagccaggagcccaggctggactttgccttctttgacaaccagccccaggccccttggggtacttgatggccccctcaagacctttggaatccagccaagtgatgcacccaaatgatccacctttcgcccactgggataattgactcaggaaagaagagcctcggcagggcgctctgcactccacccaggaggaaggatacgtgtgtcctgctgcagtcctcagggagaacttttttgggaaccaggagctgggtctggacaaaggagtaccctgcattacgtgggatatgtgtgatcaattggggacatgcgacacacaatgagggtgtcatgacaatgcatgacacgtacggttatatgtggcagtgtgaccccttgacatgtggcgttacatgaaagtcagtgtggcacgtgttctgtggcatgggtgctggcatcccaagtagcaggatacatgattgttggtctatatatgacacatgacaaatgtccatgtcacaggactcatggctggccagatgacctcaggctggcccaagatctaatttattaatttttaaagcaaatacatatttatagattgtgtgtatggagcagctaagtcaggaaaagtcttccgcccgagctgggaggggagagtgtccatgcactgaccagtccaggggctcaagggccagggctctggaacaagccagggactcagccattaagtcccctcctgcctcaatcctcagcctacccatctataaacttgatgactcctcccttacttacatactagcttccaaggacaggtggaggtagggccagcctggcgggagtggagaagcccagtctgtcctatgtaagggacaaagccaggtctaatggtactgggtagggggcactgccaagacaataagctaggctactgggtccagctactactttggtgggattcaggtgagtctccatgcacttcacatgttacccagtgttcttgttacttccaaggagaaccaagaatggctctgtcacactcgaagccaggcttgatcaataaacacaatggtattcc

SEQ ID NO: 13015 - DNA, 7493 bp, Homo sapiens
tggcatctggtctgggccactgccaccacttggaggagctggagtgagttgcagagtggagggattggggacaagtggcccagctgagggtgaggggtggagaagagagcagggcgtttgggagggcaggcaatgagacttcaaccaatgacccttcccctgatgaagtgcagcagttctgggtgtggcctggggaaggaagagcaccacagttttggtctgaatttcgccactgactcacagaggggctgtgggcatggctgttccactctgggctttgattgccttatctatgaaaatggggctcatgagccttgctctgctgggctggctgtgggagtcaggctacggagagggctgaagaacaagagggtgtgtgtgtgtgtgtgtgtccctagtcccccagcttcctctctgcagccttcatccagggcatagtttctcagctgggccagctgtgactatcatgcctacccagagcctgagccctggagctagggatacccatggggaacctggacagcgagggtggcccagggcatgcagatgcagagttggcctcccaggggacagagcaggagaggggagctgacaggacagctcagctccagggctgggcaggctgcgctaacccttgcctctgcctggtcttctgcagcttgtctaacaatcaatttgatgaggagggcaccaaggcgctgatgagggcccttgaggggaaatggatgctaaagaggctggagtaagtagtgatggtggttgtgggtgagtgagtggtgggggtggttaatggatggtggaagtgggtgagtggtggggttggttaatggatggtggaagtgggtgagtggtggggttggttaatggggaatggggtgagtgagtggtgggagtggttaatggggaatgggctgagtgagtggtgggagtggttaatggggaatggggtgagtgagtggtgatggtggttaatggggaagggtgtgagagtggtgatggtggttaatggggaagggggtgagtgagtggtgatggtggttaatggggaagtgttgtgagtgagttgtgttggtggttaatggggaaggagatgagtgagtggtgttggtggttaatggggaagggttgtgagtgagtggtggcgttggttaatggggaagggggtgagtgagtggtgatggtggttaatggggaagagttgtgagtgagtggtgttggtggttaatggggaagggggtgagtgagtggtggggttggttaatggggaagtgttgtgagtgagtggtgatggtgattaatggggaagggttgtgagtgagtggcgttggtggttaatggggaagggagggagtgagtgatgatggtggttaatggggaagggttgtgagtgagttgtggggttggttaatggggaagcgttgtgagtgagtggtgatggttggttaatggggaagggttgtgagtgagtggtgatggtggttaatggggaagggggtgagtgagtggtgttggtggttaatggggaagtgttgtgagtgagtggtgatggtggttaatggggaagggttgtgagtgagtggtgttggtggttaatggggaagggggtgagtgagcgatgatggtggttaatggggaagggttgtgagtgagtggtggggttggttaacggggaagggggtgagtgagtggtggtggtggttaatggggaagggggtgagtgagtggtgttggtggttaatggggaagggggtgggtgagtggtgatggtggttaatgggaagggagtgagtggtgatggtggttaatggggaagggttgtgagtgagtggtgatggtggttaatggggaagggggtgagtaaggggtgggggtggttaatagggaagagttgtgagtgagtggtggggttggttaatggggaagggggtgagtgagggatgacagtggttaatggggaaaggagtgagtgaggggtgatggtgcttagtgctgcatggtcagtgagtagcatgcctaggaacctttgcatgttttgtgaacacaaaccgccatgtttctggatggacccaggtgagctgaatgcccttacatgaccttttactttctattctggatctcagtgccagcaagaaccttggtcataggaaacagaatacacaactcaaagcaatccaagacagaaatatattggcttatgtcatggaaaattacgaggccaatgacttcaggcacagctggatccaggggttctatatttgtcaggcttctctctcacacacttcactctggcccttactctttctctgtccaccttggcttccttctcaggcaggccatccctgcacctgcaggcttactttctctcagcttagtggaaagggagtaccattctctctgtggttacaacaaaaggtcctagactgagtctcactggactagcttgagtcacctgccccaccctaaagcaatcactgtggctgtgagcacaaaatattctcctcactggccagacctgggcgcatgcacaccctatcttctggacttagaggggtggtatttcaggatgtgagtaacagaagaggaaagaaactctgggcagaaaaaaatctacagatgtccactacatttgtctacagttgtttccttggtaactggcagcttttactactctcccccataatttgaagtcatcaaattcttagaaatgccagaaacagcctcagtctaaaagacaggtccccgtcctgcacagattcctgtttagacagtatctggacagaaaatttaacagaatatcttctgcttttcatctcttaactttttctgatgaccaaaaaagttccatctttctagaaatatgtaacaaataacatgaaatgccccggggatgacaccccctgagaaaacttctgttgaacggtttgtgaatttttctccagatttttttttctacatatgttttgaattcagcttgaaagtagccttttgactttttgccccttaacattgaaattcttccgcttgtccctctttgcttgtcctggggagaggatcaggtaaaaggagaagagggattacagagacctttgaccacagggccctcctgtcgtctcactggtctgtttctttgcccactgtccatgtacctgcatctcggctcagccttctggaagcttttatttaggggattggaggcccagtgaggtcattcattggctcattcatgcattcgacaaatatgtactgagctgggcacctgggccggggacaggacagattcatccatgcccctgggggcctttttcttcctcctgatttcccaggcaccatgtgctgctccttacctcctgctgccttagttgccctatctgtaaactgggcataatatcttccctgtccgaaggaaggggatggatcgtcagtgcccggaggtctcttcccatctcagatctgtcatttccaagtgtaactccccacaggcagttaccctcaaatccagtcagcttcttccagctgtatacctgtgatggagtgggtaggagcatggaccctagttaggagcctcactgcctgggttcaactctgggtggggtaactgacacttccagtttgcttggagctttccccattttggcacccaaagtcccacatccaggaaaaactcttctgttctgagccaaccaagacagttgaccatcttttgcttctgcctcttattttattatttatttatttgagacccagtctctctccgttgcccaggctggagtgcagtggcacagtcttggctcactgcaacctccgcctcccgggttcaagcaaccctcctgcctcagcctcccaagtagctggcattacaggcacatgccaccaggcccagctaatttttctatttttagtggagatggggtttcactttgttggccaggctggtctcgaactcctgacctcaggtgattcacccgccttggcctcacaaagtcctgggattacaggcatgagccattgcgcccagccagttctgtttcttaatgtgtgaactcgtgccagtccctcagcctctctgttctttggcctcctcatcttaactttgaggataagagcaatctcccctgctacggttgttgtgagtattaaatgagataatatgtgttacagtcttagagtctggtcagagttcacactctacaagtgctagctattgttattctcctctcctgcctaggctgggggcctctagaagtacaatcgcctgggtcacatatggttggggctcaggaatgggagttctatagtttttggttctgttcctgaagcagccactttgtgtatgaccttaagcaagttctctaactctctgaaccttggtgttcctcacctgtaaaatggggacgataataaacccacctttccagatggccccaagccctgagtttggcccacattttatgatcaatgtgtgaccgccattattacggatcattagtcttggtccatgtggttcagaacatagaactgctgcctgcctgacctcagtaattcatgcagagaaacagcatttggacctcccagtacagttcattttgtagaatttttacactgtgtggatataagtggctgtcttggaggtccctaggcttgctaagcacagaggcctcagacccccagactggacagtgccccacccccagatgtcaagttcacctggcctcctcttctccagcctcagtcaccttctgctgaacagctccaccttggccttgcttactcacagactaagccagatgacctgcctgcagagcctcaggtgagtgaccgagcggccccatgggaatgagtgggaagaaacacttcccactcagttgggaccacatccagggaagcactgaggccacctcccaggggatcctttgcggatccctcccaggcccatccctgtgccctcccaggtgggtgcccactgctcttgccttctaatgccatcagcttcctcctggttacaaaagtggcctaaagggcttaggcccacgtcgtagaacaacccttgaggcacacacacagttcaccctgggctcttgttaaaatgctcattctgattccccaggtctggaattctgcctagactgtgcttttttttttttttttttttttttttttttttttttttttttgagttggggcctcactgtgtggcccaggctggagtgcagtggcaatgcacaggtgcaatcgtgttgcactgcagcctcaaactcctgggcgaacgtgatcctcctgcctcaccctcctaagcagctgggactacaggcctaaggcgttgcacccaaacttagcatttctttttttgtttgtttgtttttgagacagagtttcgctcttgttgcccaggctggagtgcaatggcacaatctcagctcactgcaacctccgcctcccgggttcaagcgattctcctgcctcagcctcccgagtagccgggattataggcatgtgccaccacgcccggctaatttttgtatttttggtagagacagtgtttctccatgttggtcaggctggtcttgaacgtccaacctcaggtgatctgcccacctcggcctcccaaagtgctgggattacaggcgtgagccaccacgcctggcttcagactctgcattttctaacaagcttccgggtggtatcaattctgggggccacggtcagcactttgagtagtgtgggtctagactcagatggggtggccttcctacactccctttgtgatttcactccctgctgctaggataaataaacatgacacttactttcaatgtgatttttcaaaacatgaaatcttgtgactaaaaacaaatccaagcagtgacacaaagcattgctttgtttatatccaagtacacctcctaccccctacctcgggcagagcagagtaggtaggaaatgaggttagagagttccaggaggttatatcatattggaccatttcacccaaaattaatttactgaaaggtgatccattaaagtgtatttatttatttctattttatttttattttttgagacacagtctcactctgtcgcccaggctggagtgcagtggcatgatctcacttcactgcaacctctgcctcctgggttcaagcgattctggtgcctcagccgcccaagtagctgggattacaggtatgcaccaccacgcccagataatttttgtatatttttagtacaaatggggtttcaccatgttggccgggctggtctcgaacccctgacctcaaatgatccacctgcctagactccgaaagtgctgggaatacaggtgtgaaccactgctcccagccccattaaaatttaatttgcaaaataaaagaaagtaaaaacaacatgcaaacaaatacttcccaaggggctaagaccatttgcctcagctatttattgttttttcctacccaggcagagcaaggtcagggctcagtaaagacaataccctgggtttaaggaaaaacctaccatttgcatggatgagaacacatatgcccctgagaactgatctgcgtgaatcagagaatcccacgtgaaagtggcattcagccgggccagcccggagatccctgacacagaggctgaggtgaagcttggcaaagaaatgtagagactcctcctgggccaggggctctggatttgtttccacccagcctgcaagtccctaagtctctggccagtcacagctcactgctggctctcaagttttctcacctggacactggggacaataattcccaccttgctcaccactccccacctgccatgacccccagaagttttgctaccagcatatgaattcctgggcgtgtaaggctttgcaaactgtagagttcttagcacagcacctgcaaaggcctttaagctcctgaaagcctcttggtctattccctgcttttccagactgaacaggaacagtatcggtgatgtcggttgctgccacctttctgaggctctcagggctgccaccagcctagaggagctggagtgagttgcccattctgcccccagacccaggacaattttggccgggaaagatgacaagggcaaggggctacctgagcacgccctttgcttcttcatctcatctccttcacccacttctacactgtgtaaacaacctggggcctagaagcttgggggacccaaagacaggatgtaagagtgtcaattgtagcaagagggatttaggtcagacaatggggagaacatcctaaacagaagccaagggttaggagctgtcactcaacatggggtgatggggctctctgtgtgagtcgaggcccttcctgggacttcagcctccccttctttttctgggagtggggtgtggacaagatgagacggcagaaggctgatgaagctgttttctcccccaagcttgagccacaaccagattggagacgctggtgtccagcacttagctaccatcctgcctgggctgccagagctca

SEQ ID NO: 13016 - DNA, 485 bp, Homo sapiens
tggcatctggtctgggccactgccaccacttggaggagctggacttgtctaacaatcaatttgatgaggagggcaccaaggcgctgatgagggcccttgaggggaaatggatgctaaagaggctggacctcagtcaccttctgctgaacagctccaccttggccttgcttactcacagactaagccagatgacctgcctgcagagcctcagtctcactctgtcgcccaggctggagtgcagtggcatgatctcacttcactgcaacctctgcctcctgggttcaagcgattctggtgcctcagccgcccaagtagctgggattacagactgaacaggaacagtatcggtgatgtcggttgctgccacctttctgaggctctcagggctgccaccagcctagaggagctggacttgagccacaaccagattggagacgctggtgtccagcacttagctaccatcctgcctgggctgccagagctca

SEQ ID NO: 13017 - DNA, 23465 bp, Homo sapiens; identical to SEQ ID NO: 1222

SEQ ID NO: 13018 - DNA, 6082 bp, Homo sapiens
agtcgtgcgtccacgcgtttcgaaagatggcggcgtccaggagcgcgggagaggccggcccgggcggctcccagggacgcgtggtccgcatgaagcgcagaggcgggcgcgggccgcgccgcggtcctgctggcggtggggagaaggccctgaagaggctgaagctagcggtggaggagttcgtgcacgcgacttcggaaggcgaggctcccgggggttgcgaggggcgcggcgccccggtgagctttcgcccgggagggagaaaaagccgtaaggaactgaggaaggagaagcggcacctgcggaaagcacgccggctgcagaggacggcgggccccgaacagggtcccggcctgggaggccgaagcggagccgaagaagccagcggtcaccggcaggacacggaggagcgcgcccgcccagcccctagtcgggacccctcgcctcccaggaagccgcggccgtcccgggtcaaggccaaggccacggccgccaccgcaaagaccagaccctccgcagccgccaccgccgctgcccggaaacgggcgcttttagcggcgaacgaggaggaggaccgagagatccgaaagctggagcgttgcctcggtttgaacaagcgcaaaaagaaggacggcagcagctccgtgccgctgagctttgcacgcgacggtcttgactatattctgggagccctggagtctgggaaaaatagcggcttgtacgacagcagtggtgaggaggaggaagatgccggacagacactccccgaaagtgacttagagagtgactcccaggacgaaagtgaggaggaggaggagggagacgtagaaaaggaaaagaaggcgcaggaagcagaagcgcagagcgaggacgacgacgaggatacagaagaggaacagggggaagaaaaggaaaagggagcgcaggagaaaaggagggggaagagagtccgttttgcagaagatgaagaaaagagtgaaaattcctcggaggacggtgacataacggataagagtctttgtggaagtggtgaaaagtacatcccacctcatgtgaggcaagctgaggagacagtggacttcaagaaaaaggaagaactagaaaggctgaagaaacatgtaaaaggtctacttaacaggttgagtgaacccaacatggcttccatcagtgggcagctggaggaactgtacatggcccacagcagaaaggacatgaatgacaccctgacctccgctctcatgggtgcctgcgtcactgcctcggccatgcccagcagactgatgatggagcatgttctcttagtcagcatccttcaccacacagttggaatcgaggtcggtgcccactttctggaggcagtggtgaggaagttcgatgccatctataaatacggaagcgaagggaaagagtgtgacaacctgttcaccgtcattgcccatttatacaacttccacgtggtacagtctctcctcatcttcgacattttgaaaaaactgattggaactttcaccgaaaaagatattgaactgatcttgttaatgctgaaaaacgtgggtttttcattgaggaaagatgatgctttatcacttaaggaattgatcactgaagcccagaccaaagccagcggggcaggcagcgagtttcaggaccagaccaggattcggtttatgctagagacgatgttggccctgaagaacaatgacatgcgcaaaattccaggctatgaccccgagcccgtggagaagctgaggaaactgcagagagctttggtccgcaacgccggctcaggttctgagacgcagcttcgcgtctcctgggacagtgtcttgagtgcggagcagacgggtcgctggtggattgtggggtccgcctggagtggggccccgatgatcgacaacagtcaccatacgcacctgcagaagcagcttgtggggacggtcagttcaaagatcctagaactcgcccggaagcagaggatgaacacagacatccggagaaacatattctgcacaataatgacaagtgaagattttttggatgcttttgaaaagcttctgaagcttggacttaaggatcagcaggagagagaaatcattcacgttctcatggattgctgccttcaagagaaaacttacaatcccttctatgctttcctggctagcaaattctgtgaatatgaaaggagatttcagatgactttccagttcagcatatgggacaaatttcgggacttggaaaacttgccagctacgaatttctctaatttggttcatctggtggcccacttgttgaagacaaaatcgctttccctttccatcttaaaggtagttgaattcagtgaattggacaaacccagagtccgttttttacgaaaagtattaagtatcctattaatggaaacagaagttgaagacctcagtttaattttcacaagagtatctgacaacccaaagctgggggtgttacgtgagggtttgaagcttttcatcagccacttcttgctaaagaacgcacaggcccacagaagcgccgacgaagccaacgtgctgagagagaaagctgaccttgcaacgaagtgtctgcaaggaaaagcttccctgagaatgtagtcagggaaggaaggagggcaggtggccctttgactgtaaaatgtccttggtaaacccaaaggcttattctgttgcctgcgtgtgaatgtttggtagagctatatcattgtctgttaatgtattatattttgagattttttttgatctaaggttttattgtttgtatttcaagccattttcaaataactatcttgggggtgagaggagaaggagggagggaaaaggggtcaggcacactggacagggttctctaagcagtgaggctggtgtgtatgattgtcttaaaattttttaatagatatggccgagcgtgatggctcacccctgtaatcccagcactttgtgaggccaaggtgggcggatcacttgaggccaggaatttgaaaccagcctgggcaaaaccctgtctctactaaaaatataaaaattagccaggcatgatggcacatgctggtaatagcagctactgaggtggctgaggcacaagaattgcttggaccctggaggtagaggctgcagtgagccaagattgtaccactgtactccagcctgggctggacagtgagacttttgacagtgagactgtcaaaaaaaaaaaaaaaattaatagataaaacaggccactagagggtgcagttataaagaaattgatgaggtttttacctttttaaaatattggttagaagttcaaaaaccatcccttaaaggtgattgtttttttgagacagagtcttgctctgtcacccagagtggagtgcagtgtcctgtaatctcagctcactgcaacctctacctcccgggttcaagcgattctcctgcctcagcctctttagctgggactacaggcgcacgccaccacgcccggctaatttttgtattttagtagagatgggtttcaccatgttggcaaggctggtcttgaactcctgacctcaggtgatacacccatctcggcctcccaaagtgctgggattacaggcttgagccaccacgcccagcttaaatgtgattcttgatactgttttaagtatttaggttgcaattaactttggcaaagtcagtcgacataagccctgtggatatggccttatgtacactgtaatgcagacaggtgcttttcatcattcatgtaacattctcacacagttgaggatattcatctcctcaccaattccagattgtaaatgtaccatcttaaacaactctgaggtcaccaaacagtagttatttgactgttaataggtgctacttgcttgcaaggatttggagatgtaaacatgaagaaaatatagttactgcctgcaaagaattaacatccgtctagtgggagaaacaaacacaccccactcactaagtatggaaaactgattctgggaggaagcagaaatgtccctagataacagcatgtattgcagatacccaaatgtttattgttttctcagcccttcaattttgcttttctctctcaaatgctacagactcaatttaaatcttacctttgattgttgaaaaaagtcactaagatgtgaatacagaatagacattgagaggttatatatgtccaaaactcatctgtccagcagtcaccgtcctcttcagagtggtcacgttgggcagatgggcacaggtgctggtgatgcctctcctgggcaaaacgccccatttgtggcactttcagatactatttatttactttttaagagagagacaggctcactctgtcacccaggccagagtgcagtggcacgatcatagttaccgcagcatcaaattcctggactgaagcggtccttttgcctcagcctcgcggatagctaggaccacaagcagtagagacaagatctccgtatgttatacaggctggcctcaagtgatcctcttaccttggcctcccaaacaccgggattataggcgtgagcccccgtgcctggcctcaaattttattttagctcgaccctatggcagtttgtgtttggaaatcgtgatgtgaagtcatcagtatctgtgcatatccctaaactaatggtttaagctttgaagcatgcgcaagcaacatgaacaactgaatacagaaagtaactgaaagcagcacagagactgtgtcgtccctacagacttctaaccctgcattcagcaacatcattcgacccgaagccagattcaaaccctatgtcttctagcaggttctgaatttagaggacaaataaggtgacaggtactaagagaagagtgaattaagtgaaaatcttccctttgttaaggagctttttaacaagagtgtctttgctgggtggtgattgggatgtaacagatcagttctactggacttgtagcttgatagtgaaataaggagcttgggctaaggtataaatcaacacactgcttccttcctccagaaggtcttactgtgaaggaaaaaatgtcagttgaactaaattgtgcttcacgcctcggtagatttgcattctgatgcaagcccccaacctcacggaccaagaggatccctggctgcctgtgaatggcccacatttgagtggtgctaacttgatgtgagtaggcattaattatgggtgcggctactaagatgggaaaaactatcacgacagtggcaccacctgatttcatgatgtaccatatgcagtaacccatgtttgaggtacagaattgaagctgatttttctgcaaaagatgaatttctataaacaatcccatttttatattttattattaaaacaaaaatacctctctttgctagagagttatatgtatgacttaaattattagctatggtttgcatttagtacatggcagattgcctgtaagtctgttcattttaacaacatacagggctgggcacggtggctcacgcctgtaatcccagcactttgggaggttgcgggtggatcacttgaggtcaggagttcgagaccagcctggccaacatggcaaaaccccgtctctatgaaaaatataaaaattagctgggcatggtggcaggcacctgtaatcccagctactcgggaggctgaggcaggagaatcgcttgaacctgggaggcggatgttgcagtgagcagagatcgtgccattgcactccagcctgggaacaagagtgaaactctcaaaagcagaaacaaaaacccaacatatatgggctgttagatagtaattgtaatttcgtataaatagtaaatgagtacatcttgattaaaagctatgaattcagaattgcttttaaatatatagggggttttttgaaatttattacagtgcaattgaaaatacacttaaaatactgcaggatgcttagtgctcagtgttatgtatgaacttgtggactttacaatgcaggttgagaactgctaatgtatagaatgactaaacagctgtctttcagggtatcatttttaaaggtataaggaacaaactttaatgtattgaaatgcataaataaaatttattttttatattttg

SEQ ID NO: 13019 - DNA, 6007 bp, Homo sapiens
acccaacatggcttccatcagtgggcagctggaggaactgtacatggcccacagcagaaaggacatgaatgacaccctgacctccgctctcatgggtgcctgcgtcactgcctcggccatgcccagcagactgatgatggagcatgttctcttagtcagcatccttcaccacacagttggaatcgaggtacagttgtaccttttctccaggctgtcactagtgtctcatggtgattattttaatgataggcttgataagtgcgtaattgtgtgctgtgggtggttcttgtgtcgattcctttttgttgtgaataaatactctattgtctatgtcatgtagttgtaaagagcattcaggaagtacttgattacttgattttgcttaactttgcttttttgttctgtccattcttttttttttttttttttttgagacagggtctcgctctgtcgtctaggctggagtgcagtggcacgatcacagctgcagactcgagtgatcctcccacctcatcctccagagtagctggaactgcaggcgcacaccaccaggcctggctaattgttttggtgggagcagaagtggagtctcactctgttgcccaggctggtgtcaaattcctgggctccagtgatcctcctgctttggcgtcccaatgtgttgggattacaggcgggagctgccatgcccagccctgttctgtccagcctagcatgtcttttatgttagttaattttcttctcgactgacatctcagacgtgccttcatttcctttgcacttctcccttaacactgatttatttcagatgtttggaagataatggttggtgtggtctcactactgaggtgttggtattgatgggagatgtgagagcactggggcatggaactgcctggacatgttcagggagacctggtgccctttctgtgtcatggccctttctcatcagtgaagtgggcttttgttgggattgaactgaacagtgtacagaaagcatctggcacccgacaggtgctaagtaaatgtccaccccacccccacatccctttcgtattcttcttgctccacaacccttgtggttaaagtcagagaggctctttggtgatggccttggttccacagtcactgccctcttctgggcctgttctctcttaattgaatacaggaaagtcataacactcccagtcagtatcccagttcccccaaggtagctgatttcagatgtgttgaagtaaatccgtccaactaaaggagattgttgtgaggttggtgaacgaatggagggttgggtcagtgaggcttagttttcccgtgatacagtatttacatgcaaatgcagtgtttaacccatttggatctttaaatgatagtctcttttaatggtggttctcttagttttttgccttctgacagctctactccaaaaaataggccacagcagcacagcatccctaaaagtctaattacctggtgtacgtttatatactttcgtctcctcctcacctttaatcctaaagtgtcccggtgagatcagggcagacctttactgaagcttgctttgcagtgcagcaggcaaagccgctgaagcgctatgtgaaattcccaagatcacgtcttgttaaaagtacacagaacttgttttctgggctcctaggcaagcatgctttctactgcaatgctagtcacattcatttcatttttatattactttctctcaattataatcttaacagttatttagagtcttaccaagtggggctctccaaagcttgctttaagatgcacatatttgccggccgggcgcggtggctcactcgtgtaatcccagcactttgggaggccgaggcgggtggatcacgaggtcaggagatcgagaccagcctggccaaaaaggtgaaaccccgtctctactaaaaatacaaaaaaaaattagccaggcatggtggcgggcgcctgaagtcccagctactccggagactgaggcaggagaatggcgtgaacccagcaggcggagtttgcagtgagccgagatcgcgtcactgcactccagcctgggtgacagagcgagactcagtctcaaaaaaaaaaaaaagatgcacggatttgccaaaatgaagtagccttcttgtcactggggcttctgtgctgaaggcggcatggggtgggtggagatgctgcctgagtacaaaacatgctgtaacgcgcacggtctgtgtcacttagatgaacttgtgcctccgagtcttcctgtgtccagtcgttaaggtcaacgagttagttcatgtaataggcataggaaagagctggcccacaataagcgctcattgaaggctcattatttatgtacagaaggagattttcgtgttttaattctgttcttcctctggctggcttttcctaccactgctgatttctttgttgttgctagataatgttctgatccacatttttccatgtctagcagtagttgcatggtggcagctttttgaaaggcctgtggggcattaggaagctgagggctggagagaggggcacaggcctgagcatctgagtgcgggactcttctgagctacatgggtcatctcagatatgaaaatctgcaccagctgctttgggaaccctcttgttattttttatttctaagagctgtcctcattttcatgtatgagcatgtgggagtctgttttcttgtcattacaaagtgatggaatcactgggtgccattcctgggccctgtgattaccataatcagggccattctgtgactttcttggtacctccctgtcctcctagaggacactggtatgcttcagctgacttaatcatcagaatgatcttagtataggcagtatctcagtgagttacaggaaaagccacagaccgtgaccacccacagcacatcaggaatttacttgattggaaaacatgagataattgggcctactttcatttaaacctttgctaattgcatgaaggacaatgaaatgacttgttccgaagggaagtcattacagtactttagttaatgacatccacagaaacttctgccagcgtgtgatgagctttcagggtgctggctccattcagctgctttcagtcctgtaccgagaaaaacattctgtgttaaagacgatggtgtcagctgctgaattgcttctgtaagtcctttaaaactcaaaaacccaatctatgtagattcatgttaaaatttccacatcagagttaacgtacaggatgtgcttgaataactttaccaacgtgaattttacttatattcttaaatgttatgctgttatattttattttgaagacattaaatggaacttcagatttagaattttgagaaattttgatgtaatatacataattgaaaacatacagccgggtgtggtggctcacgcctgtaatcctagcactttgggaggccgaggcgggtggatcatgaggtcaggagattgagaccatcctggctaacatggtgaaaccccgtttctactaaaaatacaaaaaattagccaggcatggtggcaggtgcctatagtccctgctactcgggaggctgaggcaggaggatggcgtgaacccagcaggcggagcttgcagtgagccgagatcgcaccactgcactccagcctgggcgacagagcgagactccgtctcaaaaaaaaaaaaaaaaaaaaaaaaaagaaaaagaaaatatacatgaatatgttttatgcctaaatttttattgacgtctgcagaattctaatttacttttaaaaattatatttgactataacatggttgccataatagaatgtgtcttccagtttatcttcattgaaggggcttgaatggaaactacaggttggcttggttaagtctcaggtctttacaaactgaagtgtatatccagtccatcagagctggcctccaggaagtcactgtggcctcccgccagtctgttgcctttctctggattcttctagcgttgatttctttgcagtccagcaatgatgtctgtgtacttccccatacactcaagactgtctggtggatctcagccttgcctgcgattttcactgacacccttagatctccatccagtcctgtctggatggcccctgttgaagcttaataacccctgagctggtcttgtccagccccactagcttgctgcccctcacgtagttcctggttacccagaccagaaacctgggagtcacagatccttcagcttttacagccggtgtcacacactgccatgcgttgctgtgttacccaggcccttcatccctggtccagcgcagctgcgttatttaggccatcgtctcctggctgggctgtgggggtcactctttgtcaccaccatgtccctgcttccgccttctccctccagtcccagcttaagttgagatttgacggaaaatgatgacacggtagtgttgccagcaagactgaaaacgactgttttctgccttcaagttttattatctctcttttacacagtgaaaaaacagggttccaggaacttgctgaagaccacacagacccacatgcaggtcttctcatccttcagtccacagttacggaattcgggataaaatgtaccagaacagcacaaggagaacacttaggccttgcttagctccaccaggcccggcagttcctggccccacttccgcccctcagggcagtgtctggtttacctgctggtccccatcagggcccagtgcccctcaaaccactggctgagccaagtgagtgtattcacaagctaccttagtgccagagactcagccctgggaaagtagggcgtctcctccgtgccacctggagcccttccagagattattaagtacctgtctatttggcaacctctgatattcagaatgtgttgcgtttatctgttttagaaatcactcgtattgcttccttgtaagaaatgaatttggggtaaaaatctgcaaaaaaatcttttaagaaatgaatattgttaggtagtggaactttttttttttttttacacagagtcttgctctgtcgcccaggctggagtacagtggcgcaatctcagctcactgcaacctccatctcctgggttcaagcgattctcttgcctcagcctcccaagcagctgggattacaggcatatgccaccacgcccggctaattttttgtatttttagtagacacggggtttcaccacgttagccaggatggtctcgatctcctgatcttgtgatccacccacctcagcctcccaaaagtgctgggtttacaggcgcacaccaccacacctggctaatttttttttgtatttttagtagaaacggggtttcaccgtgttagccaggatggtcttgatatctcctgaccttgtgatccacccacctccgcctcctaaattgctgggattgcaggtgtgagccaccgcacctggccagtagtggaatattttgagagacataggtgtgtttttaacatcatttttaacagttttatttttccaaggagtcagaatggctgctggccaaacagtgccccttggttgttgattttaacaagaggaaggtgcccttgcgtccaggctggggcactctggccggctgctctgggttgccgagggatgccttgttggaatgccctgccttgtggcactttgttaatttagaaagtgccagttctgtgtgttgaaggagaaaggaaggtttctaggaataacataatcttttttctgtgtggttctttcaggtcggtgcccactttctggaggcagtggtgaggaagttcgatgccatctataaatacggaagcgaagggaaagagtgtgacaacctgttcaccgtcattgcccatttatacaacttccacgtggtacagtctctcctcatcttcgacattttgaaaaaactgattggaactttcaccgaaaaagatattgaactgatcttgttaatgctgaaaaacgtgggtttttcattgaggaaagatgatgctttatcacttaaggaattgatca

SEQ ID NO: 13020 - DNA, 706 bp, Homo sapiens
acccaacatggcttccatcagtgggcagctggaggaactgtacatggcccacagcagaaaggacatgaatgacaccctgacctccgctctcatgggtgcctgcgtcactgcctcggccatgcccagcagactgatgatggagcatgttctcttagtcagcatccttcaccacacagttggaatcgagtgaaaaaacagggttccaggaacttgctgaagaccacacagacccacatgcaggtcttctcatccttcagtccacagttacggaattcgggataaaatgtaccagaacagcacaaggagaacacttaggccttgcttagctccaccaggcccggcagttcctggccccacttccgcccctcagggcagtgtctggtttacctgctggtccccatcagggcccagtgcccctcaaaccactggctgagccaagtcggtgcccactttctggaggcagtggtgaggaagttcgatgccatctataaatacggaagcgaagggaaagagtgtgacaacctgttcaccgtcattgcccatttatacaacttccacgtggtacagtctctcctcatcttcgacattttgaaaaaactgattggaactttcaccgaaaaagatattgaactgatcttgttaatgctgaaaaacgtgggtttttcattgaggaaagatgatgctttatcacttaaggaattgatca

SEQ ID NO: 13021 - DNA, 1955 bp, Homo sapiens
gatgttggccctgaagaacaatgacatgcgcaaaattccaggctatgaccccgagcccgtggagaagctgaggaaactgcagagagctttggtgagtcaaggaactttcaattctgttttgctcagagcttccgtgtcggcatgagcctgtcatgaaaatcaagaaatagtcagacctgcacgtcagggtggtgtctggtgagtgagagtgctcagaggcagagtgaacgcggctcggttttcctcaggggctgtcccagtggtctgggcgtgctcgtgcagaatgtccgtgtgtggggaagcccatgttgggcgagcgtcctctttgcctcaccccgggtgctaaacttgggctgcaccattggatcatccgatgctttcagagaaggccaagtccccatccggaccaaggaaattgggatgacgtaggtcctttgactctctctgacatgcagccaggatggagactggggcagcctccctgttggagtgagtctttcagcccctgtcatctcaagtccaaatcattgctgacccaggctcttccaggcatgtgctcacctgccactgagcctgaggcagctctgttactctctcctgttgggacagctttccaaacacagcgtgtttggggtgatggactctcaaacacaaaacactgagtttaccgctagttttggcatttttccaaacaggctaaccgtcccaattgccagtgacccattccagtattcatgcaccagaaatgtcatggtcaaaaacaaaaagccaccggtgatggaaggacggaatatgaaccaattaaaagcatttcattagctcttctctcttcatcaggtccgcaacgccggctcaggttctgagacgcagcttcgcgtctcctgggacagtgtcttgagtgcggagcagacgggtcgctggtggattgtggggtccgcctggagtggggccccgatgatcgacaacagtcaccatacgcacctgcagaagcagcttgtggggacggtagggacacccatgctcaaggctgccaggcagaggcacccccctgtgtggtgtgtggtcctggctttacctggagcagctctcttactgttcttgaatggtcactgaaatgtacaaggtttatctggaggccttacagaaattgctattaatattacattgtgatataattattccatttctgttgtatctttttattggactttaaaagatctaaaagttgaatggcacggggcaggggagcgcatgaggacctgaacgctcacggggcaggagtccgttgctgagacccctcaggctgccccccgggctgtgcattctaggctacaggctatggatttcacattgtggaaattcaagcccatttttcatccagacttccctcgttatcccctcatgtccttccctgtcccagattctgtgtcactcatggtcacggtttcccaggctctgccagtgactggttctctgttttattcatcgtcgcttgccctgaggttgaaccacgactgagaagcctcccacatgagtgttttctcccccagcggctgtggcttcactatgtgttccccttgcacagaggggcgttgcccgagagtggacttggtgccatccgcccacgtagacctcacagttctattcagtgacactgaagtacagtttggcacctctcgggaggcagtttgcatggagacatgcgtatgacttgtccattcatcgtgcttccaggtcagttcaaagatcctagaactcgcccggaagcagaggatgaacacagacatccggagaaacatattctgcacaataatgacaagtgaagattttttggatgcttttgaaaagcttctgaagtaagcatttgtgtgcacattttgacctattaatgagatgctgtaaaataagtaagttgatttgctttttgagttttggacgactgagtctgatgctgc

SEQ ID NO: 13022 - DNA, 1209 bp, Homo sapiens
gatgttggccctgaagaacaatgacatgcgcaaaattccaggctatgaccccgagcccgtggagaagctgaggaaactgcagagagctttggtccgcaacgccggctcaggttctgagacgcagcttcgcgtctcctgggacagtgtcttgagtgcggagcagacgggtcgctggtggattgtggggtccgcctggagtggggccccgatgatcgacaacagtcaccatacgcacctgcagaagcagcttgtggggacggtagggacacccatgctcaaggctgccaggcagaggcacccccctgtgtggtgtgtggtcctggctttacctggagcagctctcttactgttcttgaatggtcactgaaatgtacaaggtttatctggaggccttacagaaattgctattaatattacattgtgatataattattccatttctgttgtatctttttattggactttaaaagatctaaaagttgaatggcacggggcaggggagcgcatgaggacctgaacgctcacggggcaggagtccgttgctgagacccctcaggctgccccccgggctgtgcattctaggctacaggctatggatttcacattgtggaaattcaagcccatttttcatccagacttccctcgttatcccctcatgtccttccctgtcccagattctgtgtcactcatggtcacggtttcccaggctctgccagtgactggttctctgttttattcatcgtcgcttgccctgaggttgaaccacgactgagaagcctcccacatgagtgttttctcccccagcggctgtggcttcactatgtgttccccttgcacagaggggcgttgcccgagagtggacttggtgccatccgcccacgtagacctcacagttctattcagtgacactgaagtacagtttggcacctctcgggaggcagtttgcatggagacatgcgtatgacttgtccattcatcgtgcttccaggtcagttcaaagatcctagaactcgcccggaagcagaggatgaacacagacatccggagaaacatattctgcacaataatgacaagtgaagattttttggatgcttttgaaaagcttctgaagtaagcatttgtgtgcacattttgacctattaatgagatgctgtaaaataagtaagttgatttgctttttgagttttggacgactgagtctgatgctgc

SEQ ID NO: 13023 - DNA, 2068 bp, Homo sapiens
gacgatgttggccctgaagaacaatgacatgcgcaaaattccaggctatgaccccgagcccgtggagaagctgaggaaactgcagagagctttggtgagtcaaggaactttcaattctgttttgctcagagcttccgtgtcggcatgagcctgtcatgaaaatcaagaaatagtcagacctgcacgtcagggtggtgtctggtgagtgagagtgctcagaggcagagtgaacgcggctcggttttcctcaggggctgtcccagtggtctgggcgtgctcgtgcagaatgtccgtgtgtggggaagcccatgttgggcgagcgtcctctttgcctcaccccgggtgctaaacttgggctgcaccattggatcatccgatgctttcagagaaggccaagtccccatccggaccaaggaaattgggatgacgtaggtcctttgactctctctgacatgcagccaggatggagactggggcagcctccctgttggagtgagtctttcagcccctgtcatctcaagtccaaatcattgctgacccaggctcttccaggcatgtgctcacctgccactgagcctgaggcagctctgttactctctcctgttgggacagctttccaaacacagcgtgtttggggtgatggactctcaaacacaaaacactgagtttaccgctagttttggcatttttccaaacaggctaaccgtcccaattgccagtgacccattccagtattcatgcaccagaaatgtcatggtcaaaaacaaaaagccaccggtgatggaaggacggaatatgaaccaattaaaagcatttcattagctcttctctcttcatcaggtccgcaacgccggctcaggttctgagacgcagcttcgcgtctcctgggacagtgtcttgagtgcggagcagacgggtcgctggtggattgtggggtccgcctggagtggggccccgatgatcgacaacagtcaccatacgcacctgcagaagcagcttgtggggacggtagggacacccatgctcaaggctgccaggcagaggcacccccctgtgtggtgtgtggtcctggctttacctggagcagctctcttactgttcttgaatggtcactgaaatgtacaaggtttatctggaggccttacagaaattgctattaatattacattgtgatataattattccatttctgttgtatctttttattggactttaaaagatctaaaagttgaatggcacggggcaggggagcgcatgaggacctgaacgctcacggggcaggagtccgttgctgagacccctcaggctgccccccgggctgtgcattctaggctacaggctatggatttcacattgtggaaattcaagcccatttttcatccagacttccctcgttatcccctcatgtccttccctgtcccagattctgtgtcactcatggtcacggtttcccaggctctgccagtgactggttctctgttttattcatcgtcgcttgccctgaggttgaaccacgactgagaagcctcccacatgagtgttttctcccccagcggctgtggcttcactatgtgttccccttgcacagaggggcgttgcccgagagtggacttggtgccatccgcccacgtagacctcacagttctattcagtgacactgaagtacagtttggcacctctcgggaggcagtttgcatggagacatgcgtatgacttgtccattcatcgtgcttccaggtcagttcaaagatcctagaactcgcccggaagcagaggatgaacacagacatccggagaaacatattctgcacaataatgacaagtgaagattttttggatgcttttgaaaagcttctgaagtaagcatttgtgtgcacattttgacctattaatgagatgctgtaaaataagtaagttgatttgctttttgagttttggacgactgagtctgatgctgcctagggaggactgggctgttctcatgaccatccgctcacgctgttggattcgtgcatctctgggttagtcgtcatgttcctattaatttgcctctagtagttcctcatta

SEQ ID NO: 13024 - DNA, 593 bp, Homo sapiens
gacgatgttggccctgaagaacaatgacatgcgcaaaattccaggctatgaccccgagcccgtggagaagctgaggaaactgcagagagctttggtccgcaacgccggctcaggttctgagacgcagcttcgcgtctcctgggacagtgtcttgagtgcggagcagacgggtcgctggtggattgtggggtccgcctggagtggggccccgatgatcgacaacagtcaccatacgcacctgcagaagcagcttgtggggacggtcagttcaaagatcctagaactcgcccggaagcagaggatgaacacagacatccggagaaacatattctgcacaataatgacaagtgaagattttttggatgcttttgaaaagcttctgaagtaagcatttgtgtgcacattttgacctattaatgagatgctgtaaaataagtaagttgatttgctttttgagttttggacgactgagtctgatgctgcctagggaggactgggctgttctcatgaccatccgctcacgctgttggattcgtgcatctctgggttagtcgtcatgttcctattaatttgcctctagtagttcctcatta

SEQ ID NO: 13025 - DNA, 3357 bp, Homo sapiens
acattttgaaaaaactgattggaactttcaccgaaaaagatattgaactgatcttgttaatgctgaaaaacgtgggtttttcattgaggaaagatgatgctttatcacttaaggaattgatcactgaagcccagaccaaagccagcggggcaggcagcgagtttcaggaccagaccagggtacgcgtgcgacgcttgatctgcttcctaagtccctaaagctcacaaactggccagaacctaaaaatcagtatctggggtaaatattacacttgctttcctagtgatttctgttttttctgtctcatcctgttttctggctttaatatgtgaatggaccttattcctttaccagaaaaatattttgtgaatttaaaaactgatttatttaacattcatccgttaaaaaatgcttaccgaggaggccacaggacatggggctctagggtcagcctgggttggactttgggctctgccacttgacagcagcataacctgggtcttctgagcctcagtttccccctctgtaaaacagggactgatcacagctcccacattgtgtgccgttcagatgatgagatgtgtggaaccgcgtgttcctgggaagccgtttggggaagaacccgaaaagggttagtttgagagcctggagggggcatcacaagagaaaaaggcagagttcaggtctctggtcccttgttaattactgcagggaattgagggttttatcctagaggcatctgaagggttccagcaggtgaatgacaggttggagttttccttctgatggtcactttgactccaaggcagaaagaggcatgaggtggtcgaagtcaggaggagttttgcaggagctggggagtaggtggtggcaaatgttgggatcgtggcagtgggtgtggacatgggcgtcagaagtgaccagacctcatgtggattgggatgaagggaaggagggctcagggtcacccatcaggggcacaggggaccgtgcaggaggagatgaggatttaggacaggcacctccatttttgaaagactgggttagctgtgaacagagtgggctgaagggatatggggctgctctcgtagagggggtcctgggagccatggaaatgggtggacttgcctggcagcaggtgggctgtgaagaggaccttcaggttaaggagcactgacgtctagctgcaggcaggagggagagctggcaggtgagaaggaaatgaggatggtcccaggagccagggaacactagtgtccccaggaagaattcacgcccgtgtgggatgctgaggaccagcaagaggaggaagggatttgcattttgggctgaattgtgacggcggtcctgactggcttatcctggtccccggagaagccagtctgaagaggagggggctggagaagggaatgggagcagcgggctcaatggtggtttcaaatggagaagagacagaaagtacattagtgggctggggagctggctggggagttggggaaatggggaatggttgttaatgggcttggagtttctcttctggggtgatgagaaagttctgaaattgattgtggtgatagttgcacaactctgaatgtattaaaagccacataattatataccttacatgagtgagttttatgctatgtgaattctgtatcagtaagaagttgacatttggggacatctcagagggtatgtgggaattctttgtgctgttcttgcaacttttctgtatgacattacttccagttttaaagttaaaaaaattacaaggccagtggtaggagagaggatgtccagagcaggtcgcggggggccagggtgggagcaggagcgtagtagaggccggggtggccgagtaggtgtggacggtgcggaagggtgaggcgtgtggcgagcagaagggaaaagagatctctggggagtttgggttcccacttgacgttgggggacacatttccattttgaagtattatgtagccctgagtaagcggctgagactagtttagactgtctctacctaaaggctgtcctgactttgtatcgtggcggtggcggccatgtgcatcaggtgtggtagatttcttgccaacttgaatgggccgtttagactgtttgaaatgatggactttccattttttcatttttcttgaagattcggtttatgctagagacgatgttggccctgaagaacaatgacatgcgcaaaattccaggctatgaccccgagcccgtggagaagctgaggaaactgcagagagctttggtgagtcaaggaactttcaattctgttttgctcagagcttccgtgtcggcatgagcctgtcatgaaaatcaagaaatagtcagacctgcacgtcagggtggtgtctggtgagtgagagtgctcagaggcagagtgaacgcggctcggttttcctcaggggctgtcccagtggtctgggcgtgctcgtgcagaatgtccgtgtgtggggaagcccatgttgggcgagcgtcctctttgcctcaccccgggtgctaaacttgggctgcaccattggatcatccgatgctttcagagaaggccaagtccccatccggaccaaggaaattgggatgacgtaggtcctttgactctctctgacatgcagccaggatggagactggggcagcctccctgttggagtgagtctttcagcccctgtcatctcaagtccaaatcattgctgacccaggctcttccaggcatgtgctcacctgccactgagcctgaggcagctctgttactctctcctgttgggacagctttccaaacacagcgtgtttggggtgatggactctcaaacacaaaacactgagtttaccgctagttttggcatttttccaaacaggctaaccgtcccaattgccagtgacccattccagtattcatgcaccagaaatgtcatggtcaaaaacaaaaagccaccggtgatggaaggacggaatatgaaccaattaaaagcatttcattagctcttctctcttcatcaggtccgcaacgccggctcaggttctgagacgcagcttcgcgtctcctgggacagtgtcttgagtgcggagcagacgggtcgctggtggattgtggggtccgcctggagtggggccccgatgatcgacaacagtcaccatacgcacctgcagaagcagcttgtggggacggtagggacacccatgctcaaggctgccaggcagaggcacccccctgtgtggtgtgtggtcctggctttacctggagcagctctcttactgttcttgaatggtcactgaaatgtacaaggtttatctggaggccttacagaaattgctattaatattacattgtgatataattattcc

SEQ ID NO: 13026 - DNA, 714 bp, Homo sapiens
acattttgaaaaaactgattggaactttcaccgaaaaagatattgaactgatcttgttaatgctgaaaaacgtgggtttttcattgaggaaagatgatgctttatcacttaaggaattgatcactgaagcccagaccaaagccagcggggcaggcagcgagtttcaggaccagaccagggtacgcgtgcgacgcttgatctgcttcctaagtccctaaagctcacaaactggccagaacctaaaaatcagtatctgggattcggtttatgctagagacgatgttggccctgaagaacaatgacatgcgcaaaattccaggctatgaccccgagcccgtggagaagctgaggaaactgcagagagctttggtccgcaacgccggctcaggttctgagacgcagcttcgcgtctcctgggacagtgtcttgagtgcggagcagacgggtcgctggtggattgtggggtccgcctggagtggggccccgatgatcgacaacagtcaccatacgcacctgcagaagcagcttgtggggacggtagggacacccatgctcaaggctgccaggcagaggcacccccctgtgtggtgtgtggtcctggctttacctggagcagctctcttactgttcttgaatggtcactgaaatgtacaaggtttatctggaggccttacagaaattgctattaatattacattgtgatataattattcc

SEQ ID NO: 13027 - DNA, 3038 bp, Homo sapiens
gctcgcctctaaccagacccttccaggcgggaagatgttcccctgaaaggtatcagccattaaactttggaagtcgagtgatgttccagtcattgctgttctgttttctaggcttggacttaaggatcagcaggagagagaaatcattcacgttctcatggattgctgccttcaagagaaaacttacaatcccttctatgctttcctggctagcaaattctgtgaatatgaaaggagatttcaggtagcttagtgcggaggcaccagttacgtccgctctactattttttctacacaggctacctggctcaacccacctgcaaaggagttccccaagtcaggaggcccctgatatccccgtcacctggtccacgctggctgccaggccaccttcactgggagcggaagtgggagggctagaggggagtgtcaagggtccaccatgtcctcatgtcacctgcttctgccacagatgcaggcagtgtggccaggccagcaggagcacctcgtcggttcacagtgcaccagtctgttctgatgccccttgctgtggccttttccttagaatgttctgttagtatctgctgatttggggggaagaactgcaccagaaggagattcttgtgaagctgtttgggactatgctctataggcaagaacagtgaggccaccactaaaagtcttgatgtttagaatattaaaaataagataataagaaaatacctttaggttatgttgttagtgatatattatagtaatttgtggccgtttgccttttttctccttttaactatgatactagatgactttccagttcagcatatgggacaaatttcgggacttggaaaacttgccagctacgaatttctctaatttggttcatctggtggcccacttgttgaagacaaaatcgctttccctttccatcttaaaggttcgtgtaacgtgtgaaaatattgaaagcaatggaaatgggagtgtaattgtttagtacctggtaaatcaggtcctgttttaccagcgtattttcttcgattctgattcatctgaaaagtgcttgcattatcctagccaggacagaaaacggccagactaacatgtgctacaaattgatctggtaaatgaaggcaccgctgcagttcttttgctaatctgaatgaatgtgttttggagcttgaggttaatttgctggtcctaattataaaatcctgaactggtcactgttagtgaggagaagggcggatgaagtagggcctggtctccttagaggtgaggtgagtttgctcacgttgatgtaaggtgttttaaaactgtaggctttctcctgccctgctgtgttttgggactttgcagtggaccatgaaacacagacatcttttttcttccccccccaagatgggagttgctctgtcacccaggctggagtgcagtggtgcaatctctgcaacctctgcctccgggattcaagcgattctcctgcctcagcctcccaagtggctgggattacaggctcatgccaccacgcccagctaatttttgtatttttaatagagacgggatttcaccatgttggccaagctggtctggaacccctgaccttgtgatctgccctcctcagcctcccaaagtgctaatattacaggtgtgagccagtgcgcccagctgaaacctagacatcttaccaggtggagttggggttagatgtgggcctgtaaggcttggatggtgggaccaacagactctgaatagccaaaaaaaaaaactggagcgcctggggggcaaagggaagtgaaaagcagagatagttgaggggcgttgactgcagtggcccagacccacaagacagccgcagccacagcttcccgtgtgtttctgtgtgtcgtgtgcagttcatcagcatgccggctccagttcaccctgcgtcccttgctgtgtggtgtccaagtttggccactgtactgaaaatgagggcaccgagccttacgccaaatcctgacaactggaataacttagctcatggaggaggcgttgctccccctccgctcccctgccttgcctttcgctcgcccaggcattgcgctcatcctggaacagcacagatgctaccaccgatgagcgggagaggcgtggcaggagcacaccctcaggcgtagagctttagagatgccccccgccctgcccctccgggctgctctcattccgagtttctctgtgtttcgaccatgcttttgtggtctcgccgcgtcctcgggtccgcaagcgcctgtgatggtgtttggctgcgcacctccctgtgggtagcattcccgtcaccatgcgtttagtcccctcctctagctcgctgacattcagctaagattgcagtgggtccacgttggcgcccgtgagtctgttctgggtagcatcctactgtatacgtatgcctcagtttatatacttacttatcctactgatccgtgtttatttctgattttttgatagttttctagggcagagatatatatggattagtcttctagaagtaaattttatatatatatatatatatatatatatatatatatatatatatatagttttaattaggggatgggtacttttgggaatggaggtaatttatggttcagttctagatactgaatttctgattcataaggtgtatgacccgggaattccacttacactgctgagttgttctcaacggtggctgtggccggccacacctctgccagcagtgtgtaggaattcccaaggcccacatccttgccaacaggtgttcatttcttagctctggaaatagcttcttaaatcgggtagagtgggggaaggggggagattaatttttactctaattaactatattacaaatcattgaaaaagttggctaaatcagtgtaactttatttttctccatgtcctgaccattaggtagttgaattcagtgaattggacaaacccagagtccgttttttacgaaaagtattaagtatcctattaatggaaacagaagttgaagacctcagtttaattttcacaag

SEQ ID NO: 13028 - DNA, 486 bp, Homo sapiens
gctcgcctctaaccagacccttccaggcgggaagatgttcccctgaaaggtatcagccattaaactttggaagtcgagtgatgttccagtcattgctgttctgttttctaggcttggacttaaggatcagcaggagagagaaatcattcacgttctcatggattgctgccttcaagagaaaacttacaatcccttctatgctttcctggctagcaaattctgtgaatatgaaaggagatttcagatgactttccagttcagcatatgggacaaatttcgggacttggaaaacttgccagctacgaatttctctaatttggttcatctggtggcccacttgttgaagacaaaatcgctttccctttccatcttaaaggtagttgaattcagtgaattggacaaacccagagtccgttttttacgaaaagtattaagtatcctattaatggaaacagaagttgaagacctcagtttaattttcacaag

SEQ ID NO: 13029 - DNA, 1329 bp, Homo sapiens
cttttgggaatggaggtaatttatggttcagttctagatactgaatttctgattcataaggtgtatgacccgggaattccacttacactgctgagttgttctcaacggtggctgtggccggccacacctctgccagcagtgtgtaggaattcccaaggcccacatccttgccaacaggtgttcatttcttagctctggaaatagcttcttaaatcgggtagagtgggggaaggggggagattaatttttactctaattaactatattacaaatcattgaaaaagttggctaaatcagtgtaactttatttttctccatgtcctgaccattaggtagttgaattcagtgaattggacaaacccagagtccgttttttacgaaaagtattaagtatcctattaatggaaacagaagttgaagacctcagtttaattttcacaaggtatgtgccccaccctttccgacgagacatggaagagaaatgaagagattgttttcacttgtgttgatttacaaacacaaggttgtactatacgtgtagcttaatcttttcggttttatttttaagctggtatgcattagatctggggaatagaaacttgtctgctagcaaactaacaatgattgttaataataaaatatgttaagaagttcttaattgagaattttatttttaaaagaaactggttatgtctcactatgcgagatacccaggattgagatctaggagaggccagctcagccctgacatgtgtttatacgattcctttccagagtatctgacaacccaaagctgggggtgttacgtgagggtttgaagcttttcatcagccacttcttgctaaagaacgcacaggcccacagaagcgccgacgaagccaacgtgctgagagagaaagctgaccttgcaacgaagtgtctgcaaggaaaagcttccctgagaatgtagtcagggaaggaaggagggcaggtggccctttgactgtaaaatgtccttggtaaacccaaaggcttattctgttgcctgcgtgtgaatgtttggtagagctatatcattgtctgttaatgtattatattttgagattttttttgatctaaggttttattgtttgtatttcaagccattttcaaataactatcttgggggtgagaggagaaggagggagggaaaaggggtcaggcacactggacagggttctctaagcagtgaggctggtgtgtatgattgtcttaaaattttttaatagatatggccgagcgtgatggctcacccctgtaatcccagcactttgtgaggccaaggtgggcggatcacttgaggccaggaat

SEQ ID NO: 13030 - DNA, 997 bp, Homo sapiens
cttttgggaatggaggtaatttatggttcagttctagatactgaatttctgattcataaggtgtatgacccgggaattccacttacactgctgagttgttctcaacggtggctgtggccggccacacctctgccagcagtgtgtaggaattcccaaggcccacatccttgccaacaggtgttcatttcttagctctggaaatagcttcttaaatcgggtagagtgggggaaggggggagattaatttttactctaattaactatattacaaatcattgaaaaagttggctaaatcagtgtaactttatttttctccatgtcctgaccattaggtagttgaattcagtgaattggacaaacccagagtccgttttttacgaaaagtattaagtatcctattaatggaaacagaagttgaagacctcagtttaattttcacaagagtatctgacaacccaaagctgggggtgttacgtgagggtttgaagcttttcatcagccacttcttgctaaagaacgcacaggcccacagaagcgccgacgaagccaacgtgctgagagagaaagctgaccttgcaacgaagtgtctgcaaggaaaagcttccctgagaatgtagtcagggaaggaaggagggcaggtggccctttgactgtaaaatgtccttggtaaacccaaaggcttattctgttgcctgcgtgtgaatgtttggtagagctatatcattgtctgttaatgtattatattttgagattttttttgatctaaggttttattgtttgtatttcaagccattttcaaataactatcttgggggtgagaggagaaggagggagggaaaaggggtcaggcacactggacagggttctctaagcagtgaggctggtgtgtatgattgtcttaaaattttttaatagatatggccgagcgtgatggctcacccctgtaatcccagcactttgtgaggccaaggtgggcggatcacttgaggccaggaat

SEQ ID NO: 13031 - DNA, 1305 bp, Homo sapiens
gatgttggccctgaagaacaatgacatgcgcaaaattccaggctatgaccccgagcccgtggagaagctgaggaaactgcagagagctttggtgagtcaaggaactttcaattctgttttgctcagagcttccgtgtcggcatgagcctgtcatgaaaatcaagaaatagtcagacctgcacgtcagggtggtgtctggtgagtgagagtgctcagaggcagagtgaacgcggctcggttttcctcaggggctgtcccagtggtctgggcgtgctcgtgcagaatgtccgtgtgtggggaagcccatgttgggcgagcgtcctctttgcctcaccccgggtgctaaacttgggctgcaccattggatcatccgatgctttcagagaaggccaagtccccatccggaccaaggaaattgggatgacgtaggtcctttgactctctctgacatgcagccaggatggagactggggcagcctccctgttggagtgagtctttcagcccctgtcatctcaagtccaaatcattgctgacccaggctcttccaggcatgtgctcacctgccactgagcctgaggcagctctgttactctctcctgttgggacagctttccaaacacagcgtgtttggggtgatggactctcaaacacaaaacactgagtttaccgctagttttggcatttttccaaacaggctaaccgtcccaattgccagtgacccattccagtattcatgcaccagaaatgtcatggtcaaaaacaaaaagccaccggtgatggaaggacggaatatgaaccaattaaaagcatttcattagctcttctctcttcatcaggtccgcaacgccggctcaggttctgagacgcagcttcgcgtctcctgggacagtgtcttgagtgcggagcagacgggtcgctggtggattgtggggtccgcctggagtggggccccgatgatcgacaacagtcaccatacgcacctgcagaagcagcttgtggggacggtagggacacccatgctcaaggctgccaggcagaggcacccccctgtgtggtgtgtggtcctggctttacctggagcagctctcttactgttcttgaatggtcactgaaatgtacaaggtttatctggaggccttacagaaattgctattaatattacattgtgatataattattccatttctgttgtatctttttattggactttaaaagatctaaaagttgaatggcacggggcaggggagcgcatgaggacctgaacgctcacggggcaggagtccgttgctgagacccctcaggct

SEQ ID NO: 13032 - DNA, 559 bp, Homo sapiens
gatgttggccctgaagaacaatgacatgcgcaaaattccaggctatgaccccgagcccgtggagaagctgaggaaactgcagagagctttggtccgcaacgccggctcaggttctgagacgcagcttcgcgtctcctgggacagtgtcttgagtgcggagcagacgggtcgctggtggattgtggggtccgcctggagtggggccccgatgatcgacaacagtcaccatacgcacctgcagaagcagcttgtggggacggtagggacacccatgctcaaggctgccaggcagaggcacccccctgtgtggtgtgtggtcctggctttacctggagcagctctcttactgttcttgaatggtcactgaaatgtacaaggtttatctggaggccttacagaaattgctattaatattacattgtgatataattattccatttctgttgtatctttttattggactttaaaagatctaaaagttgaatggcacggggcaggggagcgcatgaggacctgaacgctcacggggcaggagtccgttgctgagacccctcaggct

SEQ ID NO: 13033 - DNA, 1994 bp, Homo sapiens
ctagttccagtacagcgtggagggtttaggcagcgtgttctgattctttgcgggacggcgagcgcatttgtgctttgcccgccgcggcctaggaggccttttgaggccgcgtagtcggtgtttttgaactgactctacagcttctggcaggccgtgcggcgccctgacccggcctcaccatgttggtgctgtttgaaacgtctgtgggttacgccatctttaaggttctaaatgagaagaaacttcaagaggttgatagtttatggaaagaatttgaaactccagagaaagcaaacaaaatagtaaagctaaaacattttgagaaatttcaggatacagcagaagcattagcagcattcacagctctgatggagggcaaaatcaataagcagctgaaaaaagttctgaagaaaatagtaaaagaagcccatgaaccgctggcagtagctgatgctaaactaggaggggtcataaaggaaaagctgaatctcagttgtatccatagtcctgttgttaatgaacttatgagaggaattcgttcacaaatggatggattaatccctggggtagaaccacgtgaaatggcagctatgtgtcttggattggctcacagcctgtctcgatatagattgaagtttagcgctgataaagtagacacaatgattgttcaggcaatttccttgttagatgacttggataaagaactaaacaactacattatgcgatgtagagaatggtatggctggcatttccctgaattaggaaaaattatttcagataatttaacatactgcaagtgtttacagaaagttggcgataggaagaactatgcctctgccaagctttctgagttgctgccagaagaagttgaagcagaagtgaaagcagctgcagagatatcaatgggaacagaggtttcagaagaagatatttgcaatattctgcatctttgcacccaggtgattgaaatctctgaatatcgaacccagctctatgaatatctacaaaatcgaatgatggccattgcacccaatgttacagtcatggttggggaattagttggagcacggcttattgctcatgcaggttctcttttaaatttggccaagcatgcagcttctaccgttcagattcttggagctgaaaaggcacttttcagagccctcaaatctagacgggatacccctaagtatggtctcatttatcatgcttcactcgtgggccagacaagtcccaaacacaaaggaaagatttctcgaatgctggcagccaaaaccgttttggctatccgttatgatgcttttggtgaggattcaagttctgcaatgggagttgagaacagagccaaattagaggccaggttgagaactttggaagacagagggataagaaaaataagtggaacaggaaaagcattagcaaaaacagaaaaatatgaacacaaaagtgaagtgaagacttacgatccttctggtgactccacacttccaacctgttctaaaaaacgcaaaatagaacaggtagataaagaggatgaaattactgaaaagaaagccaaaaaagccaagattaaagttaaagttgaagaagaggaagaagaaaaagtggcagaagaagaagaaacatctgtgaagaagaagaagaaaaggggtaaaaagaaacacattaaggaagaaccactttctgaggaagaaccatgtaccagcacagcaattgctagtccagagaaaaagaagaaaaagaaaaaaaagagagagaacgaggattaacagaaaggaattacgattatatcacccggacacacatcatgcttaagattcaactgggagcataccagggatgctctctaacgtaatcaagggaaggttcagtaagacaaagtgatttatcatctataacttcaaacctatttgtcttgacatcaactctgttaaccttatgtcatcatttcttagagtctttgatatacaaataaaattttctttgtattttaa

SEQ ID NO: 13034 - DNA, 18643 bp, Homo sapiens
agagaaggagtagcgcgttcgtgcgtcctagttccagtacagcgtggagggtttaggcagcgtgttctgattctttgcgggacggcgagcgcatttgtgctttgcccgccgcggcctaggaggccttttgaggccgcgtagtcggtgtttttgaactgactctacagcttctggcaggccgtgcggcgccctgacccggcctcaccatgttggtgctgtttgaaacgtctgtgggttacgccatctttaaggtaggtgggagagcgagccgttaaagggggaaggcggatgctggacagacgaggagagggaaagacttaagcacggaactactcagagtagcgtgggtgcctgttatagcccgggctctgggaggagggagaaggcctttacacctgagagccatgttacgtgtaacacgtggccccgccgtttggggagacccgttctgcattagaggattttatttcctcccgttgaaggggtgggcaggaggcgtgttagaatttaacagattatagggaattcggactttattctagatgttttgaggaatgatcgaaagattttttttttttttgagatggagtttcgctcttgttgcccatgctggagtgcagtggcgcaatcttggctcactgcaacctccgtctcccgggttcaagcgattctcctgccttggcctcccgagtagctgggattacaggcctccatccaccaccacgcctggctagttgtttttgtttgtttgtttgcttttagtagagacggggtttcaccatgttggccaggctggtcttgaactcctgacctcaagcgatccacctgcctcggcctcccaaagtgctgggattacaggcgtgagccaccgtgctcggccaatcgaaaggatttaagcagaggaatgacctgctaatttgtcttaatacggttactctgctgtgtggagattagactcgaggagataagaacggcagcaagaatacttttgcattcatttggacaagatgaaattgcctggtatggagagaaacaaatatcgatagaaattgtgaaggtagaacaggaaggactggctaatagattgaatgtggggttttggtttaaataagatgttaagaaagtttcttggggaaggactaaagatttccggtttgggctgtgcgaagcttgcgttgtctattagacctgataatgcagttgtgtagatcgggcagttcagtatttcagatttgaagcttaggggaaaacatctgggctggtgatgtcagtttgaggtttggttgttttcgtggggaaagtttgacaagttcgtcagcactgaaatggttgaatggtaagacattcgtatcgcaagatgctgttgagatgttaggaagaatgagtgagattgagtgccttttcttgtgcggtgcaactcttctgaggtctgtgaatatagcaatgaaaaataaagtttttatgtatattctacatatatatatgttggtagaaagcaaaaacgctaggtaaaaataaatgtaatacaattttagctatgaaccaaaaaaccatttgtggtgtggatgcaagaaagtctggatgggtgcagagttctccatgtttcacttctgacatttgaaaatacgcagtttgcatttgatacgtcaaatgttatttttaagaaaaccaataaaatcattaaaaccgaaaaggcagttttgcttgtttttaccttagttggagttatctgcaattgccgtattagtgttttaaggaacttgtaagtaagctccttagtcccctttagagctacgaaacatgtcaattttacttttctccagctttttggaatcttatctaaattaccatgtagagttctgcatagcttcaaattctcttagccaatgtggtctgtaagtgtctatcgatgaatttcaccgttaattgccgtagtatactgtcctgtaccggatgtgaagaggagcaactctgcacagtgcactggttgtctcccatggtaggaaggaattggcttatcaatggtcggatttctagacctgggtcctaaaatactcaaccgtgtctcgatgaattactgatttctattaatgaaaagtgtcctcctccatgaaaatgtctttgagtattccgttggagtttgcagtgctatttatctgcaagttactgttcaaaatgattaaattgtggtttatgtaacctagtactaaagaaataactagttaagctcgaatatgttgacattgattagtttgtaattattggaattaacattgatcgtttctgagtataaaagacatacaaacgttctggaactagtgatggctgcacatttttgtgaaaatgcactactaaaaagtgaattgtacactttaaaagggcaaatattaagatacatgtaaaattaatatgatatatggtgaattttatctcctaaaaaagtagacatacggttcaaagttattagtttcctttcccataatctttcaaaatgctagggtataaaattatgttggttgccaggcatggtggctcatgcctgtaatcccagcactttgggaggccgaggccggcggatcacaaggtcaggagtttgagaccagcctaaccaacatggtgaaaccccgtctctactaaaaaaatagaaaaattagctgggcgtggtggtgtgcgcctgtaatctcagctacttgggaggctgaggcgggagcattgcttgaacccgggaggcggaggttgtggtgagctgagatcgtgccattgcactccagcctgggcaataagagcacaactccgtctcaaaaaaaaaaattatattggatgcatataattcatgctttgatgagaatgctttaggaagttttttgaagttttttgtttttttgttttttttgagacggagtttcactcttgttgcccaggctggagtgcaatggcgcgatcttggctcaccacaacctctgcctcccaggatcaagcaattctcctgcctcagcctcccgagtagctgggattaccagcatgcaccaccacgcccagctaattttgtatgtttagtagtgacagggtttctccatgttgaggctggtctcgaactcctgacctcaggtgatctgcccgcctcagcctcccaaagtgctgggattacaggcgtgagccactgcacctggccttgaagttttttttaaacttccatttacagtgaggaaaacattttatgtataacccatgtacacatacaaattcatgtttatgtatttaaaatttattttgaggcagggtcttgctctgtcacccaggctggggtgcagtggcaggatcatggctcattgcagccttggcctcctgggtcaagtgatcctcccacctcctcccgagtagctgggactacaggctcaagccaccatgcctggctaattatttatttatttgtatttgtatttatttattttttgagatggagtctcactctgttgcccaggctggagtgcagtggtgtgatctcggctcactgcaacctccgcctcctgggttcaaacgattttcctgcctcagcctcccaagtagctgggattacaggcgtgagccaccatgcctggcctaaatttttttttttttttttaagaggcagagtctcactatgttgcctaggctggtctcaaactcctggcctcaaggtgctgggattacagccatgaggtacggtgttctgcccacttatgtgtttagagcgattcaaaaggaaaacacttccaaaaagttattgctcattaacagggttatatatatataaatgtaaagacattgtgtaaaggaactgttgtgattaattctaggatattataaaaattcagcctgtggccgagagcagtggctcacgcctgtaaccccagctacttggaaggctgaggcaggacaatcagttgaacctaggagcagaggttgcaatgagctgcggtcgcgccactgcagtgcagcctgggcgacagggcaagactccgtctcaaaaaaaagaaaaaaagaaaaaaagaaattccacctgtgtccttgtgtcacgtggcacacagcataagattttagtcttgctcataccagacttccttcagctgctcttccatgtggtagccattagtacgtataaccatttcacatgagatgtaactgataggactgaggaagtgaattttaacttacttgaattttaatggttatattgtacagtgtagctgtgtagcatagcattttgtgtcacttcattttctcaaggtttggagaaagatttttgatgtacataccaaatgtctatataaaacctaagtactgagcaatatattttttctaactttattgggtgtactttacatactgtataactcacctataggttttagttacaatccagttttatagtacactttgttgcaaaaagttctcatgcccattttcaagttagtcctgctctagacaaccactgttcagctttctttttgcataattttttctagaagtttcatgtaagtggagtagtattttagtcttttgtgtttggcttttttcacttagtgtaatgcttctgaagctaaccgaagagctttttcacatttgttgcgtgtatggatttgtttctttttgagcagtgcacattttaaactaattatcagttttatcctgtatttaaacaagtttcataaaatattaacttgctcatattgtctgtggaagtgaaacttaaaagttagcatcaaataatttacacaaaacatagaggttgggtgcagtggctcacgcctgtcaccctaacactttgggagggtgaagcaggaggattgtttgagcccaggagttgcagaccagcctgggcaacatggcggaaaaaaaattagctgggcacagtggtgcttgcctgtagtcccagctgctgcaggaggctgaggtgggagggaggtcacggctgcagtgagctgtgattgagcctctgcactttagcctggacaacagagtgagacctcatctcaaaacaaaacaaaaaccacacaaagtctcaagcaatcaattaaaaatgaaaatgaggaggctggacatggtggctcacacctgtaatcccagcactttggaaggctggggtgggcagatcatgaggtcaggagtttgaaaccagcctggccaacatagtgaaaccccgtctctactaaaaatacaaaaattagccgggcatggtggtgtgtgtcgccaaatctgtagtcccagctgaggcaggaggatcgcttgaaccagggaggtggaggttgcagtgagaagaccgcgcctctgcactccccagcctgcgtgacagggcgagacactgtctcaaaaaaaaacaaaaaaagtgattaaaattcttaattccatataccctcaccaatattctgtatcagctgcccaagtattagataggatgggctcaatcctaaaaggcacaacccccatatttaacatccctaaaattgggatgtcttacaattgatgacaggtcaattgggagtgtaaaagaataacataagctgggtgtggtggctcacgcctgtcatcccagtactttgggaggctgaggcaggtagattgccagacctcaggagttcgagaccagcctgggcaacagggtgcaaccccgactttactaaaatacaaaaaaaaaaaaaaaaattagccaggcatggcagcatgtgcctgtaatcccagctacttgggaggctgaggcaggagagttgctttaaccagggaggtggaggttgtagtgagctgagatcacgccactgcggtccagcctggccgacagagcgcaagactccgtctcaaaaataaaaaaaaaaagaatagcatgttaaattttgtgaaatagagtatgcacagatattatgcatatatttttatttaaaaaaccagctggatcaggcgccatggttccttcctgcactcccagcactttgagaggccaaggcaagaggatcacttgagtccagaagttagagatcagcctgggcaacaaagcaagcccctgtctctacaaaaagatttttaaaagagctagatgtcgcagtgtgcacctatagtcctagctacttgggaggccgaggcagaagaatcgcttgaggccaggagtttgaagctgtagtgacataggaccacaccactccactccagcctggacaacaaagcgagaccctgtctctggaaaaacaacacagctagtaaatttaaaactatactttgctaataagcattatttatcaagtccataatatagcacatctacacattaagacgcagttctagtctggttatatattattttcagtaagagaaacacaatgttgcaagttgtataaaacttagatgagtgacaagatgattttaggggtttgttctgatgtataattttttttttttttttttttttgagacggagtcttgctgtcgcccaggctggagtgcagtggcgcgatctcagctcactgcaggctccgccccctggggttcacgccattctgttgcctcagcctcccgagtagctggaactacaggcgccttccacctcgcccagctaatttttttgtatttttagttagaggcggggtttcaccgtgttagctaggatggtctcgatctcctgacctcgtgattcgcccgcctcagcctcccagagtgctgggattacaggcatgagccaccgtgcccagcctgtataaatttaatcacacatggttgaattagatatgttggtaaaaataacccaaactagaaaaacttagagtcacacaaagcaataaacaactacaaagcctagagttggtattaacaatttataaactaatagctctaactttgtatatcatgaagttttagaatccagagacacctcaccaagtctcatgactatactgaaaacactgattaaaattttttgaaattgttcagagaatgcagctaaccataactgaagttcactatttttaagaggacatgtatcaaataggggatatgactcatgagtaaaattcacattttttctagctgaaaagcaagtatatttgaagataacatttgggtaacaaaattgccatatttaaaagatactttcggcctggcggggtggctcacgcctgtaatcccaacactttgggaggccgaggtgggtgcatcatgaggtcaggagatcgagactatcctggctaacacggtgaaaccccatctctactaaaaatacaaaaaattagccaggtgtggtggcaggcgcctgtagtcctggaggctgaggcaggagaatgacgtgaacccaggaggtggagcttgcagtgagccgagatcctgccattgcactccagcctgggcgacagagcgagactccgtctcaataaataaataaattaattaaaaaatactatcaccattctaaaactgaagttaaaataacaaaggaaatgtgataaaatcagggcaattcatgagcacacaaaggtcttcaaagactatgttatgtcagccaaaaccattactatgacaaataaaaccattgtgttcccaactgcaacatcttgaagaaaacattgctaataaagaccatctaaataagaaagttagagatattgctacattttctgtattacatttgtctcaaagtttttatttgtctcaaatttttaatcatttcttttcagccagggtaatgataaatatttgtatacagaaatccattttaagttttatcattttaagataatttccatttctaagtagaaatagtatacaactattaccattgcaatctttagcattgttgttacaacagtactagttttaaaacaagtctttatattttatagatacaaactgaaatattaacaggtaaaaattaaatgtctaggtcttgcttcaaaacaatacaaggcggctgggtgtgttggctcacgcctgtaatcccaacgctttgggaggccgaggcaggtggatcacctgatgtcaggagttcaagaccagcctggccaacttggtgaaacccagtctctactaaaaatacaaaaactagttgggtgttgtggtgcgtgcctgtaatcccagctattcaggagactgaggcaggagaatcgcttgaacccgggaggcggaggctgcagtgtgccgagattgcgccactgcactccagcctggcgacagagtgagactccatctcagaaaaaaaaaaaaaaagccatttactgtgattcctaaaagtatgcatgaacatgtgttgcacagacattcaaagtcttggagaatatatacctaaatgttgataagtatattgttgattaaagtaccctatgtttcttttgcatttaaaaaatttctcacatctagatgtgtctcacaattgacgatagttttagagaaatccataatactttcatgttaggatgatcatagcagtaaataacgaatataatctattgaaagtagacaaaagttttttttgttttttgttttatttttttgagatggagttttttgctcttgttgcccaggttggagtgcagtcgcgcaatctcggctcactgcaacctctgcctccgggttcaagcaattctcctgcctcagcctcccgagtggcggggattacaggcatgtgccaccacgcccagctaattttgtattttttttttttttttttttttgtagagacggggtttctccatgttgatcaggctggtcttgaactcctgacctcaggtgatccgcctgcctcagcctcccaaagtgctgggattacagatgtgagccaccatgcttggcgcaaattaaagtttttaatgattacaatactttactgtaaagggattaatggctcttttaaaagaaaggttctcggccaggtgcagtggtgcacacctgtaatcccagctactcaggaggccgaggcactagaatctcataaacccaggaggtgaaggttgcagtgagccaggattgctccactgcactccaggctgggctacagagcgagactccatctcaaaaaaataaaaagaaaggttccctgccctaccccctaggaccccatagctccagctacggcccaaggctggggcaggaatatctcttgaggccaggtagattctagactgaatagccactgtactacagctgactggactagatctgaattccatttagctgttaaatgggcaattcgaactagtaatttgaccaaaattacatgcagggtaagaaaactagttcattatcttagtgaaagaaatagcttctacaccttcattttacatgtaaaattgtatttgaagaatgcagctgtatatgcctcacctgtaccatttaaataaaactatttaaacattttattacaggttctaaatgagaagaaacttcaagaggttgatagtttatggaaagaatttgaaactccagagaaagcaaacaaaatgtaagtactcttgaaatcaataatttagcagttaacatttagggcttgttttattttttacatttttccctgatttatataatgttacattcgtagttttctgttttgaaatctgtttcaggaataattttggtatgaacctaattattacaaatgttttacttggaatataggccatctcaattaatttgaaggcagtagtctcccccttacccacagggattatgttccagaagaccctgtggatactttaaacctcggatagtaccaaatgtgattgctgtcagtaggaacacatttgtcttcgtgtcttccacacacaaatgtaataccttttttatcttaactaagcacttaccgcacacaggggttgtaacctgctttttgagttttgcaacatcaaaactagcatgaactactttttctttcatcacaatttcatggaagattcattcttagtgtagatgttaaatctttggtttttttgtttgttttttgagacagagtcttgttctgtcacctaggctggagtacaatggcgcaatctctgctcactgcaacctccgcctcctgggttcaagctattcttctgcctcagtcccccaagtagttgggattacaggtgcccaccaccatgcccagctaatttttgtatttttagtagagacagggtttcgccatgttggtcaggcaggtctcaaactcctgacctcaggcgatccgcctgcctcggcctcacaaagtgctgggagtacaggcgtgagccaccacacctggcctaaatcttcgtatttgtatgtatatttaagggaccacactagtatgttcccttaccagataagaaaaccttgcttaagatgacactgttgcctggtgtggtggctcatgtctgtaatcctagtactttgggataccaaggtgggtggatcatttgaggtcaggagctcgagaccagcctggccaacatggtgaaaccccctctctcctaaaaacacaaaattagccgggcgtggtggcacatgcctgtaatcccagctactgggaggaagctgaggcaggaaaatcccttgagcctgggaggcggaagttgcagtgagccgagattgcgccactgcactccagtctgggtgtcagagtgagaccctgtctccaaaaaaaaaaaaaaagatgacactgttttaggcaactagaagactagttttccttcttaaagggttatatgctttgttgggttaatctgattcgttgttgtcaatgatgtattcttcttggaactgaatctaagtgatctgactcaatattcgtcactaccactgagacaacgatgaatcaactatatgtttctttctggataaaatactaccctgaggctgggcgtgatggctcacacctgtaatcccagcattttgggaggccaaggcaggcggatcagttgagcccaggagttcaagaccagcctgggcaatataggaaaaccccatctctaccaaaaacaaaaattagctgggtgtggtggtgcacacctatagtcctagctgcttgggagactgaggctggaagatcctttgagctcgggaagtcagggctgcagtgagctgtgattgcaccactgcattccagcctgggtgacagagtgaagtgagaccctgtctcaaaaacataaagggggccgggcacggtggctcacgcttgtaatcccagcactttgggaggtcgaggtgggtggatcacaaggtcaggagtttgagaccagcctggccaatatggtgaaacctcttctctactaaaaaatacaaaaaaattagccagccatgggggctgggcacggtggctcacgcctgtaatcccagcactttgggaggccaaggcgggcggatgatgaggtcaggagatggagaccatcctggctaacacggtgaaaccccgtctctacgaaaaatacaaaaaattagccaggtgtggtggcgggtgcctgtagtcccagctacttgggaggctgaggcaggagaatggcatgaggcaggagaatggcatgaacctgggaggtggagtttgcagtgagccgagattgcgccactgcactccagcctgggcgacagagtgagactctgtctcaaaaaaaaaaaacaaaaactagccaggcatggtggcacaggcacatgcctgtaatcccagctacttgggagtctgaggcaggagaattgcttgaatccgggaggcagaggttgcagtgagccgagatcgcaccactgcactccagcgtgggtgacagtgagattctgtctcaaaaaaaaaaacaaaaaaccataaagggttaggatgtaacaagaatgagacctgacaataagctattttttttaatggcatttgtacaggatagacaaatgaatatcatgagattcctaaaaaggactcacgtacgttttcttgagtcaattctatgctgtataataaagtcatctctgtacagctttatgcaacaggggtttgtattaaagcttcaacatctttactcttggccaaaatttcctccaaagcctacaactttcttttaataatccaagcattactagcctaacatttagaaaaactagtaattgtatgaagaatatctaacttcacaccctgatacacaatggtaggcatgttttattggtgtgtgctttggaaacagtcaagcacttctttccaagttatgtggcttttgaatcaacgcactgcccccaataacatgtttatctcttttttttttaattctagagtaaagctaaaacattttgagaaatttcaggatacagcagaagcattagcaggtaaagtaaaaaattagaagcttgcttttttgaaaaaattaagtcttagccgtttgtttttcttgtttaaaaggttgtttgcttcagttgcctgtgttaaccttattcaatgttgtcaatgatgcattcttattggaactgaatttaagtgatctgactcattcgtcactaccactgagacaacattgagttagcttttttcaccatagggctggttttccccatgtgtgaggagaggtgagaagtggttaagttgatctccctgtggaaaccagcaacataatgctgaagcacaattcagtaaaaggtgttctacaagggaccaaggtaatgtggtcaagtatacagctctctcctcattttaatccaagggtagagttgtaatcctgagaacagccaggattcacagttgaaaaataatttaaaaagctcttctgggggtatagatttttagttcaaaaaaacatatcaatattcagagttatacagaaactgacagaggtgttatttttaaaagattcagaagaatggatgactcatactcttcaactagatttcatcacgggacaacagagtgatcgggtttatttactgtaattgactgcagtaggtcttacagttttgtttttttaagtgttagggaaaacaggaagagcagatataaagcccaaatcattaaattttcaactgcctgaattctttatcacaaatcagccaactatttggcggtgtagtttgaaaatgaaggaccgtgaggaagaatatggcttaaagctgggcaagaatatgacagatgcaaaaaattttgttaaataaccacaggagaaaggtacagtttttgtctgaaaatttggaatccaactaaacatgctggaacataacagaccaccctaaccttggcagaggggtaggctgaaggaagacccatagggccagtttctttgttttataaacatagttctagggctgcttcaccaactcttcagtaattagagttatatacagccataaaaaaaactgtggtaatattaacttggagaatttttaaaaagatagcctgttcatcacagcttttaagtatgggtaaacatttggtaagattccaagcaagattgtgttagctgtattcaaactctagggggtgttgttgacatagactgggatatgaacagttcctagtcctgatctcaagtagcctcttctgaattcctttttgcatacgatctttaatctgcttgggatatatctggccagtccttattaaactgtattaaatggacaagccaagcttttgctcaaacaagcaggtttttactattaatacctaatatattgagcacatactgattgtcagatttatgcttatgatttcataattgttatttaattcttgaatcctgtgaggcagataaccatcatctctatgttacagatgataaaacttgaaatttaagcagtatttccagattcatttacctagcttctttgtattatttaaaataatgtacaataaggctgggtgcggtggctcatgccaggaatcccagcactttgggaggccaagacaggcggatcacctgaggtcagttcaagatcagcctggccaacatggtgaaacctcgtctctactgaaattacaaaaattagccgggtgtggtggcacacaccttagtcccagctactcgggaggctgaggcaggagaaacacttgaacctggtaggcagagatagcactgagccaagattgcaccactgcactccagcctgggcaacagagcgagactccttctggaaaataacataaaattaagtagtgtacagtaaatggacaaaatgccatagtagttgagaatttaaagtcaattccccccagtctaagctccatgagggcagagactgttctgtactgtcaaattcctagacgctagcaaagtatacagctatagaaggtttataataaatattttggggaaaatgaatgaaaatagtgaattttatcaggaatgctgtcatagaaacatttacaatgccttttcctatctgttttcaccagaaagttaaatgaacatcagctaattaagaaagcagaatccttcccctgggaattcagttctcactgcctattataaggcagttttgacatgacagaaccacaactaaatggctgtaaatgtcacagtgtacattttaaacctcatagccttagagtttgatgagaccaggcacagtgactaacacctgtaatcccaacactttgaggggctaagatgggcaggaatttaagatcagcctgggcaatatagcaagaccccctctcaaaaaagatttttttttttttggagatggagtttcattttgtcacccaggctggagtgcagtggcatgatctcggctcactgcagtctccacctcctgagttcaagtaattctcccaggaggctgggttcagcctccaaagtagctgagattacaggtgataccaccatgtccagctaatttttgtattttttagtagagacggggttttgcctgttggccaggctgctctggaactcctgacctcaggtgatccacccgccttggcctcccaaagtgctgggattacaagcatgagccaccgtgcctggccatcattttttttttttaaataaagaaatagggtctgttggggtgtgatgttgaatttgtattggtctcagacattcatatatgctatttgcatgaagtggtttatttttattcttgattgtgttttcaacttgcaagtctttttttttttttttttgatactgatcttcggctggagtacaggggcgcgatcccagctcactgtagtctctgcctcctgagtagctgggattacaggctcatgccaccacgctcacctaatttttgtatttttagcagagatggggtttcaccatgttgcctaggatggtcgcatctcctgacctcgtgacccgctcacctcagcctcctgaagtgctgggattatccatttgatcataattcgaatggatatacgatcaggagggaagagcaagacctgacttattaagcacaaactgcctgaccttggaaattgttgatagaccttcattcctgccaagcatttttcttttctttttctttttctttttttttttttagatggagttttgctcttgtcacttaggctggagtgcaatgtcacggtatcactttaacctccacctctgggttcaagcgattctcctacctcagcctcccgagtagctaggattacaggcgtgagccaccagggccagctaatttttgtatttttagtagagtgtttcgtcatgttagccaggctggtctctcgaactcctgaccttaggtgatctgccagcctcagcctcccaaagtgctgggattacagacttgagccaccacgcgcagcccaagcatactttttatgttttttgtttttgttttgttgagacagggtctgtcaccaggctgctggagtacagcggcatgatcatgactcactgcagccttgaactccctgggctcaggtgattgtcccagctcagcctccccagtagctggactacaggcacatgccaccacacccagctaatttttgtatttttagtagagacagggtttcgccgtgttggccaggctggtggtacacaccaccatgcctgggtaacccaagcatacttttacctcagtcaaatgtcagataaatttcagaagaggtattagttcgtgtgggtccagaaaaagggaatataggtctaaggaagggtgagaaatataaagcagctgatttagaacttgccagaaataccagcggtctcaaaatagaataggcagcctttgctactaagttttacattgctggaggtgtacaagtggagatacaagcaaagctaaggccttcactcaaacatgtttatattatggcagaactttgaaaatgattacactcatttttactagttttgatgtgattttaggatatttcaggacagtctatttgaaatgacaaaggaaagtgagtctgttttgtcttcccaaaaagattgtttctaagatttcatgattctcccttgagttcatgagaagattcttgtgagaaggaaagaaaccctggacctgattttacccctggctctgtagcaaaaatgagggtgggaagatcaaatgaaattgtgaaacatgtaacttataaaacatatatcatttcatttcagaagtaacattaaattcaagccctttgaaaggcctattttatttttttaagtgtcaactagggcaaggtctcaaagttaaaaatttgagagttaatgcttttgtttttctttttcttgaaaagcattcacagctctgatggagggcaaaatcaataagcagctgaaaaaagttctgaagaaaatagtaaaagaagcccatgaaccgctggcagtagctgatgctaaactaggaggggtcataaaggtaaagtcacgatatttttggtcatgcctgctagtcagatctcacagcataccaactacaaagcctagcctttgcaataagttgcttatcataaattctcaatacatttttttcttttctctaagctacatgataatggatttcccctaacatcagctgaactgagcaaataagtaatacctatttgttctagaagatatagaagaacaaaaaatgataaaaattgactttaacaaatctgctacccatatataatgttaatgttctatgtatatcatgccatatttttgtctagccacatttttttccaacgaaaatggggtccttatattttttagaaatatatttattagaaaacttttagtaggggtgtattgctggagatgaaataaaatgtgagagtggaaagaaagactaggaaaatagcctcccaaatacagaaagcagaacaattcgggcggggcgcggtggctcacacctataataatcccagcattttgggaggccaaggtaggagtatcacgaggtcagcagatcgagaccatcctggctaacacagtgaaaccctgtctctactgaaaatacagaaaattaaccgggtgtggtggcaggcgcctgtagtcccagctaattgggagtgcagtggcgcagtctcacagctcactgcagacttgacctcctgttctcaagcaatcctccctcttcagtagctgggactacaggcacatgccaccatgctggctaattattttattttattttatttcatttatttgagacagagtctcactctgttgccctggctagagtgcagtggcatgatctcggctcactgcaacctctgcctcccgggttcaagggattcccctgccttagccttccaagtagctgggattacagacgcccgccaacacgccctggcctcccaaagtgctaggattacaggcatgtgccaccacgcccaacctgtaatttttttttttttttaagacggagtctcactctgtcgctaggctgaagtgcattggctcagtcttggctcactgcaacctccgcctcctgggttgaagtgattctcctgcctcagcctcccgagtagctgggactataggcacctgccaccacacccggctaatttttgtatttttagtagagacggggtttcatcatgttggccaagatggtctcgatctattgaccttgtgatccacccgcctcggcctcccaaagtgctgggattacaggcgtgagccaccgcgcctggcataacctgtaattttaaaaagaagctaaataacaggtagtaaaagatctccttaaaccaactacttggtcaaattatattaatctttttatagcttttaatttatatagccaagctgtcttctggaagcttgtatcagtttttacttccaccagtgatacagtcaagtattctacaaacacactggaaattatgcttcttgtccaactgagaaatgcgtatatttaaattagtgccactttaatatttaggaaataatttcaggctgggcgcggtggctcatgcctgtaatcccagcactttgggaagatgaggcgggcggatcacttgaggtcaggagtttgagaccagcctgtacaacatggtgaaaccccgtctctactaaaaatacaaaattagctgggcatggtggctcatgcctgcaataatcccaggccgagacaggagaatctcttgaacccaggaggcggaggttgtagtgagccaagattgcgccactgcactccagcctgggcgacagagtgatactgtgtctcaaaaaataataataacaacttcaggaaagtctttttttttttaatttaatatagatgttcatgttcttgtaggaaaagctgaatctcagttgtatccatagtcctg

SEQ ID NO: 13035 - DNA, 655 bp, Homo sapiens
agagaaggagtagcgcgttcgtgcgtcctagttccagtacagcgtggagggtttaggcagcgtgttctgattctttgcgggacggcgagcgcatttgtgctttgcccgccgcggcctaggaggccttttgaggccgcgtagtcggtgtttttgaactgactctacagcttctggcaggccgtgcggcgccctgacccggcctcaccatgttggtgctgtttgaaacgtctgtgggttacgccatctttaaggttctaaatgagaagaaacttcaagaggttgatagtttatggaaagaatttgaaactccagagaaagcaaacaaaatagtaaagctaaaacattttgagaaatttcaggatacagcagaagcattagcagggctggttttccccatgtgtgaggagaggtgagaagtggttaagttgatctccctgtggaaaccagcaacataatgctgaagcacaattcagtaaaaggtgttctacaagggaccaagcattcacagctctgatggagggcaaaatcaataagcagctgaaaaaagttctgaagaaaatagtaaaagaagcccatgaaccgctggcagtagctgatgctaaactaggaggggtcataaaggaaaagctgaatctcagttgtatccatagtcctg

SEQ ID NO: 13036 - DNA, 13469 bp, Homo sapiens
gaaccacgtgaaatggcagctatgtgtcttggattggctcacaggtgagaattactggaaaataaagtcaacttacttttatttgataagcgcttaacatagatctgttctaagaatgttacaaatgctcatttgaaccacatcagaaccttatgaagaagatgatagtaatatcctcatttacagatgaaactgaagcccaaggtcaatacagctggtaagtggtaaagccaggatttgaacccaggcagtctggctctattgtctggattcttaaaaccttaaaacctcatcaaaggaattctctactactctgatcttggatgccctgtttcttgggctttccctcctttatctctgctaagtcatgccactcctccatctacttagtattcccccaaattctctcatctgctatggtcttatgggataggtgtgtatttgtgttttcattgctttactctgatttttaataaggcaaagaggactaggtgcagtggctcacccctgtaatcccaactctttgggagaccaggagtttgagactagcctgagcaacatagcaagaaatatgtctctctctgtgtttttttgtttgttttgtttttgttttgttttttttgaggcagattctcactctgtcgcccagactggagtgcagtggcgtgatctctgctcactgcagcccctgcctcccaggctcaagtgattttcttgcctcagcctccgagtagctaggattacaagcgtgcaccactactgcccaactaatttttgtatttttagtagagacgggctttcaccatgttggcctggctgatcttgaactcctgacctcaaatgatccatccgccttggccttccaaagtgctgggattataggcatgagccaccacacccggcatttttttttttttttttttttttttgagtcagggtctcactctgttgctcaggctggggtgcagtggtgcgatcttggctcactgcaacctggacatcctggactcaaacaatgccacctcagcctcccaagtagctgggactgcaagtgtgcgccaccatccctggctgattttttaactttttgtagagacggggttttgccatgctgcccaggctggaactcccaggctcaagtgatccacttgccttagcctcccaaagtgccgcgactgcaggggtgagccaccatgcccagtcttctccctatttttaattgcatgttaaccctatcatatttcattagaagtcccttagaataggcattattgctatgttgtgatacatctgttcatgaaaagcttaatactttggaattgcactacagttaacagggttgtgaagaaaataatggtaggtagttgctcaaaacctgtgcaactttgtaatcagtactgtcaaatagtaatcctaataaaattattaccacagttcaaaagacattttaagctaatattaaaagaaacactacaggctgggcacggtggctcacgcctgtaatcccaacactttgggaggccaaggcaggcagatcacaaggtcaggagatcgagaccacggtgaaacctcgtctctactaaaaatacaaaaaattagccgggcacagtggcgggcgcctgtagtcccagctacttgggaggctgaggcaggagaatggcgtgaacccgggaggcagagcttgcagtgagtggagatcgctccactgcagtccagcctgggtgacagagtgagactccatctcaaaaaaaaaaaaaaaaaagggagaaagaaacactataggccaggcgcagtggctcacgcctgtaatacatcccagcactttgcgaggctgaggcaggtgaatcatgaggtcaggagatcgagaccatcctggttaacacagtgaaaccccgtctctactaaaaatacaaaaaaattagccaggcatggtggcgggcgcctgtagtcccagctactcgggaggctgaggcaggagaatggcgtgaacccgggaggtggagcttgcagtgagtggagattgctccactgcactccagcctgggtgacagagtaagactccgtctcaaaacaaaacaaaaaagaaacactacaatttaaaaaggtctattttaaaattaaaaggtgggcatagattgaaagggttgaagctgctaagctagagttaagagcaaaaatgcacaaaggttagggagagctttgtaataagcatttctaagagagaacaaatagtgaaactgagtcaaaaatccaaacctgggtaaatctgcattgtgtatagcagtggttccctatcaagggcaatcagatgtccccccagtaggcatttgtctatgtccatagacatttttggttgtcacaattggaggtgggttggggtctgccatgagtatctggtggataaaagttagggatactgctaaaggtcctataatgcacagggcagcctgtacaacaaggaattaggcccaaaatattaattgtgctgagatgaaaaaacatttttatacagacaatattgttactccacagctttctgttttcagatgttaagagtcctgcaaagttcctaactggtagtataaagcttaatatgtgctattaaaaattgcatgaaccaatatggctttttttttttttttttttttgaggcggagtcttgctttgttgcccaggctggagtacagtggcacgtgatctcggctcactgcaacctctgcctccccggttcaagcgattctcctgcctcagcctccagagtagctgagattcaggcgtgccccaccatgcctggctaatttttatatttttagtagagacagggtttcgccatgttggccaggttggtctcgaactcctaacaggtgatctgcccacctcggcctcccaaagtgctaggattacaagcgtgagccaccacgcccagtccaatatgacttttgtattacacagcttatcctatttgtcattcatacataaactcattcatgttacagaaataaaggtcgtagcagcacatatagtttttttttttaatgtgtattttctgttctcgtatggtgcatttctacttagctgatttttcttcttagaaaaaccaattacagctctgactacaggctgatttgagtaaaaacaaaaacaaaaaaaaactttaaggtgttaatttaaatgcttttcctagatgctatcttgctaatttattttcccctttcttcccagcctgtctcgatatagattgaagtttagcgctgataaagtagacacaatgattgttcaggcaatttgtaagtatagtacatgcaaagtccgatttgttgctctgtccttcatgcgttttcatactgttgaaactatcttttatgattctgtctgttgagaaagagaaaggaggccaggtgtggtggctcaagcctttaatcccagcacttgggaggctgaggcaggcggatcacctgaggtcaggagttcaagaccagcttggccaacatgacaaaactctgtctttactaaaaatacaaaaaaaattaaatgtgcatggtggcgtgtacctataatcccagctactcaggaggctgaggcaggataattgcttgaacccaggaggcggaggttgactatttggagattatatgaatcacagaattaacattacgttaattaattcatttgtatttttccatgaaaatgttaaaaacataagtgcaatctttgtagttgtgtattctgctgtgtcattaaatggtttttagaaagctcaaaagctgccaggcacagtggctcatgcctgtaatcccagcactttgagaggctgaggcgggaggatcacctgaggtcgggaatttgagaccagcctgaccaacatggagaaatcccgtctctactaaaaatacaaaattaaccaggcatggtggtgcatgcctgtaatctcagctactcgggaggctgaggcaggagaatcacttgaaccctggaggcagaggttgtagtgagttgatcgtgccattgcactccagcctgggcaacaagagcaaatctccatctcactaaaaaaaaaaaaaaaaaatcaaaatcttaatcgtttttctattttagaaatgcattcggccgtggctcacgcctgtaatcccaacactttgggaggcagaggctggtggatcacctgaggtcaggagttcgagatcaggccaacatggtgaaacccgatctttagtaaaaaataaaaaaattatctgagcatgatggtaggcgcctgtaatctcagctattcaggaggctgaggcaggagaatcacttgaacctgagaggcggaggttgcagtgggccgagatcgcaccatttcactctagcttggacaacatgagcaacactccgtctcaaaaaaaaaaacaaagtattcggctgggcgcagtggctcacacctgtaatcctagcacattgggaggccaaggcgggtgaattgcctgagctcgggagtttgagagcagcctggctaacatggcgaaaccctgtctttactaaaaatacaaaaaagtagccagtcgaggtggcgtgtgcctatagtcccagccacttaggaggctgaggaaggagaatcacttgaacccaggaagcagaggttgcagtgagctgagatcgcaccactgcactccatcctgggtgatggagttagactctgtctccaaaaaaagaaaaaaaaaagcgctcaaccagcgattcctttcctagatttatacccaaaagaattaaaaacagaactgagttgcttgtacacctatgttcataacagtgttatttacaaaaccaaacagtggaaacaacccagataccttttaacagatgaatggataaactgcattgtggatgcagcttgaatgtccctaatctgaaattcaaaatgctctgaaatctaaaactttttgtggtaccacacaaatccacaagtggaaaactccacacctgaccacacgtcaaaactttgttttatgcacaaaattatttaaaatattgtgtaaaattaccttcaaggttttgtatataaggtatatgtgaaatgtagatgcatttcctatttagacttcgagttccatcctcagcctcatacgtgtttgcaaatactctgaaatacttctggtcccaagcattttgggtaacgtacacccagccacttcacacagtggaatgttagtcagccttaaaaagaaatgaaattctgatacatatttcaacatgataaaccttgaaaatatgctaagtgaaatagtcacaaaatactgcatgattctgcttatatgaagtacctaaaataggtgaactcagagacagaagtataaagataactagaggttggggggaaggtgggaatgagttactgtttaatgggtacagaatttttcagtttctgatgataaaattgctctggcaatagatcctggtaatggttgcataacatcataagaatacttaatgctactgaatagtacacttgaaaatggttgaagtgttattttttattcttttttttttaaattttttgcgacggaatcttgctctgtcacccaggctggaatgcagtagcacgatctcggctcactacaacctccacctcctgtgttcaagtgattcttctgcctcagccctccagagtagctgggactacaggtgtgcaccaccatgcctggctaatttttgtatttttaatagagatggggtttcaccatgttggccaggctggtcttgaacttctgacttcgtgatatgcctgtctgctgggattacagacatgagccaccgtgcccagcctgaagtgttaaattttatgttgtgtatgttttaccacaataaatccctttaagttttgtttgtttgtttttaatctactacagccttgttagatgacttggataaagaactaaacaactacattatgcgatgtagagaatggtatggctggcatttccctgaattaggaaaaattatttcagataatttaacatactgcaagtgtttacagaaagttggtgagtaatttgttcatcctttaaggcattgaaagtaaatgaatttgattgcatcctaaaacatgacgtatagcattttgttaagcaagattcccagggtttttgcaatttctgtgtatttgggaagtgtagcagtttagtgtcttaaatttaagaaacaaaatgaattttaacttagattttgatggcctataacatgatattagtacctaatgctaaatagcagtattgccgtctgtactgttaatatacagaggaacttgattgttgattgtcgttaacgtacagaggaacttgattgattgatggtttacttgccttacgaattactggccccagcttcagtataaaattgtctgtgacattattattagtcctgtcttttttaaatttttgccacttatattctgtaataagtgttgtggcatattttgtcctctttttactctgattattttttggaagaaggtggtggggagacatttaatgtctaaacttaaacccttaaatgaggaaaactgttatactaggtcaaacttcttcattttttttgttttgtttaggcatccttttcattggctttctactttttcttttgactatttgctggattttatataatttgttgaagagtgattctccctcatcctctgcaaacattccataggcgataggaagaactatgcctctgccaagctttctgagttgctgccagaagaagttgaagcagaagtgaaagcagctgcagagatatcaatgggaacagaggtttcagaagaagatatttgcaatattctgcatctttgcacccaggtaaattttactcctggagaatctagttgtggtgttaccagctctatagtactaatttttctgatggcaatgatgatttttacacttattgttgttcacctgataacataaatatgagggtgttcagtcactacctcatctgatgccatcatgatttgtatacttaaaagggggaaatacatattaaaaggaagtaatttacaatcatcgtctgaataatgaattaaccaaaaatcaattaagatggcagagaaggccaggcgcgttggctcacgcctgtaatccccgcactttggaaggccgagtcagggattgacctgaggtcaggagttcgagaccagcctgaccaatatgatgaaacccccatctctactaaaaatgcaaaaattagctgcgcgtggtggcgtacacctgtaatcccagctactcgggaggctgagacaggagaatcgcttgaaccagggagggggaggttgcagtgagccgagatggcaccattgcatccagcctgggcaacaagagcaaaactccatctcaaaaaaaaaaaaaaaaaaaaaaaggatggcagacaattatggattgagccttttaattctgagtcttatgtctatatcttgtgatttttttttctttcagatttgaaggtagccatataggaattaaaaagagcatgatacaaatgtttattgctcagaatcttttttttttttttttttttttttttttttttttttgagacagagtctcaccctgtagcccaggctggagtgcagtggcacgttctcaggctcactgctacctctgcctcccaggtcccagttcaagcggttctcctgcctcagcctcccgagtagctgggattacaagcacgtgccaccatgcccagctaatttttgtatttttcatagagacggggtttcaccatgttggccaggatggtcttgaactcctgacctcatgatccacctgcctcgacctcccaaagtgctggaattacaggtgtgagtcactgtgcctgggctgcttagaatcttttaaaaatacagttacgctgactaagattttcaggcagtggaccaagtagtttacatacattatataacgaagtcctcattacagccatcttatagaaaactgatgttaggatcatgaggtcaagagatagagaccatactggccaacatggtgaaaccctgtctctactaaaaatacaaaaaattagctgggcgtggtggcgggcccctgtagtcccagctactccagaggctgaggcaggagaatcacttgagcccgggaggcggagattgctgtgagctgagattgcgccactgcgctccagcctgggaaaaaaaaaaaagaaaactgatgttaggcataggtgatgtacccagtacccagggttgtgtagctgctctttcataattgagggctccagtgttttagacaggaatttttactgtttttactcatatgatatttgtgacttaactttattccttatactaggtgattgaaatctctgaatatcgaacccagctctatgaatatctacaaaatcgaatgatggccattgcacccaatgttacagtcatggttggggaattagttggagcacggcttattgctcatgcaggtgatggttttaatgtaatttgtaaatatgagtgtttgaagtattttctggttaggattttgtttacatctttaaactacagctgttaaagaaattttagctgataacacaaaagtagatgatatgtgggagatcactaagggccaagtgttcaatgatgatttctatttgtttgcctgatttccttttggataatgaaggcatctttagtcactacctcttctgagacacttgtggtccattgttagaagtttgttagggttaattagaacaatcggatgaatgcaggaggataaaacagttaacattttcataataaaaactcactagacctagatttgaatacagttttaagaaatcactgtagagaaagaaaaaaaaaagaaatcactgtagaggatttgtgcccttgattgattaccttagtttcactattgagtgtgaggatgtaatatatttgactttcaaaaatattttcaacaactgatttataataaaactttgtatatgtgtatggcagtattataaggatgatatgctataattaaaatgctatgtaattgaatacctacaaatacaatgaagtactgattcatcatttttatgttacttggagacattgttataattcatcaaaaaagattatatcatctgcatcagagtgtttaaaatggcataactcctttttttttgtttgagacagagtttcactctgttgcactggctggagtgcagtggctcactgcaacctctgcctcccaggttcaagcaattctcctgcctcaggctcccaagttgctgggattacaggcatgtgctgccaccatgcctggctaatttttatatttttagttgagacagggtttttgccatgttggccaggctggtctcaaactcctgacctcaggtgatctgcgcacctcagcctcccaaagtgttgggattacaggcgtgagccactgcgcccggcctggcgtaactcctttagctgcatcattaatcaaaggtttcattcaaatgccctcagctataagatcagatgatttcattgtctctacccattttcataggtatagctaaacttgtagcagtaagcaatggcaggggttaatagaagtatgtatttgttggccaggcgtggtggctcacgcctgtaatcccagcactttgagaagctgaggtgggtgggtcacctgaggtcaggagttcgagaccagcctggccaacatggtaaataaaaccccatctctattaacaacacaaaaattacccaaccttggtggcatgagcctgtaatcccagctactcgggatgctgaggcaggagaattgcttgaacccgggaggtggaggttgcagtgagccaagattgtgacattgcacacagcagtggtgacattgcttgcctgggtgacaagagtgaaactccatctcaaaaaaaaaaaaaaaaaaagaactatgtatttgttacacttttaaaactatgtctagtgcttaagttcatagtattaatagagtctgttttctgacaggaaatattctatacagcatatccaactaagcagcatgttgataacaatagtccccagctatttatggagatgtattctaagctcccccctccaagaatgtttgaaacagaggatagtactgaatcctatactgtatatgctgttttttcctaaacatacatatctataataaagcttagcttataaattaggtacagtaggatatcaacaacagtcataatataacagttataacactatgccagcagggccgggtgtggtggcttacgcctgtaatcccagcactttgggaagctgaggagggtggatcacgaggtcaggagttcaagatcagcctggccaagatggtgaaaccccatctctactaaaaatacaaaaaaaaattagctgggtgtagtggtgggtgcctgtaatcccagctactcggaggctgaggcagagaattgcttaaacccgggaggcggaggatgcagtgagccaagatcgcgccactgcactccagcctgcgcaacagagcgaaactctatctcaaaaaaaaaaaaaaatgcaagcataactatttttgtgcattggttacttgaatataagcactgcagtactgcacaacggagagggctacgaaagtgactaatgggtagatagagatgattcatgtcctggggggagctgagtgggatagcaagagatttaaaacttaggaactatttatttctggaatttcctttttaatattttcagactgcagttaaccacaggtaatttaccacacaaagtgaaagcacaggtaggggactattaatagatacttgtaggaatatctcttcctaataaatgtgtttatttgtaggctttttcatatctaaagcaatagaatatttgatacaatctcagaaagcagggaccagattagtgttcgtgtgtgtgacatttatgtcactcctgtagtatactaatggaatttagaatagtactgccatctctcaggtgaatagaaacattgaacttaataagcttagccttcagtttgtcctaggcattcattgcaaacctgcttgtgctaatgaaggaattacaaatgaaacatcaagatttttagggaattctggattatagaattctatattatatgtgatttttatttattatggtggctgtaataattctataggtcttttgtttcagtacgtggaacattcatatatttggaggtgcattctttgtaacttttttcttttgtaggttctcttttaaatttggccaagcatgcagcttctaccgttcagattcttggagctgaaaaggcacttttcagagccctcaaatctagacgggatacccctaagtatggtctcatttatcatgcttcactcgtgggccagacaagtcccaaacacaaaggaaaggtgtgttatagggttttgctttgtttttgaggttagactttttcattttttacaacccatttttcttctactctgtagtacacattaaatcttctattgtctctttcttgttaaatagggaatggtgagttatttaaataaaaagtgctttgtgtacactgaaggataaggttagaagaaactgttattggttggattaaagccagtttcttccattgtgttagtatttttttcccccctagaatctccctgtggttggcacactgaaaatactatctctggcagcaaaaaaaaaatctaacatttacgaatcataaaaaatagcatatgcattatgctaaaacactttgagagaagtcactaaactttttttttttgagatggagtcccgctctgtcgccaggctagagtgcagtggcttgatctcggctcactgcaacctccagctccctggttcaaacgattctcctgcctccctgcctcagccttctgagtagctgggattacatgcacgtgccaccacgcccggctaatttttgtattttaagtaaagaccagtttcaccatgttggccaggctggtctcaaactcctgacctcctgatccacccacctcggcttcccagagtgctgggattacaggtgtgagcacctgtgcctgtcctaaatcttcagtagccttatgagatgtaggtatctctatcttgcagatgatgaaactgaggcttagacaagttaagtactttcaatgtttttgaaagatgtgtcgtttaacagatctaaactgaaaattgataaaatttagagcagagtggtggaggaaaataaagcgttcaataaaataaaatgttaattagattgaaaaagaacccacgcttttttttgtttgtttgtttgtttgtttgtttgttttttgagatggagtctcactctgtcgcccagactggagtgcagtggtgccatcccggctcactgcaagctctgcctcccaggttcacgccattctcctgcctcagcctccagtgtagctgggactacaggcgcccggcaccacacctggctaattttttgtatttttagtagagacagggtttcaccgtgttagccaggatggtctcgatctcctgacctcgtgatccactcgcctcggcctcccaaagtgctgggattacaggcgtgagccaccgcgctcggccagaacccgcacatatttaagattgttacgaggaaaaagatgcacttcttttcagtgacctcatagcacagaactaatgtcactgagtagaaactaaagtttaaaaatattttttaaaaaaacctagtttgagctaatatttgacatgaattgctgtaaaatcttttcagccacagaagtgttggtggtgatatatggccattagattgtggcaaaggttgaaatacgatggatgatttgaattgtatgattcataatagttttataactcctgattttaaaacatccaagttattgaggattttacatctgaacatggaatatagttcttcatgtttttctattagatttctcgaatgctggcagccaaaaccgttttggctatccgttatgatgcttttggtgaggattcaagttctgcaatgggagttgagaacagagccaaattagaggccaggttgagaactttggaagacagaggggtaagaactacatcatgcctattccagaagtattacttgtcaaaagttaataaactgagtaaatttattaacttcatctgctaaacagttttatgatacttattagtatgtctaaagtattctttttgtgcctactgttaacaattgctattatttaccaagaattgatgtatccaactgcatttgccattaggatatgctattcaaaataacaaaacaaaaaatagcagaaattgctgtttgctggcccactgattcactagactgtatagtgtattataaagagattatgacttagaagtgtatttgtaatttttcgttttcttcttagataagaaaaataagtggaacaggaaaagcattagcaaaaacagaaaaatatgaacacaaaag

SEQ ID NO: 13037 - DNA, 714 bp, Homo sapiens
gaaccacgtgaaatggcagctatgtgtcttggattggctcacagcctgtctcgatatagattgaagtttagcgctgataaagtagacacaatgattgttcaggcaatttccttgttagatgacttggataaagaactaaacaactacattatgcgatgtagagaatggtatggctggcatttccctgaattaggaaaaattatttcagataatttaacatactgcaagtgtttacagaaagttggcgataggaagaactatgcctctgccaagctttctgagttgctgccagaagaagttgaagcagaagtgaaagcagctgcagagatatcaatgggaacagaggtttcagaagaagatatttgcaatattctgcatctttgcacccaggtgattgaaatctctgaatatcgaacccagctctatgaatatctacaaaatcgaatgatggccattgcacccaatgttacagtcatggttggggaattagttggagcacggcttattgctcatgcagatttctcgaatgctggcagccaaaaccgttttggctatccgttatgatgcttttggtgaggattcaagttctgcaatgggagttgagaacagagccaaattagaggccaggttgagaactttggaagacagagggataagaaaaataagtggaacaggaaaagcattagcaaaaacagaaaaatatgaacacaaaag

SEQ ID NO: 13038 - DNA, 18703 bp, Homo sapiens
gtggagggtttaggcagcgtgttctgattctttgcgggacggcgagcgcatttgtgctttgcccgccgcggcctaggaggccttttgaggccgcgtagtcggtgtttttgaactgactctacagcttctggcaggccgtgcggcgccctgacccggcctcaccatgttggtgctgtttgaaacgtctgtgggttacgccatctttaaggtaggtgggagagcgagccgttaaagggggaaggcggatgctggacagacgaggagagggaaagacttaagcacggaactactcagagtagcgtgggtgcctgttatagcccgggctctgggaggagggagaaggcctttacacctgagagccatgttacgtgtaacacgtggccccgccgtttggggagacccgttctgcattagaggattttatttcctcccgttgaaggggtgggcaggaggcgtgttagaatttaacagattatagggaattcggactttattctagatgttttgaggaatgatcgaaagattttttttttttttgagatggagtttcgctcttgttgcccatgctggagtgcagtggcgcaatcttggctcactgcaacctccgtctcccgggttcaagcgattctcctgccttggcctcccgagtagctgggattacaggcctccatccaccaccacgcctggctagttgtttttgtttgtttgtttgcttttagtagagacggggtttcaccatgttggccaggctggtcttgaactcctgacctcaagcgatccacctgcctcggcctcccaaagtgctgggattacaggcgtgagccaccgtgctcggccaatcgaaaggatttaagcagaggaatgacctgctaatttgtcttaatacggttactctgctgtgtggagattagactcgaggagataagaacggcagcaagaatacttttgcattcatttggacaagatgaaattgcctggtatggagagaaacaaatatcgatagaaattgtgaaggtagaacaggaaggactggctaatagattgaatgtggggttttggtttaaataagatgttaagaaagtttcttggggaaggactaaagatttccggtttgggctgtgcgaagcttgcgttgtctattagacctgataatgcagttgtgtagatcgggcagttcagtatttcagatttgaagcttaggggaaaacatctgggctggtgatgtcagtttgaggtttggttgttttcgtggggaaagtttgacaagttcgtcagcactgaaatggttgaatggtaagacattcgtatcgcaagatgctgttgagatgttaggaagaatgagtgagattgagtgccttttcttgtgcggtgcaactcttctgaggtctgtgaatatagcaatgaaaaataaagtttttatgtatattctacatatatatatgttggtagaaagcaaaaacgctaggtaaaaataaatgtaatacaattttagctatgaaccaaaaaaccatttgtggtgtggatgcaagaaagtctggatgggtgcagagttctccatgtttcacttctgacatttgaaaatacgcagtttgcatttgatacgtcaaatgttatttttaagaaaaccaataaaatcattaaaaccgaaaaggcagttttgcttgtttttaccttagttggagttatctgcaattgccgtattagtgttttaaggaacttgtaagtaagctccttagtcccctttagagctacgaaacatgtcaattttacttttctccagctttttggaatcttatctaaattaccatgtagagttctgcatagcttcaaattctcttagccaatgtggtctgtaagtgtctatcgatgaatttcaccgttaattgccgtagtatactgtcctgtaccggatgtgaagaggagcaactctgcacagtgcactggttgtctcccatggtaggaaggaattggcttatcaatggtcggatttctagacctgggtcctaaaatactcaaccgtgtctcgatgaattactgatttctattaatgaaaagtgtcctcctccatgaaaatgtctttgagtattccgttggagtttgcagtgctatttatctgcaagttactgttcaaaatgattaaattgtggtttatgtaacctagtactaaagaaataactagttaagctcgaatatgttgacattgattagtttgtaattattggaattaacattgatcgtttctgagtataaaagacatacaaacgttctggaactagtgatggctgcacatttttgtgaaaatgcactactaaaaagtgaattgtacactttaaaagggcaaatattaagatacatgtaaaattaatatgatatatggtgaattttatctcctaaaaaagtagacatacggttcaaagttattagtttcctttcccataatctttcaaaatgctagggtataaaattatgttggttgccaggcatggtggctcatgcctgtaatcccagcactttgggaggccgaggccggcggatcacaaggtcaggagtttgagaccagcctaaccaacatggtgaaaccccgtctctactaaaaaaatagaaaaattagctgggcgtggtggtgtgcgcctgtaatctcagctacttgggaggctgaggcgggagcattgcttgaacccgggaggcggaggttgtggtgagctgagatcgtgccattgcactccagcctgggcaataagagcacaactccgtctcaaaaaaaaaaattatattggatgcatataattcatgctttgatgagaatgctttaggaagttttttgaagttttttgtttttttgttttttttgagacggagtttcactcttgttgcccaggctggagtgcaatggcgcgatcttggctcaccacaacctctgcctcccaggatcaagcaattctcctgcctcagcctcccgagtagctgggattaccagcatgcaccaccacgcccagctaattttgtatgtttagtagtgacagggtttctccatgttgaggctggtctcgaactcctgacctcaggtgatctgcccgcctcagcctcccaaagtgctgggattacaggcgtgagccactgcacctggccttgaagttttttttaaacttccatttacagtgaggaaaacattttatgtataacccatgtacacatacaaattcatgtttatgtatttaaaatttattttgaggcagggtcttgctctgtcacccaggctggggtgcagtggcaggatcatggctcattgcagccttggcctcctgggtcaagtgatcctcccacctcctcccgagtagctgggactacaggctcaagccaccatgcctggctaattatttatttatttgtatttgtatttatttattttttgagatggagtctcactctgttgcccaggctggagtgcagtggtgtgatctcggctcactgcaacctccgcctcctgggttcaaacgattttcctgcctcagcctcccaagtagctgggattacaggcgtgagccaccatgcctggcctaaatttttttttttttttttaagaggcagagtctcactatgttgcctaggctggtctcaaactcctggcctcaaggtgctgggattacagccatgaggtacggtgttctgcccacttatgtgtttagagcgattcaaaaggaaaacacttccaaaaagttattgctcattaacagggttatatatatataaatgtaaagacattgtgtaaaggaactgttgtgattaattctaggatattataaaaattcagcctgtggccgagagcagtggctcacgcctgtaaccccagctacttggaaggctgaggcaggacaatcagttgaacctaggagcagaggttgcaatgagctgcggtcgcgccactgcagtgcagcctgggcgacagggcaagactccgtctcaaaaaaaagaaaaaaagaaaaaaagaaattccacctgtgtccttgtgtcacgtggcacacagcataagattttagtcttgctcataccagacttccttcagctgctcttccatgtggtagccattagtacgtataaccatttcacatgagatgtaactgataggactgaggaagtgaattttaacttacttgaattttaatggttatattgtacagtgtagctgtgtagcatagcattttgtgtcacttcattttctcaaggtttggagaaagatttttgatgtacataccaaatgtctatataaaacctaagtactgagcaatatattttttctaactttattgggtgtactttacatactgtataactcacctataggttttagttacaatccagttttatagtacactttgttgcaaaaagttctcatgcccattttcaagttagtcctgctctagacaaccactgttcagctttctttttgcataattttttctagaagtttcatgtaagtggagtagtattttagtcttttgtgtttggcttttttcacttagtgtaatgcttctgaagctaaccgaagagctttttcacatttgttgcgtgtatggatttgtttctttttgagcagtgcacattttaaactaattatcagttttatcctgtatttaaacaagtttcataaaatattaacttgctcatattgtctgtggaagtgaaacttaaaagttagcatcaaataatttacacaaaacatagaggttgggtgcagtggctcacgcctgtcaccctaacactttgggagggtgaagcaggaggattgtttgagcccaggagttgcagaccagcctgggcaacatggcggaaaaaaaattagctgggcacagtggtgcttgcctgtagtcccagctgctgcaggaggctgaggtgggagggaggtcacggctgcagtgagctgtgattgagcctctgcactttagcctggacaacagagtgagacctcatctcaaaacaaaacaaaaaccacacaaagtctcaagcaatcaattaaaaatgaaaatgaggaggctggacatggtggctcacacctgtaatcccagcactttggaaggctggggtgggcagatcatgaggtcaggagtttgaaaccagcctggccaacatagtgaaaccccgtctctactaaaaatacaaaaattagccgggcatggtggtgtgtgtcgccaaatctgtagtcccagctgaggcaggaggatcgcttgaaccagggaggtggaggttgcagtgagaagaccgcgcctctgcactccccagcctgcgtgacagggcgagacactgtctcaaaaaaaaacaaaaaaagtgattaaaattcttaattccatataccctcaccaatattctgtatcagctgcccaagtattagataggatgggctcaatcctaaaaggcacaacccccatatttaacatccctaaaattgggatgtcttacaattgatgacaggtcaattgggagtgtaaaagaataacataagctgggtgtggtggctcacgcctgtcatcccagtactttgggaggctgaggcaggtagattgccagacctcaggagttcgagaccagcctgggcaacagggtgcaaccccgactttactaaaatacaaaaaaaaaaaaaaaaattagccaggcatggcagcatgtgcctgtaatcccagctacttgggaggctgaggcaggagagttgctttaaccagggaggtggaggttgtagtgagctgagatcacgccactgcggtccagcctggccgacagagcgcaagactccgtctcaaaaataaaaaaaaaaagaatagcatgttaaattttgtgaaatagagtatgcacagatattatgcatatatttttatttaaaaaaccagctggatcaggcgccatggttccttcctgcactcccagcactttgagaggccaaggcaagaggatcacttgagtccagaagttagagatcagcctgggcaacaaagcaagcccctgtctctacaaaaagatttttaaaagagctagatgtcgcagtgtgcacctatagtcctagctacttgggaggccgaggcagaagaatcgcttgaggccaggagtttgaagctgtagtgacataggaccacaccactccactccagcctggacaacaaagcgagaccctgtctctggaaaaacaacacagctagtaaatttaaaactatactttgctaataagcattatttatcaagtccataatatagcacatctacacattaagacgcagttctagtctggttatatattattttcagtaagagaaacacaatgttgcaagttgtataaaacttagatgagtgacaagatgattttaggggtttgttctgatgtataattttttttttttttttttttttgagacggagtcttgctgtcgcccaggctggagtgcagtggcgcgatctcagctcactgcaggctccgccccctggggttcacgccattctgttgcctcagcctcccgagtagctggaactacaggcgccttccacctcgcccagctaatttttttgtatttttagttagaggcggggtttcaccgtgttagctaggatggtctcgatctcctgacctcgtgattcgcccgcctcagcctcccagagtgctgggattacaggcatgagccaccgtgcccagcctgtataaatttaatcacacatggttgaattagatatgttggtaaaaataacccaaactagaaaaacttagagtcacacaaagcaataaacaactacaaagcctagagttggtattaacaatttataaactaatagctctaactttgtatatcatgaagttttagaatccagagacacctcaccaagtctcatgactatactgaaaacactgattaaaattttttgaaattgttcagagaatgcagctaaccataactgaagttcactatttttaagaggacatgtatcaaataggggatatgactcatgagtaaaattcacattttttctagctgaaaagcaagtatatttgaagataacatttgggtaacaaaattgccatatttaaaagatactttcggcctggcggggtggctcacgcctgtaatcccaacactttgggaggccgaggtgggtgcatcatgaggtcaggagatcgagactatcctggctaacacggtgaaaccccatctctactaaaaatacaaaaaattagccaggtgtggtggcaggcgcctgtagtcctggaggctgaggcaggagaatgacgtgaacccaggaggtggagcttgcagtgagccgagatcctgccattgcactccagcctgggcgacagagcgagactccgtctcaataaataaataaattaattaaaaaatactatcaccattctaaaactgaagttaaaataacaaaggaaatgtgataaaatcagggcaattcatgagcacacaaaggtcttcaaagactatgttatgtcagccaaaaccattactatgacaaataaaaccattgtgttcccaactgcaacatcttgaagaaaacattgctaataaagaccatctaaataagaaagttagagatattgctacattttctgtattacatttgtctcaaagtttttatttgtctcaaatttttaatcatttcttttcagccagggtaatgataaatatttgtatacagaaatccattttaagttttatcattttaagataatttccatttctaagtagaaatagtatacaactattaccattgcaatctttagcattgttgttacaacagtactagttttaaaacaagtctttatattttatagatacaaactgaaatattaacaggtaaaaattaaatgtctaggtcttgcttcaaaacaatacaaggcggctgggtgtgttggctcacgcctgtaatcccaacgctttgggaggccgaggcaggtggatcacctgatgtcaggagttcaagaccagcctggccaacttggtgaaacccagtctctactaaaaatacaaaaactagttgggtgttgtggtgcgtgcctgtaatcccagctattcaggagactgaggcaggagaatcgcttgaacccgggaggcggaggctgcagtgtgccgagattgcgccactgcactccagcctggcgacagagtgagactccatctcagaaaaaaaaaaaaaaagccatttactgtgattcctaaaagtatgcatgaacatgtgttgcacagacattcaaagtcttggagaatatatacctaaatgttgataagtatattgttgattaaagtaccctatgtttcttttgcatttaaaaaatttctcacatctagatgtgtctcacaattgacgatagttttagagaaatccataatactttcatgttaggatgatcatagcagtaaataacgaatataatctattgaaagtagacaaaagttttttttgttttttgttttatttttttgagatggagttttttgctcttgttgcccaggttggagtgcagtcgcgcaatctcggctcactgcaacctctgcctccgggttcaagcaattctcctgcctcagcctcccgagtggcggggattacaggcatgtgccaccacgcccagctaattttgtattttttttttttttttttttttgtagagacggggtttctccatgttgatcaggctggtcttgaactcctgacctcaggtgatccgcctgcctcagcctcccaaagtgctgggattacagatgtgagccaccatgcttggcgcaaattaaagtttttaatgattacaatactttactgtaaagggattaatggctcttttaaaagaaaggttctcggccaggtgcagtggtgcacacctgtaatcccagctactcaggaggccgaggcactagaatctcataaacccaggaggtgaaggttgcagtgagccaggattgctccactgcactccaggctgggctacagagcgagactccatctcaaaaaaataaaaagaaaggttccctgccctaccccctaggaccccatagctccagctacggcccaaggctggggcaggaatatctcttgaggccaggtagattctagactgaatagccactgtactacagctgactggactagatctgaattccatttagctgttaaatgggcaattcgaactagtaatttgaccaaaattacatgcagggtaagaaaactagttcattatcttagtgaaagaaatagcttctacaccttcattttacatgtaaaattgtatttgaagaatgcagctgtatatgcctcacctgtaccatttaaataaaactatttaaacattttattacaggttctaaatgagaagaaacttcaagaggttgatagtttatggaaagaatttgaaactccagagaaagcaaacaaaatgtaagtactcttgaaatcaataatttagcagttaacatttagggcttgttttattttttacatttttccctgatttatataatgttacattcgtagttttctgttttgaaatctgtttcaggaataattttggtatgaacctaattattacaaatgttttacttggaatataggccatctcaattaatttgaaggcagtagtctcccccttacccacagggattatgttccagaagaccctgtggatactttaaacctcggatagtaccaaatgtgattgctgtcagtaggaacacatttgtcttcgtgtcttccacacacaaatgtaataccttttttatcttaactaagcacttaccgcacacaggggttgtaacctgctttttgagttttgcaacatcaaaactagcatgaactactttttctttcatcacaatttcatggaagattcattcttagtgtagatgttaaatctttggtttttttgtttgttttttgagacagagtcttgttctgtcacctaggctggagtacaatggcgcaatctctgctcactgcaacctccgcctcctgggttcaagctattcttctgcctcagtcccccaagtagttgggattacaggtgcccaccaccatgcccagctaatttttgtatttttagtagagacagggtttcgccatgttggtcaggcaggtctcaaactcctgacctcaggcgatccgcctgcctcggcctcacaaagtgctgggagtacaggcgtgagccaccacacctggcctaaatcttcgtatttgtatgtatatttaagggaccacactagtatgttcccttaccagataagaaaaccttgcttaagatgacactgttgcctggtgtggtggctcatgtctgtaatcctagtactttgggataccaaggtgggtggatcatttgaggtcaggagctcgagaccagcctggccaacatggtgaaaccccctctctcctaaaaacacaaaattagccgggcgtggtggcacatgcctgtaatcccagctactgggaggaagctgaggcaggaaaatcccttgagcctgggaggcggaagttgcagtgagccgagattgcgccactgcactccagtctgggtgtcagagtgagaccctgtctccaaaaaaaaaaaaaaagatgacactgttttaggcaactagaagactagttttccttcttaaagggttatatgctttgttgggttaatctgattcgttgttgtcaatgatgtattcttcttggaactgaatctaagtgatctgactcaatattcgtcactaccactgagacaacgatgaatcaactatatgtttctttctggataaaatactaccctgaggctgggcgtgatggctcacacctgtaatcccagcattttgggaggccaaggcaggcggatcagttgagcccaggagttcaagaccagcctgggcaatataggaaaaccccatctctaccaaaaacaaaaattagctgggtgtggtggtgcacacctatagtcctagctgcttgggagactgaggctggaagatcctttgagctcgggaagtcagggctgcagtgagctgtgattgcaccactgcattccagcctgggtgacagagtgaagtgagaccctgtctcaaaaacataaagggggccgggcacggtggctcacgcttgtaatcccagcactttgggaggtcgaggtgggtggatcacaaggtcaggagtttgagaccagcctggccaatatggtgaaacctcttctctactaaaaaatacaaaaaaattagccagccatgggggctgggcacggtggctcacgcctgtaatcccagcactttgggaggccaaggcgggcggatgatgaggtcaggagatggagaccatcctggctaacacggtgaaaccccgtctctacgaaaaatacaaaaaattagccaggtgtggtggcgggtgcctgtagtcccagctacttgggaggctgaggcaggagaatggcatgaggcaggagaatggcatgaacctgggaggtggagtttgcagtgagccgagattgcgccactgcactccagcctgggcgacagagtgagactctgtctcaaaaaaaaaaaacaaaaactagccaggcatggtggcacaggcacatgcctgtaatcccagctacttgggagtctgaggcaggagaattgcttgaatccgggaggcagaggttgcagtgagccgagatcgcaccactgcactccagcgtgggtgacagtgagattctgtctcaaaaaaaaaaacaaaaaaccataaagggttaggatgtaacaagaatgagacctgacaataagctattttttttaatggcatttgtacaggatagacaaatgaatatcatgagattcctaaaaaggactcacgtacgttttcttgagtcaattctatgctgtataataaagtcatctctgtacagctttatgcaacaggggtttgtattaaagcttcaacatctttactcttggccaaaatttcctccaaagcctacaactttcttttaataatccaagcattactagcctaacatttagaaaaactagtaattgtatgaagaatatctaacttcacaccctgatacacaatggtaggcatgttttattggtgtgtgctttggaaacagtcaagcacttctttccaagttatgtggcttttgaatcaacgcactgcccccaataacatgtttatctcttttttttttaattctagagtaaagctaaaacattttgagaaatttcaggatacagcagaagcattagcaggtaaagtaaaaaattagaagcttgcttttttgaaaaaattaagtcttagccgtttgtttttcttgtttaaaaggttgtttgcttcagttgcctgtgttaaccttattcaatgttgtcaatgatgcattcttattggaactgaatttaagtgatctgactcattcgtcactaccactgagacaacattgagttagcttttttcaccatagggctggttttccccatgtgtgaggagaggtgagaagtggttaagttgatctccctgtggaaaccagcaacataatgctgaagcacaattcagtaaaaggtgttctacaagggaccaaggtaatgtggtcaagtatacagctctctcctcattttaatccaagggtagagttgtaatcctgagaacagccaggattcacagttgaaaaataatttaaaaagctcttctgggggtatagatttttagttcaaaaaaacatatcaatattcagagttatacagaaactgacagaggtgttatttttaaaagattcagaagaatggatgactcatactcttcaactagatttcatcacgggacaacagagtgatcgggtttatttactgtaattgactgcagtaggtcttacagttttgtttttttaagtgttagggaaaacaggaagagcagatataaagcccaaatcattaaattttcaactgcctgaattctttatcacaaatcagccaactatttggcggtgtagtttgaaaatgaaggaccgtgaggaagaatatggcttaaagctgggcaagaatatgacagatgcaaaaaattttgttaaataaccacaggagaaaggtacagtttttgtctgaaaatttggaatccaactaaacatgctggaacataacagaccaccctaaccttggcagaggggtaggctgaaggaagacccatagggccagtttctttgttttataaacatagttctagggctgcttcaccaactcttcagtaattagagttatatacagccataaaaaaaactgtggtaatattaacttggagaatttttaaaaagatagcctgttcatcacagcttttaagtatgggtaaacatttggtaagattccaagcaagattgtgttagctgtattcaaactctagggggtgttgttgacatagactgggatatgaacagttcctagtcctgatctcaagtagcctcttctgaattcctttttgcatacgatctttaatctgcttgggatatatctggccagtccttattaaactgtattaaatggacaagccaagcttttgctcaaacaagcaggtttttactattaatacctaatatattgagcacatactgattgtcagatttatgcttatgatttcataattgttatttaattcttgaatcctgtgaggcagataaccatcatctctatgttacagatgataaaacttgaaatttaagcagtatttccagattcatttacctagcttctttgtattatttaaaataatgtacaataaggctgggtgcggtggctcatgccaggaatcccagcactttgggaggccaagacaggcggatcacctgaggtcagttcaagatcagcctggccaacatggtgaaacctcgtctctactgaaattacaaaaattagccgggtgtggtggcacacaccttagtcccagctactcgggaggctgaggcaggagaaacacttgaacctggtaggcagagatagcactgagccaagattgcaccactgcactccagcctgggcaacagagcgagactccttctggaaaataacataaaattaagtagtgtacagtaaatggacaaaatgccatagtagttgagaatttaaagtcaattccccccagtctaagctccatgagggcagagactgttctgtactgtcaaattcctagacgctagcaaagtatacagctatagaaggtttataataaatattttggggaaaatgaatgaaaatagtgaattttatcaggaatgctgtcatagaaacatttacaatgccttttcctatctgttttcaccagaaagttaaatgaacatcagctaattaagaaagcagaatccttcccctgggaattcagttctcactgcctattataaggcagttttgacatgacagaaccacaactaaatggctgtaaatgtcacagtgtacattttaaacctcatagccttagagtttgatgagaccaggcacagtgactaacacctgtaatcccaacactttgaggggctaagatgggcaggaatttaagatcagcctgggcaatatagcaagaccccctctcaaaaaagatttttttttttttggagatggagtttcattttgtcacccaggctggagtgcagtggcatgatctcggctcactgcagtctccacctcctgagttcaagtaattctcccaggaggctgggttcagcctccaaagtagctgagattacaggtgataccaccatgtccagctaatttttgtattttttagtagagacggggttttgcctgttggccaggctgctctggaactcctgacctcaggtgatccacccgccttggcctcccaaagtgctgggattacaagcatgagccaccgtgcctggccatcattttttttttttaaataaagaaatagggtctgttggggtgtgatgttgaatttgtattggtctcagacattcatatatgctatttgcatgaagtggtttatttttattcttgattgtgttttcaacttgcaagtctttttttttttttttttgatactgatcttcggctggagtacaggggcgcgatcccagctcactgtagtctctgcctcctgagtagctgggattacaggctcatgccaccacgctcacctaatttttgtatttttagcagagatggggtttcaccatgttgcctaggatggtcgcatctcctgacctcgtgacccgctcacctcagcctcctgaagtgctgggattatccatttgatcataattcgaatggatatacgatcaggagggaagagcaagacctgacttattaagcacaaactgcctgaccttggaaattgttgatagaccttcattcctgccaagcatttttcttttctttttctttttctttttttttttttagatggagttttgctcttgtcacttaggctggagtgcaatgtcacggtatcactttaacctccacctctgggttcaagcgattctcctacctcagcctcccgagtagctaggattacaggcgtgagccaccagggccagctaatttttgtatttttagtagagtgtttcgtcatgttagccaggctggtctctcgaactcctgaccttaggtgatctgccagcctcagcctcccaaagtgctgggattacagacttgagccaccacgcgcagcccaagcatactttttatgttttttgtttttgttttgttgagacagggtctgtcaccaggctgctggagtacagcggcatgatcatgactcactgcagccttgaactccctgggctcaggtgattgtcccagctcagcctccccagtagctggactacaggcacatgccaccacacccagctaatttttgtatttttagtagagacagggtttcgccgtgttggccaggctggtggtacacaccaccatgcctgggtaacccaagcatacttttacctcagtcaaatgtcagataaatttcagaagaggtattagttcgtgtgggtccagaaaaagggaatataggtctaaggaagggtgagaaatataaagcagctgatttagaacttgccagaaataccagcggtctcaaaatagaataggcagcctttgctactaagttttacattgctggaggtgtacaagtggagatacaagcaaagctaaggccttcactcaaacatgtttatattatggcagaactttgaaaatgattacactcatttttactagttttgatgtgattttaggatatttcaggacagtctatttgaaatgacaaaggaaagtgagtctgttttgtcttcccaaaaagattgtttctaagatttcatgattctcccttgagttcatgagaagattcttgtgagaaggaaagaaaccctggacctgattttacccctggctctgtagcaaaaatgagggtgggaagatcaaatgaaattgtgaaacatgtaacttataaaacatatatcatttcatttcagaagtaacattaaattcaagccctttgaaaggcctattttatttttttaagtgtcaactagggcaaggtctcaaagttaaaaatttgagagttaatgcttttgtttttctttttcttgaaaagcattcacagctctgatggagggcaaaatcaataagcagctgaaaaaagttctgaagaaaatagtaaaagaagcccatgaaccgctggcagtagctgatgctaaactaggaggggtcataaaggtaaagtcacgatatttttggtcatgcctgctagtcagatctcacagcataccaactacaaagcctagcctttgcaataagttgcttatcataaattctcaatacatttttttcttttctctaagctacatgataatggatttcccctaacatcagctgaactgagcaaataagtaatacctatttgttctagaagatatagaagaacaaaaaatgataaaaattgactttaacaaatctgctacccatatataatgttaatgttctatgtatatcatgccatatttttgtctagccacatttttttccaacgaaaatggggtccttatattttttagaaatatatttattagaaaacttttagtaggggtgtattgctggagatgaaataaaatgtgagagtggaaagaaagactaggaaaatagcctcccaaatacagaaagcagaacaattcgggcggggcgcggtggctcacacctataataatcccagcattttgggaggccaaggtaggagtatcacgaggtcagcagatcgagaccatcctggctaacacagtgaaaccctgtctctactgaaaatacagaaaattaaccgggtgtggtggcaggcgcctgtagtcccagctaattgggagtgcagtggcgcagtctcacagctcactgcagacttgacctcctgttctcaagcaatcctccctcttcagtagctgggactacaggcacatgccaccatgctggctaattattttattttattttatttcatttatttgagacagagtctcactctgttgccctggctagagtgcagtggcatgatctcggctcactgcaacctctgcctcccgggttcaagggattcccctgccttagccttccaagtagctgggattacagacgcccgccaacacgccctggcctcccaaagtgctaggattacaggcatgtgccaccacgcccaacctgtaatttttttttttttttaagacggagtctcactctgtcgctaggctgaagtgcattggctcagtcttggctcactgcaacctccgcctcctgggttgaagtgattctcctgcctcagcctcccgagtagctgggactataggcacctgccaccacacccggctaatttttgtatttttagtagagacggggtttcatcatgttggccaagatggtctcgatctattgaccttgtgatccacccgcctcggcctcccaaagtgctgggattacaggcgtgagccaccgcgcctggcataacctgtaattttaaaaagaagctaaataacaggtagtaaaagatctccttaaaccaactacttggtcaaattatattaatctttttatagcttttaatttatatagccaagctgtcttctggaagcttgtatcagtttttacttccaccagtgatacagtcaagtattctacaaacacactggaaattatgcttcttgtccaactgagaaatgcgtatatttaaattagtgccactttaatatttaggaaataatttcaggctgggcgcggtggctcatgcctgtaatcccagcactttgggaagatgaggcgggcggatcacttgaggtcaggagtttgagaccagcctgtacaacatggtgaaaccccgtctctactaaaaatacaaaattagctgggcatggtggctcatgcctgcaataatcccaggccgagacaggagaatctcttgaacccaggaggcggaggttgtagtgagccaagattgcgccactgcactccagcctgggcgacagagtgatactgtgtctcaaaaaataataataacaacttcaggaaagtctttttttttttaatttaatatagatgttcatgttcttgtaggaaaagctgaatctcagttgtatccatagtcctgttgttaatgaacttatgagaggaattcgttcacaaatggatggattaatccctggggtagaaccacgtgaaatggcagctatgtgtcttggattggctcacag

SEQ ID NO: 13039 - DNA, 638 bp, Homo sapiens
gtggagggtttaggcagcgtgttctgattctttgcgggacggcgagcgcatttgtgctttgcccgccgcggcctaggaggccttttgaggccgcgtagtcggtgtttttgaactgactctacagcttctggcaggccgtgcggcgccctgacccggcctcaccatgttggtgctgtttgaaacgtctgtgggttacgccatctttaagagtaaagctaaaacattttgagaaatttcaggatacagcagaagcattagcagggctggttttccccatgtgtgaggagaggtgagaagtggttaagttgatctccctgtggaaaccagcaacataatgctgaagcacaattcagtaaaaggtgttctacaagggaccaagcattcacagctctgatggagggcaaaatcaataagcagctgaaaaaagttctgaagaaaatagtaaaagaagcccatgaaccgctggcagtagctgatgctaaactaggaggggtcataaaggaaaagctgaatctcagttgtatccatagtcctgttgttaatgaacttatgagaggaattcgttcacaaatggatggattaatccctggggtagaaccacgtgaaatggcagctatgtgtcttggattggctcacag

SEQ ID NO: 13040 - DNA, 18670 bp, Homo sapiens
agttccagtacagcgtggagggtttaggcagcgtgttctgattctttgcgggacggcgagcgcatttgtgctttgcccgccgcggcctaggaggccttttgaggccgcgtagtcggtgtttttgaactgactctacagcttctggcaggccgtgcggcgccctgacccggcctcaccatgttggtgctgtttgaaacgtctgtgggttacgccatctttaaggtaggtgggagagcgagccgttaaagggggaaggcggatgctggacagacgaggagagggaaagacttaagcacggaactactcagagtagcgtgggtgcctgttatagcccgggctctgggaggagggagaaggcctttacacctgagagccatgttacgtgtaacacgtggccccgccgtttggggagacccgttctgcattagaggattttatttcctcccgttgaaggggtgggcaggaggcgtgttagaatttaacagattatagggaattcggactttattctagatgttttgaggaatgatcgaaagattttttttttttttgagatggagtttcgctcttgttgcccatgctggagtgcagtggcgcaatcttggctcactgcaacctccgtctcccgggttcaagcgattctcctgccttggcctcccgagtagctgggattacaggcctccatccaccaccacgcctggctagttgtttttgtttgtttgtttgcttttagtagagacggggtttcaccatgttggccaggctggtcttgaactcctgacctcaagcgatccacctgcctcggcctcccaaagtgctgggattacaggcgtgagccaccgtgctcggccaatcgaaaggatttaagcagaggaatgacctgctaatttgtcttaatacggttactctgctgtgtggagattagactcgaggagataagaacggcagcaagaatacttttgcattcatttggacaagatgaaattgcctggtatggagagaaacaaatatcgatagaaattgtgaaggtagaacaggaaggactggctaatagattgaatgtggggttttggtttaaataagatgttaagaaagtttcttggggaaggactaaagatttccggtttgggctgtgcgaagcttgcgttgtctattagacctgataatgcagttgtgtagatcgggcagttcagtatttcagatttgaagcttaggggaaaacatctgggctggtgatgtcagtttgaggtttggttgttttcgtggggaaagtttgacaagttcgtcagcactgaaatggttgaatggtaagacattcgtatcgcaagatgctgttgagatgttaggaagaatgagtgagattgagtgccttttcttgtgcggtgcaactcttctgaggtctgtgaatatagcaatgaaaaataaagtttttatgtatattctacatatatatatgttggtagaaagcaaaaacgctaggtaaaaataaatgtaatacaattttagctatgaaccaaaaaaccatttgtggtgtggatgcaagaaagtctggatgggtgcagagttctccatgtttcacttctgacatttgaaaatacgcagtttgcatttgatacgtcaaatgttatttttaagaaaaccaataaaatcattaaaaccgaaaaggcagttttgcttgtttttaccttagttggagttatctgcaattgccgtattagtgttttaaggaacttgtaagtaagctccttagtcccctttagagctacgaaacatgtcaattttacttttctccagctttttggaatcttatctaaattaccatgtagagttctgcatagcttcaaattctcttagccaatgtggtctgtaagtgtctatcgatgaatttcaccgttaattgccgtagtatactgtcctgtaccggatgtgaagaggagcaactctgcacagtgcactggttgtctcccatggtaggaaggaattggcttatcaatggtcggatttctagacctgggtcctaaaatactcaaccgtgtctcgatgaattactgatttctattaatgaaaagtgtcctcctccatgaaaatgtctttgagtattccgttggagtttgcagtgctatttatctgcaagttactgttcaaaatgattaaattgtggtttatgtaacctagtactaaagaaataactagttaagctcgaatatgttgacattgattagtttgtaattattggaattaacattgatcgtttctgagtataaaagacatacaaacgttctggaactagtgatggctgcacatttttgtgaaaatgcactactaaaaagtgaattgtacactttaaaagggcaaatattaagatacatgtaaaattaatatgatatatggtgaattttatctcctaaaaaagtagacatacggttcaaagttattagtttcctttcccataatctttcaaaatgctagggtataaaattatgttggttgccaggcatggtggctcatgcctgtaatcccagcactttgggaggccgaggccggcggatcacaaggtcaggagtttgagaccagcctaaccaacatggtgaaaccccgtctctactaaaaaaatagaaaaattagctgggcgtggtggtgtgcgcctgtaatctcagctacttgggaggctgaggcgggagcattgcttgaacccgggaggcggaggttgtggtgagctgagatcgtgccattgcactccagcctgggcaataagagcacaactccgtctcaaaaaaaaaaattatattggatgcatataattcatgctttgatgagaatgctttaggaagttttttgaagttttttgtttttttgttttttttgagacggagtttcactcttgttgcccaggctggagtgcaatggcgcgatcttggctcaccacaacctctgcctcccaggatcaagcaattctcctgcctcagcctcccgagtagctgggattaccagcatgcaccaccacgcccagctaattttgtatgtttagtagtgacagggtttctccatgttgaggctggtctcgaactcctgacctcaggtgatctgcccgcctcagcctcccaaagtgctgggattacaggcgtgagccactgcacctggccttgaagttttttttaaacttccatttacagtgaggaaaacattttatgtataacccatgtacacatacaaattcatgtttatgtatttaaaatttattttgaggcagggtcttgctctgtcacccaggctggggtgcagtggcaggatcatggctcattgcagccttggcctcctgggtcaagtgatcctcccacctcctcccgagtagctgggactacaggctcaagccaccatgcctggctaattatttatttatttgtatttgtatttatttattttttgagatggagtctcactctgttgcccaggctggagtgcagtggtgtgatctcggctcactgcaacctccgcctcctgggttcaaacgattttcctgcctcagcctcccaagtagctgggattacaggcgtgagccaccatgcctggcctaaatttttttttttttttttaagaggcagagtctcactatgttgcctaggctggtctcaaactcctggcctcaaggtgctgggattacagccatgaggtacggtgttctgcccacttatgtgtttagagcgattcaaaaggaaaacacttccaaaaagttattgctcattaacagggttatatatatataaatgtaaagacattgtgtaaaggaactgttgtgattaattctaggatattataaaaattcagcctgtggccgagagcagtggctcacgcctgtaaccccagctacttggaaggctgaggcaggacaatcagttgaacctaggagcagaggttgcaatgagctgcggtcgcgccactgcagtgcagcctgggcgacagggcaagactccgtctcaaaaaaaagaaaaaaagaaaaaaagaaattccacctgtgtccttgtgtcacgtggcacacagcataagattttagtcttgctcataccagacttccttcagctgctcttccatgtggtagccattagtacgtataaccatttcacatgagatgtaactgataggactgaggaagtgaattttaacttacttgaattttaatggttatattgtacagtgtagctgtgtagcatagcattttgtgtcacttcattttctcaaggtttggagaaagatttttgatgtacataccaaatgtctatataaaacctaagtactgagcaatatattttttctaactttattgggtgtactttacatactgtataactcacctataggttttagttacaatccagttttatagtacactttgttgcaaaaagttctcatgcccattttcaagttagtcctgctctagacaaccactgttcagctttctttttgcataattttttctagaagtttcatgtaagtggagtagtattttagtcttttgtgtttggcttttttcacttagtgtaatgcttctgaagctaaccgaagagctttttcacatttgttgcgtgtatggatttgtttctttttgagcagtgcacattttaaactaattatcagttttatcctgtatttaaacaagtttcataaaatattaacttgctcatattgtctgtggaagtgaaacttaaaagttagcatcaaataatttacacaaaacatagaggttgggtgcagtggctcacgcctgtcaccctaacactttgggagggtgaagcaggaggattgtttgagcccaggagttgcagaccagcctgggcaacatggcggaaaaaaaattagctgggcacagtggtgcttgcctgtagtcccagctgctgcaggaggctgaggtgggagggaggtcacggctgcagtgagctgtgattgagcctctgcactttagcctggacaacagagtgagacctcatctcaaaacaaaacaaaaaccacacaaagtctcaagcaatcaattaaaaatgaaaatgaggaggctggacatggtggctcacacctgtaatcccagcactttggaaggctggggtgggcagatcatgaggtcaggagtttgaaaccagcctggccaacatagtgaaaccccgtctctactaaaaatacaaaaattagccgggcatggtggtgtgtgtcgccaaatctgtagtcccagctgaggcaggaggatcgcttgaaccagggaggtggaggttgcagtgagaagaccgcgcctctgcactccccagcctgcgtgacagggcgagacactgtctcaaaaaaaaacaaaaaaagtgattaaaattcttaattccatataccctcaccaatattctgtatcagctgcccaagtattagataggatgggctcaatcctaaaaggcacaacccccatatttaacatccctaaaattgggatgtcttacaattgatgacaggtcaattgggagtgtaaaagaataacataagctgggtgtggtggctcacgcctgtcatcccagtactttgggaggctgaggcaggtagattgccagacctcaggagttcgagaccagcctgggcaacagggtgcaaccccgactttactaaaatacaaaaaaaaaaaaaaaaattagccaggcatggcagcatgtgcctgtaatcccagctacttgggaggctgaggcaggagagttgctttaaccagggaggtggaggttgtagtgagctgagatcacgccactgcggtccagcctggccgacagagcgcaagactccgtctcaaaaataaaaaaaaaaagaatagcatgttaaattttgtgaaatagagtatgcacagatattatgcatatatttttatttaaaaaaccagctggatcaggcgccatggttccttcctgcactcccagcactttgagaggccaaggcaagaggatcacttgagtccagaagttagagatcagcctgggcaacaaagcaagcccctgtctctacaaaaagatttttaaaagagctagatgtcgcagtgtgcacctatagtcctagctacttgggaggccgaggcagaagaatcgcttgaggccaggagtttgaagctgtagtgacataggaccacaccactccactccagcctggacaacaaagcgagaccctgtctctggaaaaacaacacagctagtaaatttaaaactatactttgctaataagcattatttatcaagtccataatatagcacatctacacattaagacgcagttctagtctggttatatattattttcagtaagagaaacacaatgttgcaagttgtataaaacttagatgagtgacaagatgattttaggggtttgttctgatgtataattttttttttttttttttttttgagacggagtcttgctgtcgcccaggctggagtgcagtggcgcgatctcagctcactgcaggctccgccccctggggttcacgccattctgttgcctcagcctcccgagtagctggaactacaggcgccttccacctcgcccagctaatttttttgtatttttagttagaggcggggtttcaccgtgttagctaggatggtctcgatctcctgacctcgtgattcgcccgcctcagcctcccagagtgctgggattacaggcatgagccaccgtgcccagcctgtataaatttaatcacacatggttgaattagatatgttggtaaaaataacccaaactagaaaaacttagagtcacacaaagcaataaacaactacaaagcctagagttggtattaacaatttataaactaatagctctaactttgtatatcatgaagttttagaatccagagacacctcaccaagtctcatgactatactgaaaacactgattaaaattttttgaaattgttcagagaatgcagctaaccataactgaagttcactatttttaagaggacatgtatcaaataggggatatgactcatgagtaaaattcacattttttctagctgaaaagcaagtatatttgaagataacatttgggtaacaaaattgccatatttaaaagatactttcggcctggcggggtggctcacgcctgtaatcccaacactttgggaggccgaggtgggtgcatcatgaggtcaggagatcgagactatcctggctaacacggtgaaaccccatctctactaaaaatacaaaaaattagccaggtgtggtggcaggcgcctgtagtcctggaggctgaggcaggagaatgacgtgaacccaggaggtggagcttgcagtgagccgagatcctgccattgcactccagcctgggcgacagagcgagactccgtctcaataaataaataaattaattaaaaaatactatcaccattctaaaactgaagttaaaataacaaaggaaatgtgataaaatcagggcaattcatgagcacacaaaggtcttcaaagactatgttatgtcagccaaaaccattactatgacaaataaaaccattgtgttcccaactgcaacatcttgaagaaaacattgctaataaagaccatctaaataagaaagttagagatattgctacattttctgtattacatttgtctcaaagtttttatttgtctcaaatttttaatcatttcttttcagccagggtaatgataaatatttgtatacagaaatccattttaagttttatcattttaagataatttccatttctaagtagaaatagtatacaactattaccattgcaatctttagcattgttgttacaacagtactagttttaaaacaagtctttatattttatagatacaaactgaaatattaacaggtaaaaattaaatgtctaggtcttgcttcaaaacaatacaaggcggctgggtgtgttggctcacgcctgtaatcccaacgctttgggaggccgaggcaggtggatcacctgatgtcaggagttcaagaccagcctggccaacttggtgaaacccagtctctactaaaaatacaaaaactagttgggtgttgtggtgcgtgcctgtaatcccagctattcaggagactgaggcaggagaatcgcttgaacccgggaggcggaggctgcagtgtgccgagattgcgccactgcactccagcctggcgacagagtgagactccatctcagaaaaaaaaaaaaaaagccatttactgtgattcctaaaagtatgcatgaacatgtgttgcacagacattcaaagtcttggagaatatatacctaaatgttgataagtatattgttgattaaagtaccctatgtttcttttgcatttaaaaaatttctcacatctagatgtgtctcacaattgacgatagttttagagaaatccataatactttcatgttaggatgatcatagcagtaaataacgaatataatctattgaaagtagacaaaagttttttttgttttttgttttatttttttgagatggagttttttgctcttgttgcccaggttggagtgcagtcgcgcaatctcggctcactgcaacctctgcctccgggttcaagcaattctcctgcctcagcctcccgagtggcggggattacaggcatgtgccaccacgcccagctaattttgtattttttttttttttttttttttgtagagacggggtttctccatgttgatcaggctggtcttgaactcctgacctcaggtgatccgcctgcctcagcctcccaaagtgctgggattacagatgtgagccaccatgcttggcgcaaattaaagtttttaatgattacaatactttactgtaaagggattaatggctcttttaaaagaaaggttctcggccaggtgcagtggtgcacacctgtaatcccagctactcaggaggccgaggcactagaatctcataaacccaggaggtgaaggttgcagtgagccaggattgctccactgcactccaggctgggctacagagcgagactccatctcaaaaaaataaaaagaaaggttccctgccctaccccctaggaccccatagctccagctacggcccaaggctggggcaggaatatctcttgaggccaggtagattctagactgaatagccactgtactacagctgactggactagatctgaattccatttagctgttaaatgggcaattcgaactagtaatttgaccaaaattacatgcagggtaagaaaactagttcattatcttagtgaaagaaatagcttctacaccttcattttacatgtaaaattgtatttgaagaatgcagctgtatatgcctcacctgtaccatttaaataaaactatttaaacattttattacaggttctaaatgagaagaaacttcaagaggttgatagtttatggaaagaatttgaaactccagagaaagcaaacaaaatgtaagtactcttgaaatcaataatttagcagttaacatttagggcttgttttattttttacatttttccctgatttatataatgttacattcgtagttttctgttttgaaatctgtttcaggaataattttggtatgaacctaattattacaaatgttttacttggaatataggccatctcaattaatttgaaggcagtagtctcccccttacccacagggattatgttccagaagaccctgtggatactttaaacctcggatagtaccaaatgtgattgctgtcagtaggaacacatttgtcttcgtgtcttccacacacaaatgtaataccttttttatcttaactaagcacttaccgcacacaggggttgtaacctgctttttgagttttgcaacatcaaaactagcatgaactactttttctttcatcacaatttcatggaagattcattcttagtgtagatgttaaatctttggtttttttgtttgttttttgagacagagtcttgttctgtcacctaggctggagtacaatggcgcaatctctgctcactgcaacctccgcctcctgggttcaagctattcttctgcctcagtcccccaagtagttgggattacaggtgcccaccaccatgcccagctaatttttgtatttttagtagagacagggtttcgccatgttggtcaggcaggtctcaaactcctgacctcaggcgatccgcctgcctcggcctcacaaagtgctgggagtacaggcgtgagccaccacacctggcctaaatcttcgtatttgtatgtatatttaagggaccacactagtatgttcccttaccagataagaaaaccttgcttaagatgacactgttgcctggtgtggtggctcatgtctgtaatcctagtactttgggataccaaggtgggtggatcatttgaggtcaggagctcgagaccagcctggccaacatggtgaaaccccctctctcctaaaaacacaaaattagccgggcgtggtggcacatgcctgtaatcccagctactgggaggaagctgaggcaggaaaatcccttgagcctgggaggcggaagttgcagtgagccgagattgcgccactgcactccagtctgggtgtcagagtgagaccctgtctccaaaaaaaaaaaaaaagatgacactgttttaggcaactagaagactagttttccttcttaaagggttatatgctttgttgggttaatctgattcgttgttgtcaatgatgtattcttcttggaactgaatctaagtgatctgactcaatattcgtcactaccactgagacaacgatgaatcaactatatgtttctttctggataaaatactaccctgaggctgggcgtgatggctcacacctgtaatcccagcattttgggaggccaaggcaggcggatcagttgagcccaggagttcaagaccagcctgggcaatataggaaaaccccatctctaccaaaaacaaaaattagctgggtgtggtggtgcacacctatagtcctagctgcttgggagactgaggctggaagatcctttgagctcgggaagtcagggctgcagtgagctgtgattgcaccactgcattccagcctgggtgacagagtgaagtgagaccctgtctcaaaaacataaagggggccgggcacggtggctcacgcttgtaatcccagcactttgggaggtcgaggtgggtggatcacaaggtcaggagtttgagaccagcctggccaatatggtgaaacctcttctctactaaaaaatacaaaaaaattagccagccatgggggctgggcacggtggctcacgcctgtaatcccagcactttgggaggccaaggcgggcggatgatgaggtcaggagatggagaccatcctggctaacacggtgaaaccccgtctctacgaaaaatacaaaaaattagccaggtgtggtggcgggtgcctgtagtcccagctacttgggaggctgaggcaggagaatggcatgaggcaggagaatggcatgaacctgggaggtggagtttgcagtgagccgagattgcgccactgcactccagcctgggcgacagagtgagactctgtctcaaaaaaaaaaaacaaaaactagccaggcatggtggcacaggcacatgcctgtaatcccagctacttgggagtctgaggcaggagaattgcttgaatccgggaggcagaggttgcagtgagccgagatcgcaccactgcactccagcgtgggtgacagtgagattctgtctcaaaaaaaaaaacaaaaaaccataaagggttaggatgtaacaagaatgagacctgacaataagctattttttttaatggcatttgtacaggatagacaaatgaatatcatgagattcctaaaaaggactcacgtacgttttcttgagtcaattctatgctgtataataaagtcatctctgtacagctttatgcaacaggggtttgtattaaagcttcaacatctttactcttggccaaaatttcctccaaagcctacaactttcttttaataatccaagcattactagcctaacatttagaaaaactagtaattgtatgaagaatatctaacttcacaccctgatacacaatggtaggcatgttttattggtgtgtgctttggaaacagtcaagcacttctttccaagttatgtggcttttgaatcaacgcactgcccccaataacatgtttatctcttttttttttaattctagagtaaagctaaaacattttgagaaatttcaggatacagcagaagcattagcaggtaaagtaaaaaattagaagcttgcttttttgaaaaaattaagtcttagccgtttgtttttcttgtttaaaaggttgtttgcttcagttgcctgtgttaaccttattcaatgttgtcaatgatgcattcttattggaactgaatttaagtgatctgactcattcgtcactaccactgagacaacattgagttagcttttttcaccatagggctggttttccccatgtgtgaggagaggtgagaagtggttaagttgatctccctgtggaaaccagcaacataatgctgaagcacaattcagtaaaaggtgttctacaagggaccaaggtaatgtggtcaagtatacagctctctcctcattttaatccaagggtagagttgtaatcctgagaacagccaggattcacagttgaaaaataatttaaaaagctcttctgggggtatagatttttagttcaaaaaaacatatcaatattcagagttatacagaaactgacagaggtgttatttttaaaagattcagaagaatggatgactcatactcttcaactagatttcatcacgggacaacagagtgatcgggtttatttactgtaattgactgcagtaggtcttacagttttgtttttttaagtgttagggaaaacaggaagagcagatataaagcccaaatcattaaattttcaactgcctgaattctttatcacaaatcagccaactatttggcggtgtagtttgaaaatgaaggaccgtgaggaagaatatggcttaaagctgggcaagaatatgacagatgcaaaaaattttgttaaataaccacaggagaaaggtacagtttttgtctgaaaatttggaatccaactaaacatgctggaacataacagaccaccctaaccttggcagaggggtaggctgaaggaagacccatagggccagtttctttgttttataaacatagttctagggctgcttcaccaactcttcagtaattagagttatatacagccataaaaaaaactgtggtaatattaacttggagaatttttaaaaagatagcctgttcatcacagcttttaagtatgggtaaacatttggtaagattccaagcaagattgtgttagctgtattcaaactctagggggtgttgttgacatagactgggatatgaacagttcctagtcctgatctcaagtagcctcttctgaattcctttttgcatacgatctttaatctgcttgggatatatctggccagtccttattaaactgtattaaatggacaagccaagcttttgctcaaacaagcaggtttttactattaatacctaatatattgagcacatactgattgtcagatttatgcttatgatttcataattgttatttaattcttgaatcctgtgaggcagataaccatcatctctatgttacagatgataaaacttgaaatttaagcagtatttccagattcatttacctagcttctttgtattatttaaaataatgtacaataaggctgggtgcggtggctcatgccaggaatcccagcactttgggaggccaagacaggcggatcacctgaggtcagttcaagatcagcctggccaacatggtgaaacctcgtctctactgaaattacaaaaattagccgggtgtggtggcacacaccttagtcccagctactcgggaggctgaggcaggagaaacacttgaacctggtaggcagagatagcactgagccaagattgcaccactgcactccagcctgggcaacagagcgagactccttctggaaaataacataaaattaagtagtgtacagtaaatggacaaaatgccatagtagttgagaatttaaagtcaattccccccagtctaagctccatgagggcagagactgttctgtactgtcaaattcctagacgctagcaaagtatacagctatagaaggtttataataaatattttggggaaaatgaatgaaaatagtgaattttatcaggaatgctgtcatagaaacatttacaatgccttttcctatctgttttcaccagaaagttaaatgaacatcagctaattaagaaagcagaatccttcccctgggaattcagttctcactgcctattataaggcagttttgacatgacagaaccacaactaaatggctgtaaatgtcacagtgtacattttaaacctcatagccttagagtttgatgagaccaggcacagtgactaacacctgtaatcccaacactttgaggggctaagatgggcaggaatttaagatcagcctgggcaatatagcaagaccccctctcaaaaaagatttttttttttttggagatggagtttcattttgtcacccaggctggagtgcagtggcatgatctcggctcactgcagtctccacctcctgagttcaagtaattctcccaggaggctgggttcagcctccaaagtagctgagattacaggtgataccaccatgtccagctaatttttgtattttttagtagagacggggttttgcctgttggccaggctgctctggaactcctgacctcaggtgatccacccgccttggcctcccaaagtgctgggattacaagcatgagccaccgtgcctggccatcattttttttttttaaataaagaaatagggtctgttggggtgtgatgttgaatttgtattggtctcagacattcatatatgctatttgcatgaagtggtttatttttattcttgattgtgttttcaacttgcaagtctttttttttttttttttgatactgatcttcggctggagtacaggggcgcgatcccagctcactgtagtctctgcctcctgagtagctgggattacaggctcatgccaccacgctcacctaatttttgtatttttagcagagatggggtttcaccatgttgcctaggatggtcgcatctcctgacctcgtgacccgctcacctcagcctcctgaagtgctgggattatccatttgatcataattcgaatggatatacgatcaggagggaagagcaagacctgacttattaagcacaaactgcctgaccttggaaattgttgatagaccttcattcctgccaagcatttttcttttctttttctttttctttttttttttttagatggagttttgctcttgtcacttaggctggagtgcaatgtcacggtatcactttaacctccacctctgggttcaagcgattctcctacctcagcctcccgagtagctaggattacaggcgtgagccaccagggccagctaatttttgtatttttagtagagtgtttcgtcatgttagccaggctggtctctcgaactcctgaccttaggtgatctgccagcctcagcctcccaaagtgctgggattacagacttgagccaccacgcgcagcccaagcatactttttatgttttttgtttttgttttgttgagacagggtctgtcaccaggctgctggagtacagcggcatgatcatgactcactgcagccttgaactccctgggctcaggtgattgtcccagctcagcctccccagtagctggactacaggcacatgccaccacacccagctaatttttgtatttttagtagagacagggtttcgccgtgttggccaggctggtggtacacaccaccatgcctgggtaacccaagcatacttttacctcagtcaaatgtcagataaatttcagaagaggtattagttcgtgtgggtccagaaaaagggaatataggtctaaggaagggtgagaaatataaagcagctgatttagaacttgccagaaataccagcggtctcaaaatagaataggcagcctttgctactaagttttacattgctggaggtgtacaagtggagatacaagcaaagctaaggccttcactcaaacatgtttatattatggcagaactttgaaaatgattacactcatttttactagttttgatgtgattttaggatatttcaggacagtctatttgaaatgacaaaggaaagtgagtctgttttgtcttcccaaaaagattgtttctaagatttcatgattctcccttgagttcatgagaagattcttgtgagaaggaaagaaaccctggacctgattttacccctggctctgtagcaaaaatgagggtgggaagatcaaatgaaattgtgaaacatgtaacttataaaacatatatcatttcatttcagaagtaacattaaattcaagccctttgaaaggcctattttatttttttaagtgtcaactagggcaaggtctcaaagttaaaaatttgagagttaatgcttttgtttttctttttcttgaaaagcattcacagctctgatggagggcaaaatcaataagcagctgaaaaaagttctgaagaaaatagtaaaagaagcccatgaaccgctggcagtagctgatgctaaactaggaggggtcataaaggtaaagtcacgatatttttggtcatgcctgctagtcagatctcacagcataccaactacaaagcctagcctttgcaataagttgcttatcataaattctcaatacatttttttcttttctctaagctacatgataatggatttcccctaacatcagctgaactgagcaaataagtaatacctatttgttctagaagatatagaagaacaaaaaatgataaaaattgactttaacaaatctgctacccatatataatgttaatgttctatgtatatcatgccatatttttgtctagccacatttttttccaacgaaaatggggtccttatattttttagaaatatatttattagaaaacttttagtaggggtgtattgctggagatgaaataaaatgtgagagtggaaagaaagactaggaaaatagcctcccaaatacagaaagcagaacaattcgggcggggcgcggtggctcacacctataataatcccagcattttgggaggccaaggtaggagtatcacgaggtcagcagatcgagaccatcctggctaacacagtgaaaccctgtctctactgaaaatacagaaaattaaccgggtgtggtggcaggcgcctgtagtcccagctaattgggagtgcagtggcgcagtctcacagctcactgcagacttgacctcctgttctcaagcaatcctccctcttcagtagctgggactacaggcacatgccaccatgctggctaattattttattttattttatttcatttatttgagacagagtctcactctgttgccctggctagagtgcagtggcatgatctcggctcactgcaacctctgcctcccgggttcaagggattcccctgccttagccttccaagtagctgggattacagacgcccgccaacacgccctggcctcccaaagtgctaggattacaggcatgtgccaccacgcccaacctgtaatttttttttttttttaagacggagtctcactctgtcgctaggctgaagtgcattggctcagtcttggctcactgcaacctccgcctcctgggttgaagtgattctcctgcctcagcctcccgagtagctgggactataggcacctgccaccacacccggctaatttttgtatttttagtagagacggggtttcatcatgttggccaagatggtctcgatctattgaccttgtgatccacccgcctcggcctcccaaagtgctgggattacaggcgtgagccaccgcgcctggcataacctgtaattttaaaaagaagctaaataacaggtagtaaaagatctccttaaaccaactacttggtcaaattatattaatctttttatagcttttaatttatatagccaagctgtcttctggaagcttgtatcagtttttacttccaccagtgatacagtcaagtattctacaaacacactggaaattatgcttcttgtccaactgagaaatgcgtatatttaaattagtgccactttaatatttaggaaataatttcaggctgggcgcggtggctcatgcctgtaatcccagcactttgggaagatgaggcgggcggatcacttgaggtcaggagtttgagaccagcctgtacaacatggtgaaaccccgtctctactaaaaatacaaaattagctgggcatggtggctcatgcctgcaataatcccaggccgagacaggagaatctcttgaacccaggaggcggaggttgtagtgagccaagattgcgccactgcactccagcctgggcgacagagtgatactgtgtctcaaaaaataataataacaacttcaggaaagtctttttttttttaatttaatatagatgttcatgttcttgtaggaaaagctgaatctcagttgtatccatagtcctgttgttaatgaacttatgagaggaattcgttcacaaatggatggattaatccctggg

SEQ ID NO: 13041 - DNA, 582 bp, Homo sapiens
agttccagtacagcgtggagggtttaggcagcgtgttctgattctttgcgggacggcgagcgcatttgtgctttgcccgccgcggcctaggaggccttttgaggccgcgtagtcggtgtttttgaactgactctacagcttctggcaggccgtgcggcgccctgacccggcctcaccatgttggtgctgtttgaaacgtctgtgggttacgccatctttaaggttctaaatgagaagaaacttcaagaggttgatagtttatggaaagaatttgaaactccagagaaagcaaacaaaatagtaaagctaaaacattttgagaaatttcaggatacagcagaagcattagcagcattcacagctctgatggagggcaaaatcaataagcagctgaaaaaagttctgaagaaaatagtaaaagaagcccatgaaccgctggcagtagctgatgctaaactaggaggggtcataaagatgttcatgttcttgtaggaaaagctgaatctcagttgtatccatagtcctgttgttaatgaacttatgagaggaattcgttcacaaatggatggattaatccctggg

SEQ ID NO: 13042 - DNA, 3576 bp, Homo sapiens
tttcccccattgagcagtgttctgaaagttggatggttcagttttcactttctagttaggtgtgaagacgttttctcctttcatttcccccatgctgattgagtgttttcctgtaccatagtaactacattgattactaaatcagaattcatttagctcaccacatctcttgaatgtgattgacctacttgaaaaatattaatacctttaacttttggaaactattagtcttcataaactaccccaaagccactaaaatgaaacaacattgtgtgcttatgtaagtattatctaatggcattttctttatctcttgagaattatttcaattccagatacttgttagagattttctaaaactttttgggtctttcagtgaagtgaagacttacgatccttctggtgactccacacttccaacctgttctaaaaaacgcaaaatagaacaggtagataaagaggatgaaattactgaaaagaaagccaaaaaagccaagattaaagttaaaggttagtttgaattttttttttaacacaacttatactcacttctttagaactgtggattttgtgagtcttaaaagtacatgccatcccactttattataaaactgctcattgaacgctaatggtgttttaataatgccattatgttctctgggaatatgatattgttaaatttatcagactgcacagaggaaatgtgagaagtttagtcaaattaggtattttactaagagttccaaaacttcatttctcctacatgaactatttggagaattaagagaaaaaaggaacgtgttttctaaattggttgttgaaaattttttgttttatagttaagaatgaatacagaattgatggaacagtgattttcttcattgtttctcttacacggagcggactggaaggaatacatactggtagcctgccgtcatagttacaatatctaacaggtgctcaccagttaactaggctgtcttgtgaagttgataagcaggcgccccattattagttacacctgggtttattgaacacctactagcaagtctagcagaagagtaaagcattaacacaatgattgctttaacttggtttctaagtagcttagtggtcaaaagtatatgatctacaaatgtggatagtatacttgatagagaaaacaaacaatttatttaacttttatgcttctttttattgaaaagtaaggagatccctaaacccactagtagcatttgaggcaccaaactctgtcctttgtatcctcaattgtgtatccaataagcttttccaatttatttgtcaatttttcatcccacaatttcccccctctttttttacccccaagacagaatcttgctctgtcacccatgctggagtgcagtggcatgatcttggctcactgcaacctccacctcccaggttcaagcaattttcctgcctcagcctcttgagtagctgtgattacaggcacgcaccaccacgcccagctaatttttttatttttagtagagacagggtttcaccatgttggccagcctggtctcaaactcctgaccttgtgatccacccactccggcctcccaaactgctgggattacaggcatgagccaccacgcccagtcctctcccattttctatatgtgacaattccagttgctttggccatcaaccttgacttttttctcataactcaatctagtctgacagcaaatcctctcagttccacttgaaagtatgtagtagccacagtggaaccaccactagctttttaaatctaaatttgttccagccatactggcctgcttgctatttcctgaacctactatccatccacttatcccatctgccctccaaaacgccttacgacttaagcatctgctctactctacctggactattttccctcaagatacatgtatcattcattcactccctcacctcttctaggtgtttgccgaccattctgcctaaaatggccatatatactgcccttttccaacattccccttcctgctttatttttattcttaccactttaatatctattatgtaatgtatcatttatgtctccactctgccactaaaataaaaaagattcatagggaaacgaatatttttgcctcttgtgccttgctcgaattgtttagtacagagtctgacatgaatattatttggttgctgaattgctgaatttctctctcttttctttttcttttttttttcttttttttttttttttttttttgagacagagtctccctctgtcgcccaggctgaagtgcagtggcgtgatcttggctgactgcagcctccgcctcctgggttcaagcaattctcgtgcttcagcctcctgaataactgggattacaggcatgcaccaccatgcctagctaacttttttgtatttttattagatacaggatttcaccatgttggccaggctggtcttgatatcctgacctcaagtgatcctcccgcctcagcctcccaaagtgctgagattacaggcgtgagccactgcacccagctggtcactgaatgtctaatgatagctatgtgttgagtccttattgtaatgtgtgctaagcattatacttagtgctttctatgcatcatctttttaaatcagtaacagtccagtaagataagacattcttaagttttatagatagggagcttcaccaagggtaaatacaatttttcagggttgcagcaggtagattaaacccaggccgtctgacttcagagtgcaagctcttaaccatttctaatataattgactttcttcccaataatgattggagatcagatgacctttgttttaatcctgatttttatacatgacttcatgatcgtgagaagattgctctgagctctatctatatcattcgttaaagttagtggtaggccttggagaaccttcccaattataaaataaacaaaacaaacattgggtagttgatgagaatgacagaaaaaaactaggactcaaacgtttttggaaggaatgagatctgatacagtgttaatttgttgtgcctttacacttaccctattcagttgaagaagaggaagaagaaaaagtggcagaagaagaagaaacatctgtgaagaagaagaagaaaaggggtaaaaagaaacacattaaggaagaaccactttctgaggaagaaccatgtaccagcacagcaattgctgtatgtttgtttttaattatcggttttcacttggaggggccagttctctatatttcaatctattttctatatcagaaatgagcaggcattttaaaaaatggttttcattgatggagaggtaaaagtgaaatggctttgttgtatttatattataaaaggccatttcccaaatctagaatttattactaaaaatcaagtttgcattgaggggaggagtatgatttgctcaagcttactttttttataggtggggtttttatattttcaatgtgattactcacccatacaatttcagctctttcaaagcattcttgttggctattttcagagtccagagaaaaagaagaaaaagaaaaaaaagagagagaacgaggat

SEQ ID NO: 13043 - DNA, 599 bp, Homo sapiens
tttcccccattgagcagtgttctgaaagttggatggttcagttttcactttctagttaggtgtgaagacgttttctcctttcatttcccccatgctgattgagtgttttcctgtaccatagtaactacattgattactaaatcagaattcatttagctcaccacatctcttgaatgtgattgacctacttgaaaaatattaatacctttaacttttggaaactattagtcttcataaactaccccaaagccactaaaatgaaacaacattgtgtgcttattgaagtgaagacttacgatccttctggtgactccacacttccaacctgttctaaaaaacgcaaaatagaacaggtagataaagaggatgaaattactgaaaagaaagccaaaaaagccaagattaaagttaaagttgaagaagaggaagaagaaaaagtggcagaagaagaagaaacatctgtgaagaagaagaagaaaaggggtaaaaagaaacacattaaggaagaaccactttctgaggaagaaccatgtaccagcacagcaattgctagtccagagaaaaagaagaaaaagaaaaaaaagagagagaacgaggat

SEQ ID NO: 13044 - DNA, 12242 bp, Homo sapiens
cttattggaactgaatttaagtgatctgactcattcgtcactaccactgagacaacattgagttagcttttttcaccatagggctggttttccccatgtgtgaggagaggtgagaagtggttaagttgatctccctgtggaaaccagcaacataatgctgaagcacaattcagtaaaaggtgttctacaagggaccaaggtaatgtggtcaagtatacagctctctcctcattttaatccaagggtagagttgtaatcctgagaacagccaggattcacagttgaaaaataatttaaaaagctcttctgggggtatagatttttagttcaaaaaaacatatcaatattcagagttatacagaaactgacagaggtgttatttttaaaagattcagaagaatggatgactcatactcttcaactagatttcatcacgggacaacagagtgatcgggtttatttactgtaattgactgcagtaggtcttacagttttgtttttttaagtgttagggaaaacaggaagagcagatataaagcccaaatcattaaattttcaactgcctgaattctttatcacaaatcagccaactatttggcggtgtagtttgaaaatgaaggaccgtgaggaagaatatggcttaaagctgggcaagaatatgacagatgcaaaaaattttgttaaataaccacaggagaaaggtacagtttttgtctgaaaatttggaatccaactaaacatgctggaacataacagaccaccctaaccttggcagaggggtaggctgaaggaagacccatagggccagtttctttgttttataaacatagttctagggctgcttcaccaactcttcagtaattagagttatatacagccataaaaaaaactgtggtaatattaacttggagaatttttaaaaagatagcctgttcatcacagcttttaagtatgggtaaacatttggtaagattccaagcaagattgtgttagctgtattcaaactctagggggtgttgttgacatagactgggatatgaacagttcctagtcctgatctcaagtagcctcttctgaattcctttttgcatacgatctttaatctgcttgggatatatctggccagtccttattaaactgtattaaatggacaagccaagcttttgctcaaacaagcaggtttttactattaatacctaatatattgagcacatactgattgtcagatttatgcttatgatttcataattgttatttaattcttgaatcctgtgaggcagataaccatcatctctatgttacagatgataaaacttgaaatttaagcagtatttccagattcatttacctagcttctttgtattatttaaaataatgtacaataaggctgggtgcggtggctcatgccaggaatcccagcactttgggaggccaagacaggcggatcacctgaggtcagttcaagatcagcctggccaacatggtgaaacctcgtctctactgaaattacaaaaattagccgggtgtggtggcacacaccttagtcccagctactcgggaggctgaggcaggagaaacacttgaacctggtaggcagagatagcactgagccaagattgcaccactgcactccagcctgggcaacagagcgagactccttctggaaaataacataaaattaagtagtgtacagtaaatggacaaaatgccatagtagttgagaatttaaagtcaattccccccagtctaagctccatgagggcagagactgttctgtactgtcaaattcctagacgctagcaaagtatacagctatagaaggtttataataaatattttggggaaaatgaatgaaaatagtgaattttatcaggaatgctgtcatagaaacatttacaatgccttttcctatctgttttcaccagaaagttaaatgaacatcagctaattaagaaagcagaatccttcccctgggaattcagttctcactgcctattataaggcagttttgacatgacagaaccacaactaaatggctgtaaatgtcacagtgtacattttaaacctcatagccttagagtttgatgagaccaggcacagtgactaacacctgtaatcccaacactttgaggggctaagatgggcaggaatttaagatcagcctgggcaatatagcaagaccccctctcaaaaaagatttttttttttttggagatggagtttcattttgtcacccaggctggagtgcagtggcatgatctcggctcactgcagtctccacctcctgagttcaagtaattctcccaggaggctgggttcagcctccaaagtagctgagattacaggtgataccaccatgtccagctaatttttgtattttttagtagagacggggttttgcctgttggccaggctgctctggaactcctgacctcaggtgatccacccgccttggcctcccaaagtgctgggattacaagcatgagccaccgtgcctggccatcattttttttttttaaataaagaaatagggtctgttggggtgtgatgttgaatttgtattggtctcagacattcatatatgctatttgcatgaagtggtttatttttattcttgattgtgttttcaacttgcaagtctttttttttttttttttgatactgatcttcggctggagtacaggggcgcgatcccagctcactgtagtctctgcctcctgagtagctgggattacaggctcatgccaccacgctcacctaatttttgtatttttagcagagatggggtttcaccatgttgcctaggatggtcgcatctcctgacctcgtgacccgctcacctcagcctcctgaagtgctgggattatccatttgatcataattcgaatggatatacgatcaggagggaagagcaagacctgacttattaagcacaaactgcctgaccttggaaattgttgatagaccttcattcctgccaagcatttttcttttctttttctttttctttttttttttttagatggagttttgctcttgtcacttaggctggagtgcaatgtcacggtatcactttaacctccacctctgggttcaagcgattctcctacctcagcctcccgagtagctaggattacaggcgtgagccaccagggccagctaatttttgtatttttagtagagtgtttcgtcatgttagccaggctggtctctcgaactcctgaccttaggtgatctgccagcctcagcctcccaaagtgctgggattacagacttgagccaccacgcgcagcccaagcatactttttatgttttttgtttttgttttgttgagacagggtctgtcaccaggctgctggagtacagcggcatgatcatgactcactgcagccttgaactccctgggctcaggtgattgtcccagctcagcctccccagtagctggactacaggcacatgccaccacacccagctaatttttgtatttttagtagagacagggtttcgccgtgttggccaggctggtggtacacaccaccatgcctgggtaacccaagcatacttttacctcagtcaaatgtcagataaatttcagaagaggtattagttcgtgtgggtccagaaaaagggaatataggtctaaggaagggtgagaaatataaagcagctgatttagaacttgccagaaataccagcggtctcaaaatagaataggcagcctttgctactaagttttacattgctggaggtgtacaagtggagatacaagcaaagctaaggccttcactcaaacatgtttatattatggcagaactttgaaaatgattacactcatttttactagttttgatgtgattttaggatatttcaggacagtctatttgaaatgacaaaggaaagtgagtctgttttgtcttcccaaaaagattgtttctaagatttcatgattctcccttgagttcatgagaagattcttgtgagaaggaaagaaaccctggacctgattttacccctggctctgtagcaaaaatgagggtgggaagatcaaatgaaattgtgaaacatgtaacttataaaacatatatcatttcatttcagaagtaacattaaattcaagccctttgaaaggcctattttatttttttaagtgtcaactagggcaaggtctcaaagttaaaaatttgagagttaatgcttttgtttttctttttcttgaaaagcattcacagctctgatggagggcaaaatcaataagcagctgaaaaaagttctgaagaaaatagtaaaagaagcccatgaaccgctggcagtagctgatgctaaactaggaggggtcataaaggtaaagtcacgatatttttggtcatgcctgctagtcagatctcacagcataccaactacaaagcctagcctttgcaataagttgcttatcataaattctcaatacatttttttcttttctctaagctacatgataatggatttcccctaacatcagctgaactgagcaaataagtaatacctatttgttctagaagatatagaagaacaaaaaatgataaaaattgactttaacaaatctgctacccatatataatgttaatgttctatgtatatcatgccatatttttgtctagccacatttttttccaacgaaaatggggtccttatattttttagaaatatatttattagaaaacttttagtaggggtgtattgctggagatgaaataaaatgtgagagtggaaagaaagactaggaaaatagcctcccaaatacagaaagcagaacaattcgggcggggcgcggtggctcacacctataataatcccagcattttgggaggccaaggtaggagtatcacgaggtcagcagatcgagaccatcctggctaacacagtgaaaccctgtctctactgaaaatacagaaaattaaccgggtgtggtggcaggcgcctgtagtcccagctaattgggagtgcagtggcgcagtctcacagctcactgcagacttgacctcctgttctcaagcaatcctccctcttcagtagctgggactacaggcacatgccaccatgctggctaattattttattttattttatttcatttatttgagacagagtctcactctgttgccctggctagagtgcagtggcatgatctcggctcactgcaacctctgcctcccgggttcaagggattcccctgccttagccttccaagtagctgggattacagacgcccgccaacacgccctggcctcccaaagtgctaggattacaggcatgtgccaccacgcccaacctgtaatttttttttttttttaagacggagtctcactctgtcgctaggctgaagtgcattggctcagtcttggctcactgcaacctccgcctcctgggttgaagtgattctcctgcctcagcctcccgagtagctgggactataggcacctgccaccacacccggctaatttttgtatttttagtagagacggggtttcatcatgttggccaagatggtctcgatctattgaccttgtgatccacccgcctcggcctcccaaagtgctgggattacaggcgtgagccaccgcgcctggcataacctgtaattttaaaaagaagctaaataacaggtagtaaaagatctccttaaaccaactacttggtcaaattatattaatctttttatagcttttaatttatatagccaagctgtcttctggaagcttgtatcagtttttacttccaccagtgatacagtcaagtattctacaaacacactggaaattatgcttcttgtccaactgagaaatgcgtatatttaaattagtgccactttaatatttaggaaataatttcaggctgggcgcggtggctcatgcctgtaatcccagcactttgggaagatgaggcgggcggatcacttgaggtcaggagtttgagaccagcctgtacaacatggtgaaaccccgtctctactaaaaatacaaaattagctgggcatggtggctcatgcctgcaataatcccaggccgagacaggagaatctcttgaacccaggaggcggaggttgtagtgagccaagattgcgccactgcactccagcctgggcgacagagtgatactgtgtctcaaaaaataataataacaacttcaggaaagtctttttttttttaatttaatatagatgttcatgttcttgtaggaaaagctgaatctcagttgtatccatagtcctgttgttaatgaacttatgagaggaattcgttcacaaatggatggattaatccctggggtagaaccacgtgaaatggcagctatgtgtcttggattggctcacaggtgagaattactggaaaataaagtcaacttacttttatttgataagcgcttaacatagatctgttctaagaatgttacaaatgctcatttgaaccacatcagaaccttatgaagaagatgatagtaatatcctcatttacagatgaaactgaagcccaaggtcaatacagctggtaagtggtaaagccaggatttgaacccaggcagtctggctctattgtctggattcttaaaaccttaaaacctcatcaaaggaattctctactactctgatcttggatgccctgtttcttgggctttccctcctttatctctgctaagtcatgccactcctccatctacttagtattcccccaaattctctcatctgctatggtcttatgggataggtgtgtatttgtgttttcattgctttactctgatttttaataaggcaaagaggactaggtgcagtggctcacccctgtaatcccaactctttgggagaccaggagtttgagactagcctgagcaacatagcaagaaatatgtctctctctgtgtttttttgtttgttttgtttttgttttgttttttttgaggcagattctcactctgtcgcccagactggagtgcagtggcgtgatctctgctcactgcagcccctgcctcccaggctcaagtgattttcttgcctcagcctccgagtagctaggattacaagcgtgcaccactactgcccaactaatttttgtatttttagtagagacgggctttcaccatgttggcctggctgatcttgaactcctgacctcaaatgatccatccgccttggccttccaaagtgctgggattataggcatgagccaccacacccggcatttttttttttttttttttttttttgagtcagggtctcactctgttgctcaggctggggtgcagtggtgcgatcttggctcactgcaacctggacatcctggactcaaacaatgccacctcagcctcccaagtagctgggactgcaagtgtgcgccaccatccctggctgattttttaactttttgtagagacggggttttgccatgctgcccaggctggaactcccaggctcaagtgatccacttgccttagcctcccaaagtgccgcgactgcaggggtgagccaccatgcccagtcttctccctatttttaattgcatgttaaccctatcatatttcattagaagtcccttagaataggcattattgctatgttgtgatacatctgttcatgaaaagcttaatactttggaattgcactacagttaacagggttgtgaagaaaataatggtaggtagttgctcaaaacctgtgcaactttgtaatcagtactgtcaaatagtaatcctaataaaattattaccacagttcaaaagacattttaagctaatattaaaagaaacactacaggctgggcacggtggctcacgcctgtaatcccaacactttgggaggccaaggcaggcagatcacaaggtcaggagatcgagaccacggtgaaacctcgtctctactaaaaatacaaaaaattagccgggcacagtggcgggcgcctgtagtcccagctacttgggaggctgaggcaggagaatggcgtgaacccgggaggcagagcttgcagtgagtggagatcgctccactgcagtccagcctgggtgacagagtgagactccatctcaaaaaaaaaaaaaaaaaagggagaaagaaacactataggccaggcgcagtggctcacgcctgtaatacatcccagcactttgcgaggctgaggcaggtgaatcatgaggtcaggagatcgagaccatcctggttaacacagtgaaaccccgtctctactaaaaatacaaaaaaattagccaggcatggtggcgggcgcctgtagtcccagctactcgggaggctgaggcaggagaatggcgtgaacccgggaggtggagcttgcagtgagtggagattgctccactgcactccagcctgggtgacagagtaagactccgtctcaaaacaaaacaaaaaagaaacactacaatttaaaaaggtctattttaaaattaaaaggtgggcatagattgaaagggttgaagctgctaagctagagttaagagcaaaaatgcacaaaggttagggagagctttgtaataagcatttctaagagagaacaaatagtgaaactgagtcaaaaatccaaacctgggtaaatctgcattgtgtatagcagtggttccctatcaagggcaatcagatgtccccccagtaggcatttgtctatgtccatagacatttttggttgtcacaattggaggtgggttggggtctgccatgagtatctggtggataaaagttagggatactgctaaaggtcctataatgcacagggcagcctgtacaacaaggaattaggcccaaaatattaattgtgctgagatgaaaaaacatttttatacagacaatattgttactccacagctttctgttttcagatgttaagagtcctgcaaagttcctaactggtagtataaagcttaatatgtgctattaaaaattgcatgaaccaatatggctttttttttttttttttttttgaggcggagtcttgctttgttgcccaggctggagtacagtggcacgtgatctcggctcactgcaacctctgcctccccggttcaagcgattctcctgcctcagcctccagagtagctgagattcaggcgtgccccaccatgcctggctaatttttatatttttagtagagacagggtttcgccatgttggccaggttggtctcgaactcctaacaggtgatctgcccacctcggcctcccaaagtgctaggattacaagcgtgagccaccacgcccagtccaatatgacttttgtattacacagcttatcctatttgtcattcatacataaactcattcatgttacagaaataaaggtcgtagcagcacatatagtttttttttttaatgtgtattttctgttctcgtatggtgcatttctacttagctgatttttcttcttagaaaaaccaattacagctctgactacaggctgatttgagtaaaaacaaaaacaaaaaaaaactttaaggtgttaatttaaatgcttttcctagatgctatcttgctaatttattttcccctttcttcccagcctgtctcgatatagattgaagtttagcgctgataaagtagacacaatgattgttcaggcaatttgtaagtatagtacatgcaaagtccgatttgttgctctgtccttcatgcgttttcatactgttgaaactatcttttatgattctgtctgttgagaaagagaaaggaggccaggtgtggtggctcaagcctttaatcccagcacttgggaggctgaggcaggcggatcacctgaggtcaggagttcaagaccagcttggccaacatgacaaaactctgtctttactaaaaatacaaaaaaaattaaatgtgcatggtggcgtgtacctataatcccagctactcaggaggctgaggcaggataattgcttgaacccaggaggcggaggttgactatttggagattatatgaatcacagaattaacattacgttaattaattcatttgtatttttccatgaaaatgttaaaaacataagtgcaatctttgtagttgtgtattctgctgtgtcattaaatggtttttagaaagctcaaaagctgccaggcacagtggctcatgcctgtaatcccagcactttgagaggctgaggcgggaggatcacctgaggtcgggaatttgagaccagcctgaccaacatggagaaatcccgtctctactaaaaatacaaaattaaccaggcatggtggtgcatgcctgtaatctcagctactcgggaggctgaggcaggagaatcacttgaaccctggaggcagaggttgtagtgagttgatcgtgccattgcactccagcctgggcaacaagagcaaatctccatctcactaaaaaaaaaaaaaaaaaatcaaaatcttaatcgtttttctattttagaaatgcattcggccgtggctcacgcctgtaatcccaacactttgggaggcagaggctggtggatcacctgaggtcaggagttcgagatcaggccaacatggtgaaacccgatctttagtaaaaaataaaaaaattatctgagcatgatggtaggcgcctgtaatctcagctattcaggaggctgaggcaggagaatcacttgaacctgagaggcggaggttgcagtgggccgagatcgcaccatttcactctagcttggacaacatgagcaacactccgtctcaaaaaaaaaaacaaagtattcggctgggcgcagtggctcacacctgtaatcctagcacattgggaggccaaggcgggtgaattgcctgagctcgggagtttgagagcagcctggctaacatggcgaaaccctgtctttactaaaaatacaaaaaagtagccagtcgaggtggcgtgtgcctatagtcccagccacttaggaggctgaggaaggagaatcacttgaacccaggaagcagaggttgcagtgagctgagatcgcaccactgcactccatcctgggtgatggagttagactctgtctccaaaaaaagaaaaaaaaaagcgctcaaccagcgattcctttcctagatttatacccaaaagaattaaaaacagaactgagttgcttgtacacctatgttcataacagtgttatttacaaaaccaaacagtggaaacaacccagataccttttaacagatgaatggataaactgcattgtggatgcagcttgaatgtccctaatctgaaattcaaaatgctctgaaatctaaaactttttgtggtaccacacaaatccacaagtggaaaactccacacctgaccacacgtcaaaactttgttttatgcacaaaattatttaaaatattgtgtaaaattaccttcaaggttttgtatataaggtatatgtgaaatgtagatgcatttcctatttagacttcgagttccatcctcagcctcatacgtgtttgcaaatactctgaaatacttctggtcccaagcattttgggtaacgtacacccagccacttcacacagtggaatgttagtcagccttaaaaagaaatgaaattctgatacatatttcaacatgataaaccttgaaaatatgctaagtgaaatagtcacaaaatactgcatgattctgcttatatgaagtacctaaaataggtgaactcagagacagaagtataaagataactagaggttggggggaaggtgggaatgagttactgtttaatgggtacagaatttttcagtttctgatgataaaattgctctggcaatagatcctggtaatggttgcataacatcataagaatacttaatgctactgaatagtacacttgaaaatggttgaagtgttattttttattcttttttttttaaattttttgcgacggaatcttgctctgtcacccaggctggaatgcagtagcacgatctcggctcactacaacctccacctcctgtgttcaagtgattcttctgcctcagccctccagagtagctgggactacaggtgtgcaccaccatgcctggctaatttttgtatttttaatagagatggggtttcaccatgttggccaggctggtcttgaacttctgacttcgtgatatgcctgtctgctgggattacagacatgagccaccgtgcccagcctgaagtgttaaattttatgttgtgtatgttttaccacaataaatccctttaagttttgtttgtttgtttttaatctactacagccttgttagatgacttggataaagaactaaacaactacattatgcgatgt

SEQ ID NO: 13045 - DNA, 508 bp, Homo sapiens
cttattggaactgaatttaagtgatctgactcattcgtcactaccactgagacaacattgagttagcttttttcaccatagggctggttttccccatgtgtgaggagaggtgagaagtggttaagttgatctccctgtggaaaccagcaacataatgctgaagcacaattcagtaaaaggtgttctacaagggaccaagcattcacagctctgatggagggcaaaatcaataagcagctgaaaaaagttctgaagaaaatagtaaaagaagcccatgaaccgctggcagtagctgatgctaaactaggaggggtcataaaggaaaagctgaatctcagttgtatccatagtcctgttgttaatgaacttatgagaggaattcgttcacaaatggatggattaatccctggggtagaaccacgtgaaatggcagctatgtgtcttggattggctcacagccttgttagatgacttggataaagaactaaacaactacattatgcgatgt

SEQ ID NO: 13046 - DNA, 18977 bp, Homo sapiens
agagaaggagtagcgcgttcgtgcgtcctagttccagtacagcgtggagggtttaggcagcgtgttctgattctttgcgggacggcgagcgcatttgtgctttgcccgccgcggcctaggaggccttttgaggccgcgtagtcggtgtttttgaactgactctacagcttctggcaggccgtgcggcgccctgacccggcctcaccatgttggtgctgtttgaaacgtctgtgggttacgccatctttaaggtaggtgggagagcgagccgttaaagggggaaggcggatgctggacagacgaggagagggaaagacttaagcacggaactactcagagtagcgtgggtgcctgttatagcccgggctctgggaggagggagaaggcctttacacctgagagccatgttacgtgtaacacgtggccccgccgtttggggagacccgttctgcattagaggattttatttcctcccgttgaaggggtgggcaggaggcgtgttagaatttaacagattatagggaattcggactttattctagatgttttgaggaatgatcgaaagattttttttttttttgagatggagtttcgctcttgttgcccatgctggagtgcagtggcgcaatcttggctcactgcaacctccgtctcccgggttcaagcgattctcctgccttggcctcccgagtagctgggattacaggcctccatccaccaccacgcctggctagttgtttttgtttgtttgtttgcttttagtagagacggggtttcaccatgttggccaggctggtcttgaactcctgacctcaagcgatccacctgcctcggcctcccaaagtgctgggattacaggcgtgagccaccgtgctcggccaatcgaaaggatttaagcagaggaatgacctgctaatttgtcttaatacggttactctgctgtgtggagattagactcgaggagataagaacggcagcaagaatacttttgcattcatttggacaagatgaaattgcctggtatggagagaaacaaatatcgatagaaattgtgaaggtagaacaggaaggactggctaatagattgaatgtggggttttggtttaaataagatgttaagaaagtttcttggggaaggactaaagatttccggtttgggctgtgcgaagcttgcgttgtctattagacctgataatgcagttgtgtagatcgggcagttcagtatttcagatttgaagcttaggggaaaacatctgggctggtgatgtcagtttgaggtttggttgttttcgtggggaaagtttgacaagttcgtcagcactgaaatggttgaatggtaagacattcgtatcgcaagatgctgttgagatgttaggaagaatgagtgagattgagtgccttttcttgtgcggtgcaactcttctgaggtctgtgaatatagcaatgaaaaataaagtttttatgtatattctacatatatatatgttggtagaaagcaaaaacgctaggtaaaaataaatgtaatacaattttagctatgaaccaaaaaaccatttgtggtgtggatgcaagaaagtctggatgggtgcagagttctccatgtttcacttctgacatttgaaaatacgcagtttgcatttgatacgtcaaatgttatttttaagaaaaccaataaaatcattaaaaccgaaaaggcagttttgcttgtttttaccttagttggagttatctgcaattgccgtattagtgttttaaggaacttgtaagtaagctccttagtcccctttagagctacgaaacatgtcaattttacttttctccagctttttggaatcttatctaaattaccatgtagagttctgcatagcttcaaattctcttagccaatgtggtctgtaagtgtctatcgatgaatttcaccgttaattgccgtagtatactgtcctgtaccggatgtgaagaggagcaactctgcacagtgcactggttgtctcccatggtaggaaggaattggcttatcaatggtcggatttctagacctgggtcctaaaatactcaaccgtgtctcgatgaattactgatttctattaatgaaaagtgtcctcctccatgaaaatgtctttgagtattccgttggagtttgcagtgctatttatctgcaagttactgttcaaaatgattaaattgtggtttatgtaacctagtactaaagaaataactagttaagctcgaatatgttgacattgattagtttgtaattattggaattaacattgatcgtttctgagtataaaagacatacaaacgttctggaactagtgatggctgcacatttttgtgaaaatgcactactaaaaagtgaattgtacactttaaaagggcaaatattaagatacatgtaaaattaatatgatatatggtgaattttatctcctaaaaaagtagacatacggttcaaagttattagtttcctttcccataatctttcaaaatgctagggtataaaattatgttggttgccaggcatggtggctcatgcctgtaatcccagcactttgggaggccgaggccggcggatcacaaggtcaggagtttgagaccagcctaaccaacatggtgaaaccccgtctctactaaaaaaatagaaaaattagctgggcgtggtggtgtgcgcctgtaatctcagctacttgggaggctgaggcgggagcattgcttgaacccgggaggcggaggttgtggtgagctgagatcgtgccattgcactccagcctgggcaataagagcacaactccgtctcaaaaaaaaaaattatattggatgcatataattcatgctttgatgagaatgctttaggaagttttttgaagttttttgtttttttgttttttttgagacggagtttcactcttgttgcccaggctggagtgcaatggcgcgatcttggctcaccacaacctctgcctcccaggatcaagcaattctcctgcctcagcctcccgagtagctgggattaccagcatgcaccaccacgcccagctaattttgtatgtttagtagtgacagggtttctccatgttgaggctggtctcgaactcctgacctcaggtgatctgcccgcctcagcctcccaaagtgctgggattacaggcgtgagccactgcacctggccttgaagttttttttaaacttccatttacagtgaggaaaacattttatgtataacccatgtacacatacaaattcatgtttatgtatttaaaatttattttgaggcagggtcttgctctgtcacccaggctggggtgcagtggcaggatcatggctcattgcagccttggcctcctgggtcaagtgatcctcccacctcctcccgagtagctgggactacaggctcaagccaccatgcctggctaattatttatttatttgtatttgtatttatttattttttgagatggagtctcactctgttgcccaggctggagtgcagtggtgtgatctcggctcactgcaacctccgcctcctgggttcaaacgattttcctgcctcagcctcccaagtagctgggattacaggcgtgagccaccatgcctggcctaaatttttttttttttttttaagaggcagagtctcactatgttgcctaggctggtctcaaactcctggcctcaaggtgctgggattacagccatgaggtacggtgttctgcccacttatgtgtttagagcgattcaaaaggaaaacacttccaaaaagttattgctcattaacagggttatatatatataaatgtaaagacattgtgtaaaggaactgttgtgattaattctaggatattataaaaattcagcctgtggccgagagcagtggctcacgcctgtaaccccagctacttggaaggctgaggcaggacaatcagttgaacctaggagcagaggttgcaatgagctgcggtcgcgccactgcagtgcagcctgggcgacagggcaagactccgtctcaaaaaaaagaaaaaaagaaaaaaagaaattccacctgtgtccttgtgtcacgtggcacacagcataagattttagtcttgctcataccagacttccttcagctgctcttccatgtggtagccattagtacgtataaccatttcacatgagatgtaactgataggactgaggaagtgaattttaacttacttgaattttaatggttatattgtacagtgtagctgtgtagcatagcattttgtgtcacttcattttctcaaggtttggagaaagatttttgatgtacataccaaatgtctatataaaacctaagtactgagcaatatattttttctaactttattgggtgtactttacatactgtataactcacctataggttttagttacaatccagttttatagtacactttgttgcaaaaagttctcatgcccattttcaagttagtcctgctctagacaaccactgttcagctttctttttgcataattttttctagaagtttcatgtaagtggagtagtattttagtcttttgtgtttggcttttttcacttagtgtaatgcttctgaagctaaccgaagagctttttcacatttgttgcgtgtatggatttgtttctttttgagcagtgcacattttaaactaattatcagttttatcctgtatttaaacaagtttcataaaatattaacttgctcatattgtctgtggaagtgaaacttaaaagttagcatcaaataatttacacaaaacatagaggttgggtgcagtggctcacgcctgtcaccctaacactttgggagggtgaagcaggaggattgtttgagcccaggagttgcagaccagcctgggcaacatggcggaaaaaaaattagctgggcacagtggtgcttgcctgtagtcccagctgctgcaggaggctgaggtgggagggaggtcacggctgcagtgagctgtgattgagcctctgcactttagcctggacaacagagtgagacctcatctcaaaacaaaacaaaaaccacacaaagtctcaagcaatcaattaaaaatgaaaatgaggaggctggacatggtggctcacacctgtaatcccagcactttggaaggctggggtgggcagatcatgaggtcaggagtttgaaaccagcctggccaacatagtgaaaccccgtctctactaaaaatacaaaaattagccgggcatggtggtgtgtgtcgccaaatctgtagtcccagctgaggcaggaggatcgcttgaaccagggaggtggaggttgcagtgagaagaccgcgcctctgcactccccagcctgcgtgacagggcgagacactgtctcaaaaaaaaacaaaaaaagtgattaaaattcttaattccatataccctcaccaatattctgtatcagctgcccaagtattagataggatgggctcaatcctaaaaggcacaacccccatatttaacatccctaaaattgggatgtcttacaattgatgacaggtcaattgggagtgtaaaagaataacataagctgggtgtggtggctcacgcctgtcatcccagtactttgggaggctgaggcaggtagattgccagacctcaggagttcgagaccagcctgggcaacagggtgcaaccccgactttactaaaatacaaaaaaaaaaaaaaaaattagccaggcatggcagcatgtgcctgtaatcccagctacttgggaggctgaggcaggagagttgctttaaccagggaggtggaggttgtagtgagctgagatcacgccactgcggtccagcctggccgacagagcgcaagactccgtctcaaaaataaaaaaaaaaagaatagcatgttaaattttgtgaaatagagtatgcacagatattatgcatatatttttatttaaaaaaccagctggatcaggcgccatggttccttcctgcactcccagcactttgagaggccaaggcaagaggatcacttgagtccagaagttagagatcagcctgggcaacaaagcaagcccctgtctctacaaaaagatttttaaaagagctagatgtcgcagtgtgcacctatagtcctagctacttgggaggccgaggcagaagaatcgcttgaggccaggagtttgaagctgtagtgacataggaccacaccactccactccagcctggacaacaaagcgagaccctgtctctggaaaaacaacacagctagtaaatttaaaactatactttgctaataagcattatttatcaagtccataatatagcacatctacacattaagacgcagttctagtctggttatatattattttcagtaagagaaacacaatgttgcaagttgtataaaacttagatgagtgacaagatgattttaggggtttgttctgatgtataattttttttttttttttttttttgagacggagtcttgctgtcgcccaggctggagtgcagtggcgcgatctcagctcactgcaggctccgccccctggggttcacgccattctgttgcctcagcctcccgagtagctggaactacaggcgccttccacctcgcccagctaatttttttgtatttttagttagaggcggggtttcaccgtgttagctaggatggtctcgatctcctgacctcgtgattcgcccgcctcagcctcccagagtgctgggattacaggcatgagccaccgtgcccagcctgtataaatttaatcacacatggttgaattagatatgttggtaaaaataacccaaactagaaaaacttagagtcacacaaagcaataaacaactacaaagcctagagttggtattaacaatttataaactaatagctctaactttgtatatcatgaagttttagaatccagagacacctcaccaagtctcatgactatactgaaaacactgattaaaattttttgaaattgttcagagaatgcagctaaccataactgaagttcactatttttaagaggacatgtatcaaataggggatatgactcatgagtaaaattcacattttttctagctgaaaagcaagtatatttgaagataacatttgggtaacaaaattgccatatttaaaagatactttcggcctggcggggtggctcacgcctgtaatcccaacactttgggaggccgaggtgggtgcatcatgaggtcaggagatcgagactatcctggctaacacggtgaaaccccatctctactaaaaatacaaaaaattagccaggtgtggtggcaggcgcctgtagtcctggaggctgaggcaggagaatgacgtgaacccaggaggtggagcttgcagtgagccgagatcctgccattgcactccagcctgggcgacagagcgagactccgtctcaataaataaataaattaattaaaaaatactatcaccattctaaaactgaagttaaaataacaaaggaaatgtgataaaatcagggcaattcatgagcacacaaaggtcttcaaagactatgttatgtcagccaaaaccattactatgacaaataaaaccattgtgttcccaactgcaacatcttgaagaaaacattgctaataaagaccatctaaataagaaagttagagatattgctacattttctgtattacatttgtctcaaagtttttatttgtctcaaatttttaatcatttcttttcagccagggtaatgataaatatttgtatacagaaatccattttaagttttatcattttaagataatttccatttctaagtagaaatagtatacaactattaccattgcaatctttagcattgttgttacaacagtactagttttaaaacaagtctttatattttatagatacaaactgaaatattaacaggtaaaaattaaatgtctaggtcttgcttcaaaacaatacaaggcggctgggtgtgttggctcacgcctgtaatcccaacgctttgggaggccgaggcaggtggatcacctgatgtcaggagttcaagaccagcctggccaacttggtgaaacccagtctctactaaaaatacaaaaactagttgggtgttgtggtgcgtgcctgtaatcccagctattcaggagactgaggcaggagaatcgcttgaacccgggaggcggaggctgcagtgtgccgagattgcgccactgcactccagcctggcgacagagtgagactccatctcagaaaaaaaaaaaaaaagccatttactgtgattcctaaaagtatgcatgaacatgtgttgcacagacattcaaagtcttggagaatatatacctaaatgttgataagtatattgttgattaaagtaccctatgtttcttttgcatttaaaaaatttctcacatctagatgtgtctcacaattgacgatagttttagagaaatccataatactttcatgttaggatgatcatagcagtaaataacgaatataatctattgaaagtagacaaaagttttttttgttttttgttttatttttttgagatggagttttttgctcttgttgcccaggttggagtgcagtcgcgcaatctcggctcactgcaacctctgcctccgggttcaagcaattctcctgcctcagcctcccgagtggcggggattacaggcatgtgccaccacgcccagctaattttgtattttttttttttttttttttttgtagagacggggtttctccatgttgatcaggctggtcttgaactcctgacctcaggtgatccgcctgcctcagcctcccaaagtgctgggattacagatgtgagccaccatgcttggcgcaaattaaagtttttaatgattacaatactttactgtaaagggattaatggctcttttaaaagaaaggttctcggccaggtgcagtggtgcacacctgtaatcccagctactcaggaggccgaggcactagaatctcataaacccaggaggtgaaggttgcagtgagccaggattgctccactgcactccaggctgggctacagagcgagactccatctcaaaaaaataaaaagaaaggttccctgccctaccccctaggaccccatagctccagctacggcccaaggctggggcaggaatatctcttgaggccaggtagattctagactgaatagccactgtactacagctgactggactagatctgaattccatttagctgttaaatgggcaattcgaactagtaatttgaccaaaattacatgcagggtaagaaaactagttcattatcttagtgaaagaaatagcttctacaccttcattttacatgtaaaattgtatttgaagaatgcagctgtatatgcctcacctgtaccatttaaataaaactatttaaacattttattacaggttctaaatgagaagaaacttcaagaggttgatagtttatggaaagaatttgaaactccagagaaagcaaacaaaatgtaagtactcttgaaatcaataatttagcagttaacatttagggcttgttttattttttacatttttccctgatttatataatgttacattcgtagttttctgttttgaaatctgtttcaggaataattttggtatgaacctaattattacaaatgttttacttggaatataggccatctcaattaatttgaaggcagtagtctcccccttacccacagggattatgttccagaagaccctgtggatactttaaacctcggatagtaccaaatgtgattgctgtcagtaggaacacatttgtcttcgtgtcttccacacacaaatgtaataccttttttatcttaactaagcacttaccgcacacaggggttgtaacctgctttttgagttttgcaacatcaaaactagcatgaactactttttctttcatcacaatttcatggaagattcattcttagtgtagatgttaaatctttggtttttttgtttgttttttgagacagagtcttgttctgtcacctaggctggagtacaatggcgcaatctctgctcactgcaacctccgcctcctgggttcaagctattcttctgcctcagtcccccaagtagttgggattacaggtgcccaccaccatgcccagctaatttttgtatttttagtagagacagggtttcgccatgttggtcaggcaggtctcaaactcctgacctcaggcgatccgcctgcctcggcctcacaaagtgctgggagtacaggcgtgagccaccacacctggcctaaatcttcgtatttgtatgtatatttaagggaccacactagtatgttcccttaccagataagaaaaccttgcttaagatgacactgttgcctggtgtggtggctcatgtctgtaatcctagtactttgggataccaaggtgggtggatcatttgaggtcaggagctcgagaccagcctggccaacatggtgaaaccccctctctcctaaaaacacaaaattagccgggcgtggtggcacatgcctgtaatcccagctactgggaggaagctgaggcaggaaaatcccttgagcctgggaggcggaagttgcagtgagccgagattgcgccactgcactccagtctgggtgtcagagtgagaccctgtctccaaaaaaaaaaaaaaagatgacactgttttaggcaactagaagactagttttccttcttaaagggttatatgctttgttgggttaatctgattcgttgttgtcaatgatgtattcttcttggaactgaatctaagtgatctgactcaatattcgtcactaccactgagacaacgatgaatcaactatatgtttctttctggataaaatactaccctgaggctgggcgtgatggctcacacctgtaatcccagcattttgggaggccaaggcaggcggatcagttgagcccaggagttcaagaccagcctgggcaatataggaaaaccccatctctaccaaaaacaaaaattagctgggtgtggtggtgcacacctatagtcctagctgcttgggagactgaggctggaagatcctttgagctcgggaagtcagggctgcagtgagctgtgattgcaccactgcattccagcctgggtgacagagtgaagtgagaccctgtctcaaaaacataaagggggccgggcacggtggctcacgcttgtaatcccagcactttgggaggtcgaggtgggtggatcacaaggtcaggagtttgagaccagcctggccaatatggtgaaacctcttctctactaaaaaatacaaaaaaattagccagccatgggggctgggcacggtggctcacgcctgtaatcccagcactttgggaggccaaggcgggcggatgatgaggtcaggagatggagaccatcctggctaacacggtgaaaccccgtctctacgaaaaatacaaaaaattagccaggtgtggtggcgggtgcctgtagtcccagctacttgggaggctgaggcaggagaatggcatgaggcaggagaatggcatgaacctgggaggtggagtttgcagtgagccgagattgcgccactgcactccagcctgggcgacagagtgagactctgtctcaaaaaaaaaaaacaaaaactagccaggcatggtggcacaggcacatgcctgtaatcccagctacttgggagtctgaggcaggagaattgcttgaatccgggaggcagaggttgcagtgagccgagatcgcaccactgcactccagcgtgggtgacagtgagattctgtctcaaaaaaaaaaacaaaaaaccataaagggttaggatgtaacaagaatgagacctgacaataagctattttttttaatggcatttgtacaggatagacaaatgaatatcatgagattcctaaaaaggactcacgtacgttttcttgagtcaattctatgctgtataataaagtcatctctgtacagctttatgcaacaggggtttgtattaaagcttcaacatctttactcttggccaaaatttcctccaaagcctacaactttcttttaataatccaagcattactagcctaacatttagaaaaactagtaattgtatgaagaatatctaacttcacaccctgatacacaatggtaggcatgttttattggtgtgtgctttggaaacagtcaagcacttctttccaagttatgtggcttttgaatcaacgcactgcccccaataacatgtttatctcttttttttttaattctagagtaaagctaaaacattttgagaaatttcaggatacagcagaagcattagcaggtaaagtaaaaaattagaagcttgcttttttgaaaaaattaagtcttagccgtttgtttttcttgtttaaaaggttgtttgcttcagttgcctgtgttaaccttattcaatgttgtcaatgatgcattcttattggaactgaatttaagtgatctgactcattcgtcactaccactgagacaacattgagttagcttttttcaccatagggctggttttccccatgtgtgaggagaggtgagaagtggttaagttgatctccctgtggaaaccagcaacataatgctgaagcacaattcagtaaaaggtgttctacaagggaccaaggtaatgtggtcaagtatacagctctctcctcattttaatccaagggtagagttgtaatcctgagaacagccaggattcacagttgaaaaataatttaaaaagctcttctgggggtatagatttttagttcaaaaaaacatatcaatattcagagttatacagaaactgacagaggtgttatttttaaaagattcagaagaatggatgactcatactcttcaactagatttcatcacgggacaacagagtgatcgggtttatttactgtaattgactgcagtaggtcttacagttttgtttttttaagtgttagggaaaacaggaagagcagatataaagcccaaatcattaaattttcaactgcctgaattctttatcacaaatcagccaactatttggcggtgtagtttgaaaatgaaggaccgtgaggaagaatatggcttaaagctgggcaagaatatgacagatgcaaaaaattttgttaaataaccacaggagaaaggtacagtttttgtctgaaaatttggaatccaactaaacatgctggaacataacagaccaccctaaccttggcagaggggtaggctgaaggaagacccatagggccagtttctttgttttataaacatagttctagggctgcttcaccaactcttcagtaattagagttatatacagccataaaaaaaactgtggtaatattaacttggagaatttttaaaaagatagcctgttcatcacagcttttaagtatgggtaaacatttggtaagattccaagcaagattgtgttagctgtattcaaactctagggggtgttgttgacatagactgggatatgaacagttcctagtcctgatctcaagtagcctcttctgaattcctttttgcatacgatctttaatctgcttgggatatatctggccagtccttattaaactgtattaaatggacaagccaagcttttgctcaaacaagcaggtttttactattaatacctaatatattgagcacatactgattgtcagatttatgcttatgatttcataattgttatttaattcttgaatcctgtgaggcagataaccatcatctctatgttacagatgataaaacttgaaatttaagcagtatttccagattcatttacctagcttctttgtattatttaaaataatgtacaataaggctgggtgcggtggctcatgccaggaatcccagcactttgggaggccaagacaggcggatcacctgaggtcagttcaagatcagcctggccaacatggtgaaacctcgtctctactgaaattacaaaaattagccgggtgtggtggcacacaccttagtcccagctactcgggaggctgaggcaggagaaacacttgaacctggtaggcagagatagcactgagccaagattgcaccactgcactccagcctgggcaacagagcgagactccttctggaaaataacataaaattaagtagtgtacagtaaatggacaaaatgccatagtagttgagaatttaaagtcaattccccccagtctaagctccatgagggcagagactgttctgtactgtcaaattcctagacgctagcaaagtatacagctatagaaggtttataataaatattttggggaaaatgaatgaaaatagtgaattttatcaggaatgctgtcatagaaacatttacaatgccttttcctatctgttttcaccagaaagttaaatgaacatcagctaattaagaaagcagaatccttcccctgggaattcagttctcactgcctattataaggcagttttgacatgacagaaccacaactaaatggctgtaaatgtcacagtgtacattttaaacctcatagccttagagtttgatgagaccaggcacagtgactaacacctgtaatcccaacactttgaggggctaagatgggcaggaatttaagatcagcctgggcaatatagcaagaccccctctcaaaaaagatttttttttttttggagatggagtttcattttgtcacccaggctggagtgcagtggcatgatctcggctcactgcagtctccacctcctgagttcaagtaattctcccaggaggctgggttcagcctccaaagtagctgagattacaggtgataccaccatgtccagctaatttttgtattttttagtagagacggggttttgcctgttggccaggctgctctggaactcctgacctcaggtgatccacccgccttggcctcccaaagtgctgggattacaagcatgagccaccgtgcctggccatcattttttttttttaaataaagaaatagggtctgttggggtgtgatgttgaatttgtattggtctcagacattcatatatgctatttgcatgaagtggtttatttttattcttgattgtgttttcaacttgcaagtctttttttttttttttttgatactgatcttcggctggagtacaggggcgcgatcccagctcactgtagtctctgcctcctgagtagctgggattacaggctcatgccaccacgctcacctaatttttgtatttttagcagagatggggtttcaccatgttgcctaggatggtcgcatctcctgacctcgtgacccgctcacctcagcctcctgaagtgctgggattatccatttgatcataattcgaatggatatacgatcaggagggaagagcaagacctgacttattaagcacaaactgcctgaccttggaaattgttgatagaccttcattcctgccaagcatttttcttttctttttctttttctttttttttttttagatggagttttgctcttgtcacttaggctggagtgcaatgtcacggtatcactttaacctccacctctgggttcaagcgattctcctacctcagcctcccgagtagctaggattacaggcgtgagccaccagggccagctaatttttgtatttttagtagagtgtttcgtcatgttagccaggctggtctctcgaactcctgaccttaggtgatctgccagcctcagcctcccaaagtgctgggattacagacttgagccaccacgcgcagcccaagcatactttttatgttttttgtttttgttttgttgagacagggtctgtcaccaggctgctggagtacagcggcatgatcatgactcactgcagccttgaactccctgggctcaggtgattgtcccagctcagcctccccagtagctggactacaggcacatgccaccacacccagctaatttttgtatttttagtagagacagggtttcgccgtgttggccaggctggtggtacacaccaccatgcctgggtaacccaagcatacttttacctcagtcaaatgtcagataaatttcagaagaggtattagttcgtgtgggtccagaaaaagggaatataggtctaaggaagggtgagaaatataaagcagctgatttagaacttgccagaaataccagcggtctcaaaatagaataggcagcctttgctactaagttttacattgctggaggtgtacaagtggagatacaagcaaagctaaggccttcactcaaacatgtttatattatggcagaactttgaaaatgattacactcatttttactagttttgatgtgattttaggatatttcaggacagtctatttgaaatgacaaaggaaagtgagtctgttttgtcttcccaaaaagattgtttctaagatttcatgattctcccttgagttcatgagaagattcttgtgagaaggaaagaaaccctggacctgattttacccctggctctgtagcaaaaatgagggtgggaagatcaaatgaaattgtgaaacatgtaacttataaaacatatatcatttcatttcagaagtaacattaaattcaagccctttgaaaggcctattttatttttttaagtgtcaactagggcaaggtctcaaagttaaaaatttgagagttaatgcttttgtttttctttttcttgaaaagcattcacagctctgatggagggcaaaatcaataagcagctgaaaaaagttctgaagaaaatagtaaaagaagcccatgaaccgctggcagtagctgatgctaaactaggaggggtcataaaggtaaagtcacgatatttttggtcatgcctgctagtcagatctcacagcataccaactacaaagcctagcctttgcaataagttgcttatcataaattctcaatacatttttttcttttctctaagctacatgataatggatttcccctaacatcagctgaactgagcaaataagtaatacctatttgttctagaagatatagaagaacaaaaaatgataaaaattgactttaacaaatctgctacccatatataatgttaatgttctatgtatatcatgccatatttttgtctagccacatttttttccaacgaaaatggggtccttatattttttagaaatatatttattagaaaacttttagtaggggtgtattgctggagatgaaataaaatgtgagagtggaaagaaagactaggaaaatagcctcccaaatacagaaagcagaacaattcgggcggggcgcggtggctcacacctataataatcccagcattttgggaggccaaggtaggagtatcacgaggtcagcagatcgagaccatcctggctaacacagtgaaaccctgtctctactgaaaatacagaaaattaaccgggtgtggtggcaggcgcctgtagtcccagctaattgggagtgcagtggcgcagtctcacagctcactgcagacttgacctcctgttctcaagcaatcctccctcttcagtagctgggactacaggcacatgccaccatgctggctaattattttattttattttatttcatttatttgagacagagtctcactctgttgccctggctagagtgcagtggcatgatctcggctcactgcaacctctgcctcccgggttcaagggattcccctgccttagccttccaagtagctgggattacagacgcccgccaacacgccctggcctcccaaagtgctaggattacaggcatgtgccaccacgcccaacctgtaatttttttttttttttaagacggagtctcactctgtcgctaggctgaagtgcattggctcagtcttggctcactgcaacctccgcctcctgggttgaagtgattctcctgcctcagcctcccgagtagctgggactataggcacctgccaccacacccggctaatttttgtatttttagtagagacggggtttcatcatgttggccaagatggtctcgatctattgaccttgtgatccacccgcctcggcctcccaaagtgctgggattacaggcgtgagccaccgcgcctggcataacctgtaattttaaaaagaagctaaataacaggtagtaaaagatctccttaaaccaactacttggtcaaattatattaatctttttatagcttttaatttatatagccaagctgtcttctggaagcttgtatcagtttttacttccaccagtgatacagtcaagtattctacaaacacactggaaattatgcttcttgtccaactgagaaatgcgtatatttaaattagtgccactttaatatttaggaaataatttcaggctgggcgcggtggctcatgcctgtaatcccagcactttgggaagatgaggcgggcggatcacttgaggtcaggagtttgagaccagcctgtacaacatggtgaaaccccgtctctactaaaaatacaaaattagctgggcatggtggctcatgcctgcaataatcccaggccgagacaggagaatctcttgaacccaggaggcggaggttgtagtgagccaagattgcgccactgcactccagcctgggcgacagagtgatactgtgtctcaaaaaataataataacaacttcaggaaagtctttttttttttaatttaatatagatgttcatgttcttgtaggaaaagctgaatctcagttgtatccatagtcctgttgttaatgaacttatgagaggaattcgttcacaaatggatggattaatccctggggtagaaccacgtgaaatggcagctatgtgtcttggattggctcacaggtgagaattactggaaaataaagtcaacttacttttatttgataagcgcttaacatagatctgttctaagaatgttacaaatgctcatttgaaccacatcagaaccttatgaagaagatgatagtaatatcctcatttacagatgaaactgaagcccaaggtcaatacagctggtaagtggtaaagccaggatttgaacccaggcagtctggctctattgtctggattctt

SEQ ID NO: 13047 - DNA, 871 bp, Homo sapiens
agagaaggagtagcgcgttcgtgcgtcctagttccagtacagcgtggagggtttaggcagcgtgttctgattctttgcgggacggcgagcgcatttgtgctttgcccgccgcggcctaggaggccttttgaggccgcgtagtcggtgtttttgaactgactctacagcttctggcaggccgtgcggcgccctgacccggcctcaccatgttggtgctgtttgaaacgtctgtgggttacgccatctttaaggttctaaatgagaagaaacttcaagaggttgatagtttatggaaagaatttgaaactccagagaaagcaaacaaaatagtaaagctaaaacattttgagaaatttcaggatacagcagaagcattagcagcattcacagctctgatggagggcaaaatcaataagcagctgaaaaaagttctgaagaaaatagtaaaagaagcccatgaaccgctggcagtagctgatgctaaactaggaggggtcataaaggaaaagctgaatctcagttgtatccatagtcctgttgttaatgaacttatgagaggaattcgttcacaaatggatggattaatccctggggtagaaccacgtgaaatggcagctatgtgtcttggattggctcacaggtgagaattactggaaaataaagtcaacttacttttatttgataagcgcttaacatagatctgttctaagaatgttacaaatgctcatttgaaccacatcagaaccttatgaagaagatgatagtaatatcctcatttacagatgaaactgaagcccaaggtcaatacagctggtaagtggtaaagccaggatttgaacccaggcagtctggctctattgtctggattctt

SEQ ID NO: 13048 - DNA, 15890 bp, Homo sapiens
ttgaaactccagagaaagcaaacaaaatgtaagtactcttgaaatcaataatttagcagttaacatttagggcttgttttattttttacatttttccctgatttatataatgttacattcgtagttttctgttttgaaatctgtttcaggaataattttggtatgaacctaattattacaaatgttttacttggaatataggccatctcaattaatttgaaggcagtagtctcccccttacccacagggattatgttccagaagaccctgtggatactttaaacctcggatagtaccaaatgtgattgctgtcagtaggaacacatttgtcttcgtgtcttccacacacaaatgtaataccttttttatcttaactaagcacttaccgcacacaggggttgtaacctgctttttgagttttgcaacatcaaaactagcatgaactactttttctttcatcacaatttcatggaagattcattcttagtgtagatgttaaatctttggtttttttgtttgttttttgagacagagtcttgttctgtcacctaggctggagtacaatggcgcaatctctgctcactgcaacctccgcctcctgggttcaagctattcttctgcctcagtcccccaagtagttgggattacaggtgcccaccaccatgcccagctaatttttgtatttttagtagagacagggtttcgccatgttggtcaggcaggtctcaaactcctgacctcaggcgatccgcctgcctcggcctcacaaagtgctgggagtacaggcgtgagccaccacacctggcctaaatcttcgtatttgtatgtatatttaagggaccacactagtatgttcccttaccagataagaaaaccttgcttaagatgacactgttgcctggtgtggtggctcatgtctgtaatcctagtactttgggataccaaggtgggtggatcatttgaggtcaggagctcgagaccagcctggccaacatggtgaaaccccctctctcctaaaaacacaaaattagccgggcgtggtggcacatgcctgtaatcccagctactgggaggaagctgaggcaggaaaatcccttgagcctgggaggcggaagttgcagtgagccgagattgcgccactgcactccagtctgggtgtcagagtgagaccctgtctccaaaaaaaaaaaaaaagatgacactgttttaggcaactagaagactagttttccttcttaaagggttatatgctttgttgggttaatctgattcgttgttgtcaatgatgtattcttcttggaactgaatctaagtgatctgactcaatattcgtcactaccactgagacaacgatgaatcaactatatgtttctttctggataaaatactaccctgaggctgggcgtgatggctcacacctgtaatcccagcattttgggaggccaaggcaggcggatcagttgagcccaggagttcaagaccagcctgggcaatataggaaaaccccatctctaccaaaaacaaaaattagctgggtgtggtggtgcacacctatagtcctagctgcttgggagactgaggctggaagatcctttgagctcgggaagtcagggctgcagtgagctgtgattgcaccactgcattccagcctgggtgacagagtgaagtgagaccctgtctcaaaaacataaagggggccgggcacggtggctcacgcttgtaatcccagcactttgggaggtcgaggtgggtggatcacaaggtcaggagtttgagaccagcctggccaatatggtgaaacctcttctctactaaaaaatacaaaaaaattagccagccatgggggctgggcacggtggctcacgcctgtaatcccagcactttgggaggccaaggcgggcggatgatgaggtcaggagatggagaccatcctggctaacacggtgaaaccccgtctctacgaaaaatacaaaaaattagccaggtgtggtggcgggtgcctgtagtcccagctacttgggaggctgaggcaggagaatggcatgaggcaggagaatggcatgaacctgggaggtggagtttgcagtgagccgagattgcgccactgcactccagcctgggcgacagagtgagactctgtctcaaaaaaaaaaaacaaaaactagccaggcatggtggcacaggcacatgcctgtaatcccagctacttgggagtctgaggcaggagaattgcttgaatccgggaggcagaggttgcagtgagccgagatcgcaccactgcactccagcgtgggtgacagtgagattctgtctcaaaaaaaaaaacaaaaaaccataaagggttaggatgtaacaagaatgagacctgacaataagctattttttttaatggcatttgtacaggatagacaaatgaatatcatgagattcctaaaaaggactcacgtacgttttcttgagtcaattctatgctgtataataaagtcatctctgtacagctttatgcaacaggggtttgtattaaagcttcaacatctttactcttggccaaaatttcctccaaagcctacaactttcttttaataatccaagcattactagcctaacatttagaaaaactagtaattgtatgaagaatatctaacttcacaccctgatacacaatggtaggcatgttttattggtgtgtgctttggaaacagtcaagcacttctttccaagttatgtggcttttgaatcaacgcactgcccccaataacatgtttatctcttttttttttaattctagagtaaagctaaaacattttgagaaatttcaggatacagcagaagcattagcaggtaaagtaaaaaattagaagcttgcttttttgaaaaaattaagtcttagccgtttgtttttcttgtttaaaaggttgtttgcttcagttgcctgtgttaaccttattcaatgttgtcaatgatgcattcttattggaactgaatttaagtgatctgactcattcgtcactaccactgagacaacattgagttagcttttttcaccatagggctggttttccccatgtgtgaggagaggtgagaagtggttaagttgatctccctgtggaaaccagcaacataatgctgaagcacaattcagtaaaaggtgttctacaagggaccaaggtaatgtggtcaagtatacagctctctcctcattttaatccaagggtagagttgtaatcctgagaacagccaggattcacagttgaaaaataatttaaaaagctcttctgggggtatagatttttagttcaaaaaaacatatcaatattcagagttatacagaaactgacagaggtgttatttttaaaagattcagaagaatggatgactcatactcttcaactagatttcatcacgggacaacagagtgatcgggtttatttactgtaattgactgcagtaggtcttacagttttgtttttttaagtgttagggaaaacaggaagagcagatataaagcccaaatcattaaattttcaactgcctgaattctttatcacaaatcagccaactatttggcggtgtagtttgaaaatgaaggaccgtgaggaagaatatggcttaaagctgggcaagaatatgacagatgcaaaaaattttgttaaataaccacaggagaaaggtacagtttttgtctgaaaatttggaatccaactaaacatgctggaacataacagaccaccctaaccttggcagaggggtaggctgaaggaagacccatagggccagtttctttgttttataaacatagttctagggctgcttcaccaactcttcagtaattagagttatatacagccataaaaaaaactgtggtaatattaacttggagaatttttaaaaagatagcctgttcatcacagcttttaagtatgggtaaacatttggtaagattccaagcaagattgtgttagctgtattcaaactctagggggtgttgttgacatagactgggatatgaacagttcctagtcctgatctcaagtagcctcttctgaattcctttttgcatacgatctttaatctgcttgggatatatctggccagtccttattaaactgtattaaatggacaagccaagcttttgctcaaacaagcaggtttttactattaatacctaatatattgagcacatactgattgtcagatttatgcttatgatttcataattgttatttaattcttgaatcctgtgaggcagataaccatcatctctatgttacagatgataaaacttgaaatttaagcagtatttccagattcatttacctagcttctttgtattatttaaaataatgtacaataaggctgggtgcggtggctcatgccaggaatcccagcactttgggaggccaagacaggcggatcacctgaggtcagttcaagatcagcctggccaacatggtgaaacctcgtctctactgaaattacaaaaattagccgggtgtggtggcacacaccttagtcccagctactcgggaggctgaggcaggagaaacacttgaacctggtaggcagagatagcactgagccaagattgcaccactgcactccagcctgggcaacagagcgagactccttctggaaaataacataaaattaagtagtgtacagtaaatggacaaaatgccatagtagttgagaatttaaagtcaattccccccagtctaagctccatgagggcagagactgttctgtactgtcaaattcctagacgctagcaaagtatacagctatagaaggtttataataaatattttggggaaaatgaatgaaaatagtgaattttatcaggaatgctgtcatagaaacatttacaatgccttttcctatctgttttcaccagaaagttaaatgaacatcagctaattaagaaagcagaatccttcccctgggaattcagttctcactgcctattataaggcagttttgacatgacagaaccacaactaaatggctgtaaatgtcacagtgtacattttaaacctcatagccttagagtttgatgagaccaggcacagtgactaacacctgtaatcccaacactttgaggggctaagatgggcaggaatttaagatcagcctgggcaatatagcaagaccccctctcaaaaaagatttttttttttttggagatggagtttcattttgtcacccaggctggagtgcagtggcatgatctcggctcactgcagtctccacctcctgagttcaagtaattctcccaggaggctgggttcagcctccaaagtagctgagattacaggtgataccaccatgtccagctaatttttgtattttttagtagagacggggttttgcctgttggccaggctgctctggaactcctgacctcaggtgatccacccgccttggcctcccaaagtgctgggattacaagcatgagccaccgtgcctggccatcattttttttttttaaataaagaaatagggtctgttggggtgtgatgttgaatttgtattggtctcagacattcatatatgctatttgcatgaagtggtttatttttattcttgattgtgttttcaacttgcaagtctttttttttttttttttgatactgatcttcggctggagtacaggggcgcgatcccagctcactgtagtctctgcctcctgagtagctgggattacaggctcatgccaccacgctcacctaatttttgtatttttagcagagatggggtttcaccatgttgcctaggatggtcgcatctcctgacctcgtgacccgctcacctcagcctcctgaagtgctgggattatccatttgatcataattcgaatggatatacgatcaggagggaagagcaagacctgacttattaagcacaaactgcctgaccttggaaattgttgatagaccttcattcctgccaagcatttttcttttctttttctttttctttttttttttttagatggagttttgctcttgtcacttaggctggagtgcaatgtcacggtatcactttaacctccacctctgggttcaagcgattctcctacctcagcctcccgagtagctaggattacaggcgtgagccaccagggccagctaatttttgtatttttagtagagtgtttcgtcatgttagccaggctggtctctcgaactcctgaccttaggtgatctgccagcctcagcctcccaaagtgctgggattacagacttgagccaccacgcgcagcccaagcatactttttatgttttttgtttttgttttgttgagacagggtctgtcaccaggctgctggagtacagcggcatgatcatgactcactgcagccttgaactccctgggctcaggtgattgtcccagctcagcctccccagtagctggactacaggcacatgccaccacacccagctaatttttgtatttttagtagagacagggtttcgccgtgttggccaggctggtggtacacaccaccatgcctgggtaacccaagcatacttttacctcagtcaaatgtcagataaatttcagaagaggtattagttcgtgtgggtccagaaaaagggaatataggtctaaggaagggtgagaaatataaagcagctgatttagaacttgccagaaataccagcggtctcaaaatagaataggcagcctttgctactaagttttacattgctggaggtgtacaagtggagatacaagcaaagctaaggccttcactcaaacatgtttatattatggcagaactttgaaaatgattacactcatttttactagttttgatgtgattttaggatatttcaggacagtctatttgaaatgacaaaggaaagtgagtctgttttgtcttcccaaaaagattgtttctaagatttcatgattctcccttgagttcatgagaagattcttgtgagaaggaaagaaaccctggacctgattttacccctggctctgtagcaaaaatgagggtgggaagatcaaatgaaattgtgaaacatgtaacttataaaacatatatcatttcatttcagaagtaacattaaattcaagccctttgaaaggcctattttatttttttaagtgtcaactagggcaaggtctcaaagttaaaaatttgagagttaatgcttttgtttttctttttcttgaaaagcattcacagctctgatggagggcaaaatcaataagcagctgaaaaaagttctgaagaaaatagtaaaagaagcccatgaaccgctggcagtagctgatgctaaactaggaggggtcataaaggtaaagtcacgatatttttggtcatgcctgctagtcagatctcacagcataccaactacaaagcctagcctttgcaataagttgcttatcataaattctcaatacatttttttcttttctctaagctacatgataatggatttcccctaacatcagctgaactgagcaaataagtaatacctatttgttctagaagatatagaagaacaaaaaatgataaaaattgactttaacaaatctgctacccatatataatgttaatgttctatgtatatcatgccatatttttgtctagccacatttttttccaacgaaaatggggtccttatattttttagaaatatatttattagaaaacttttagtaggggtgtattgctggagatgaaataaaatgtgagagtggaaagaaagactaggaaaatagcctcccaaatacagaaagcagaacaattcgggcggggcgcggtggctcacacctataataatcccagcattttgggaggccaaggtaggagtatcacgaggtcagcagatcgagaccatcctggctaacacagtgaaaccctgtctctactgaaaatacagaaaattaaccgggtgtggtggcaggcgcctgtagtcccagctaattgggagtgcagtggcgcagtctcacagctcactgcagacttgacctcctgttctcaagcaatcctccctcttcagtagctgggactacaggcacatgccaccatgctggctaattattttattttattttatttcatttatttgagacagagtctcactctgttgccctggctagagtgcagtggcatgatctcggctcactgcaacctctgcctcccgggttcaagggattcccctgccttagccttccaagtagctgggattacagacgcccgccaacacgccctggcctcccaaagtgctaggattacaggcatgtgccaccacgcccaacctgtaatttttttttttttttaagacggagtctcactctgtcgctaggctgaagtgcattggctcagtcttggctcactgcaacctccgcctcctgggttgaagtgattctcctgcctcagcctcccgagtagctgggactataggcacctgccaccacacccggctaatttttgtatttttagtagagacggggtttcatcatgttggccaagatggtctcgatctattgaccttgtgatccacccgcctcggcctcccaaagtgctgggattacaggcgtgagccaccgcgcctggcataacctgtaattttaaaaagaagctaaataacaggtagtaaaagatctccttaaaccaactacttggtcaaattatattaatctttttatagcttttaatttatatagccaagctgtcttctggaagcttgtatcagtttttacttccaccagtgatacagtcaagtattctacaaacacactggaaattatgcttcttgtccaactgagaaatgcgtatatttaaattagtgccactttaatatttaggaaataatttcaggctgggcgcggtggctcatgcctgtaatcccagcactttgggaagatgaggcgggcggatcacttgaggtcaggagtttgagaccagcctgtacaacatggtgaaaccccgtctctactaaaaatacaaaattagctgggcatggtggctcatgcctgcaataatcccaggccgagacaggagaatctcttgaacccaggaggcggaggttgtagtgagccaagattgcgccactgcactccagcctgggcgacagagtgatactgtgtctcaaaaaataataataacaacttcaggaaagtctttttttttttaatttaatatagatgttcatgttcttgtaggaaaagctgaatctcagttgtatccatagtcctgttgttaatgaacttatgagaggaattcgttcacaaatggatggattaatccctggggtagaaccacgtgaaatggcagctatgtgtcttggattggctcacaggtgagaattactggaaaataaagtcaacttacttttatttgataagcgcttaacatagatctgttctaagaatgttacaaatgctcatttgaaccacatcagaaccttatgaagaagatgatagtaatatcctcatttacagatgaaactgaagcccaaggtcaatacagctggtaagtggtaaagccaggatttgaacccaggcagtctggctctattgtctggattcttaaaaccttaaaacctcatcaaaggaattctctactactctgatcttggatgccctgtttcttgggctttccctcctttatctctgctaagtcatgccactcctccatctacttagtattcccccaaattctctcatctgctatggtcttatgggataggtgtgtatttgtgttttcattgctttactctgatttttaataaggcaaagaggactaggtgcagtggctcacccctgtaatcccaactctttgggagaccaggagtttgagactagcctgagcaacatagcaagaaatatgtctctctctgtgtttttttgtttgttttgtttttgttttgttttttttgaggcagattctcactctgtcgcccagactggagtgcagtggcgtgatctctgctcactgcagcccctgcctcccaggctcaagtgattttcttgcctcagcctccgagtagctaggattacaagcgtgcaccactactgcccaactaatttttgtatttttagtagagacgggctttcaccatgttggcctggctgatcttgaactcctgacctcaaatgatccatccgccttggccttccaaagtgctgggattataggcatgagccaccacacccggcatttttttttttttttttttttttttgagtcagggtctcactctgttgctcaggctggggtgcagtggtgcgatcttggctcactgcaacctggacatcctggactcaaacaatgccacctcagcctcccaagtagctgggactgcaagtgtgcgccaccatccctggctgattttttaactttttgtagagacggggttttgccatgctgcccaggctggaactcccaggctcaagtgatccacttgccttagcctcccaaagtgccgcgactgcaggggtgagccaccatgcccagtcttctccctatttttaattgcatgttaaccctatcatatttcattagaagtcccttagaataggcattattgctatgttgtgatacatctgttcatgaaaagcttaatactttggaattgcactacagttaacagggttgtgaagaaaataatggtaggtagttgctcaaaacctgtgcaactttgtaatcagtactgtcaaatagtaatcctaataaaattattaccacagttcaaaagacattttaagctaatattaaaagaaacactacaggctgggcacggtggctcacgcctgtaatcccaacactttgggaggccaaggcaggcagatcacaaggtcaggagatcgagaccacggtgaaacctcgtctctactaaaaatacaaaaaattagccgggcacagtggcgggcgcctgtagtcccagctacttgggaggctgaggcaggagaatggcgtgaacccgggaggcagagcttgcagtgagtggagatcgctccactgcagtccagcctgggtgacagagtgagactccatctcaaaaaaaaaaaaaaaaaagggagaaagaaacactataggccaggcgcagtggctcacgcctgtaatacatcccagcactttgcgaggctgaggcaggtgaatcatgaggtcaggagatcgagaccatcctggttaacacagtgaaaccccgtctctactaaaaatacaaaaaaattagccaggcatggtggcgggcgcctgtagtcccagctactcgggaggctgaggcaggagaatggcgtgaacccgggaggtggagcttgcagtgagtggagattgctccactgcactccagcctgggtgacagagtaagactccgtctcaaaacaaaacaaaaaagaaacactacaatttaaaaaggtctattttaaaattaaaaggtgggcatagattgaaagggttgaagctgctaagctagagttaagagcaaaaatgcacaaaggttagggagagctttgtaataagcatttctaagagagaacaaatagtgaaactgagtcaaaaatccaaacctgggtaaatctgcattgtgtatagcagtggttccctatcaagggcaatcagatgtccccccagtaggcatttgtctatgtccatagacatttttggttgtcacaattggaggtgggttggggtctgccatgagtatctggtggataaaagttagggatactgctaaaggtcctataatgcacagggcagcctgtacaacaaggaattaggcccaaaatattaattgtgctgagatgaaaaaacatttttatacagacaatattgttactccacagctttctgttttcagatgttaagagtcctgcaaagttcctaactggtagtataaagcttaatatgtgctattaaaaattgcatgaaccaatatggctttttttttttttttttttttgaggcggagtcttgctttgttgcccaggctggagtacagtggcacgtgatctcggctcactgcaacctctgcctccccggttcaagcgattctcctgcctcagcctccagagtagctgagattcaggcgtgccccaccatgcctggctaatttttatatttttagtagagacagggtttcgccatgttggccaggttggtctcgaactcctaacaggtgatctgcccacctcggcctcccaaagtgctaggattacaagcgtgagccaccacgcccagtccaatatgacttttgtattacacagcttatcctatttgtcattcatacataaactcattcatgttacagaaataaaggtcgtagcagcacatatagtttttttttttaatgtgtattttctgttctcgtatggtgcatttctacttagctgatttttcttcttagaaaaaccaattacagctctgactacaggctgatttgagtaaaaacaaaaacaaaaaaaaactttaaggtgttaatttaaatgcttttcctagatgctatcttgctaatttattttcccctttcttcccagcctgtctcgatatagattgaagtttagcgctgataaagtagacacaatgattgttcaggcaatttgtaagtatagtacatgcaaagtccgatttgttgctctgtccttcatgcgttttcatactgttgaaactatcttttatgattctgtctgttgagaaagagaaaggaggccaggtgtggtggctcaagcctttaatcccagcacttgggaggctgaggcaggcggatcacctgaggtcaggagttcaagaccagcttggccaacatgacaaaactctgtctttactaaaaatacaaaaaaaattaaatgtgcatggtggcgtgtacctataatcccagctactcaggaggctgaggcaggataattgcttgaacccaggaggcggaggttgactatttggagattatatgaatcacagaattaacattacgttaattaattcatttgtatttttccatgaaaatgttaaaaacataagtgcaatctttgtagttgtgtattctgctgtgtcattaaatggtttttagaaagctcaaaagctgccaggcacagtggctcatgcctgtaatcccagcactttgagaggctgaggcgggaggatcacctgaggtcgggaatttgagaccagcctgaccaacatggagaaatcccgtctctactaaaaatacaaaattaaccaggcatggtggtgcatgcctgtaatctcagctactcgggaggctgaggcaggagaatcacttgaaccctggaggcagaggttgtagtgagttgatcgtgccattgcactccagcctgggcaacaagagcaaatctccatctcactaaaaaaaaaaaaaaaaaatcaaaatcttaatcgtttttctattttagaaatgcattcggccgtggctcacgcctgtaatcccaacactttgggaggcagaggctggtggatcacctgaggtcaggagttcgagatcaggccaacatggtgaaacccgatctttagtaaaaaataaaaaaattatctgagcatgatggtaggcgcctgtaatctcagctattcaggaggctgaggcaggagaatcacttgaacctgagaggcggaggttgcagtgggccgagatcgcaccatttcactctagcttggacaacatgagcaacactccgtctcaaaaaaaaaaacaaagtattcggctgggcgcagtggctcacacctgtaatcctagcacattgggaggccaaggcgggtgaattgcctgagctcgggagtttgagagcagcctggctaacatggcgaaaccctgtctttactaaaaatacaaaaaagtagccagtcgaggtggcgtgtgcctatagtcccagccacttaggaggctgaggaaggagaatcacttgaacccaggaagcagaggttgcagtgagctgagatcgcaccactgcactccatcctgggtgatggagttagactctgtctccaaaaaaagaaaaaaaaaagcgctcaaccagcgattcctttcctagatttatacccaaaagaattaaaaacagaactgagttgcttgtacacctatgttcataacagtgttatttacaaaaccaaacagtggaaacaacccagataccttttaacagatgaatggataaactgcattgtggatgcagcttgaatgtccctaatctgaaattcaaaatgctctgaaatctaaaactttttgtggtaccacacaaatccacaagtggaaaactccacacctgaccacacgtcaaaactttgttttatgcacaaaattatttaaaatattgtgtaaaattaccttcaaggttttgtatataaggtatatgtgaaatgtagatgcatttcctatttagacttcgagttccatcctcagcctcatacgtgtttgcaaatactctgaaatacttctggtcccaagcattttgggtaacgtacacccagccacttcacacagtggaatgttagtcagccttaaaaagaaatgaaattctgatacatatttcaacatgataaaccttgaaaatatgctaagtgaaatagtcacaaaatactgcatgattctgcttatatgaagtacctaaaataggtgaactcagagacagaagtataaagataactagaggttggggggaaggtgggaatgagttactgtttaatgggtacagaatttttcagtttctgatgataaaattgctctggcaatagatcctggtaatggttgcataacatcataagaatacttaatgctactgaatagtacacttgaaaatggttgaagtgttattttttattcttttttttttaaattttttgcgacggaatcttgctctgtcacccaggctggaatgcagtagcacgatctcggctcactacaacctccacctcctgtgttcaagtgattcttctgcctcagccctccagagtagctgggactacaggtgtgcaccaccatgcctggctaatttttgtatttttaatagagatggggtttcaccatgttggccaggctggtcttgaacttctgacttcgtgatatgcctgtctgctgggattacagacatgagccaccgtgcccagcctgaagtgttaaattttatgttgtgtatgttttaccacaataaatccctttaagttttgtttgtttgtttttaatctactacagccttgttagatgacttggataaagaactaaacaactacattatgcgatgtagagaatggtatggctggcatttccctgaattaggaaaaattatttcagataatttaacatactgcaagtgtttacagaaagttggtgagtaatttgttcatcctttaaggcattgaaagtaaatgaatttgattgcatcctaaaacatgacgtatagcattttgttaagcaagattcccagggtttttgcaatttctgtgtatttgggaagtgtagcagtttagtgtcttaaatttaagaaacaaaatgaattttaacttagattttgatggcctataacatgatattagtacctaatgctaaatagcagtattgccgtctgtactgttaatatacagaggaacttgattgttgattgtcgttaacgtacagaggaacttgattgattgatggtttacttgccttacgaattactggccccagcttcagtataaaattgtctgtgacattattattagtcctgtcttttttaaatttttgccacttatattctgtaataagtgttgtggcatattttgtcctctttttactctgattattttttggaagaaggtggtggggagacatttaatgtctaaacttaaacccttaaatgaggaaaactgttatactaggtcaaacttcttcattttttttgttttgtttaggcatccttttcattggctttctactttttct

SEQ ID NO: 13049 - DNA, 571 bp, Homo sapiens
ttgaaactccagagaaagcaaacaaaatagtaaagctaaaacattttgagaaatttcaggatacagcagaagcattagcagcattcacagctctgatggagggcaaaatcaataagcagctgaaaaaagttctgaagaaaatagtaaaagaagcccatgaaccgctggcagtagctgatgctaaactaggaggggtcataaaggaaaagctgaatctcagttgtatccatagtcctgttgttaatgaacttatgagaggaattcgttcacaaatggatggattaatccctggggtagaaccacgtgaaatggcagctatgtgtcttggattggctcacagcctgtctcgatatagattgaagtttagcgctgataaagtagacacaatgattgttcaggcaatttccttgttagatgacttggataaagaactaaacaactacattatgcgatgtagagaatggtatggctggcatttccctgaattaggaaaaattatttcagataatttaacatactgcaagtgtttacagaaagttggcatccttttcattggctttctactttttct

SEQ ID NO: 13050 - DNA, 9919 bp, Homo sapiens
agttccagtacagcgtggagggtttaggcagcgtgttctgattctttgcgggacggcgagcgcatttgtgctttgcccgccgcggcctaggaggccttttgaggccgcgtagtcggtgtttttgaactgactctacagcttctggcaggccgtgcggcgccctgacccggcctcaccatgttggtgctgtttgaaacgtctgtgggttacgccatctttaaggtaggtgggagagcgagccgttaaagggggaaggcggatgctggacagacgaggagagggaaagacttaagcacggaactactcagagtagcgtgggtgcctgttatagcccgggctctgggaggagggagaaggcctttacacctgagagccatgttacgtgtaacacgtggccccgccgtttggggagacccgttctgcattagaggattttatttcctcccgttgaaggggtgggcaggaggcgtgttagaatttaacagattatagggaattcggactttattctagatgttttgaggaatgatcgaaagattttttttttttttgagatggagtttcgctcttgttgcccatgctggagtgcagtggcgcaatcttggctcactgcaacctccgtctcccgggttcaagcgattctcctgccttggcctcccgagtagctgggattacaggcctccatccaccaccacgcctggctagttgtttttgtttgtttgtttgcttttagtagagacggggtttcaccatgttggccaggctggtcttgaactcctgacctcaagcgatccacctgcctcggcctcccaaagtgctgggattacaggcgtgagccaccgtgctcggccaatcgaaaggatttaagcagaggaatgacctgctaatttgtcttaatacggttactctgctgtgtggagattagactcgaggagataagaacggcagcaagaatacttttgcattcatttggacaagatgaaattgcctggtatggagagaaacaaatatcgatagaaattgtgaaggtagaacaggaaggactggctaatagattgaatgtggggttttggtttaaataagatgttaagaaagtttcttggggaaggactaaagatttccggtttgggctgtgcgaagcttgcgttgtctattagacctgataatgcagttgtgtagatcgggcagttcagtatttcagatttgaagcttaggggaaaacatctgggctggtgatgtcagtttgaggtttggttgttttcgtggggaaagtttgacaagttcgtcagcactgaaatggttgaatggtaagacattcgtatcgcaagatgctgttgagatgttaggaagaatgagtgagattgagtgccttttcttgtgcggtgcaactcttctgaggtctgtgaatatagcaatgaaaaataaagtttttatgtatattctacatatatatatgttggtagaaagcaaaaacgctaggtaaaaataaatgtaatacaattttagctatgaaccaaaaaaccatttgtggtgtggatgcaagaaagtctggatgggtgcagagttctccatgtttcacttctgacatttgaaaatacgcagtttgcatttgatacgtcaaatgttatttttaagaaaaccaataaaatcattaaaaccgaaaaggcagttttgcttgtttttaccttagttggagttatctgcaattgccgtattagtgttttaaggaacttgtaagtaagctccttagtcccctttagagctacgaaacatgtcaattttacttttctccagctttttggaatcttatctaaattaccatgtagagttctgcatagcttcaaattctcttagccaatgtggtctgtaagtgtctatcgatgaatttcaccgttaattgccgtagtatactgtcctgtaccggatgtgaagaggagcaactctgcacagtgcactggttgtctcccatggtaggaaggaattggcttatcaatggtcggatttctagacctgggtcctaaaatactcaaccgtgtctcgatgaattactgatttctattaatgaaaagtgtcctcctccatgaaaatgtctttgagtattccgttggagtttgcagtgctatttatctgcaagttactgttcaaaatgattaaattgtggtttatgtaacctagtactaaagaaataactagttaagctcgaatatgttgacattgattagtttgtaattattggaattaacattgatcgtttctgagtataaaagacatacaaacgttctggaactagtgatggctgcacatttttgtgaaaatgcactactaaaaagtgaattgtacactttaaaagggcaaatattaagatacatgtaaaattaatatgatatatggtgaattttatctcctaaaaaagtagacatacggttcaaagttattagtttcctttcccataatctttcaaaatgctagggtataaaattatgttggttgccaggcatggtggctcatgcctgtaatcccagcactttgggaggccgaggccggcggatcacaaggtcaggagtttgagaccagcctaaccaacatggtgaaaccccgtctctactaaaaaaatagaaaaattagctgggcgtggtggtgtgcgcctgtaatctcagctacttgggaggctgaggcgggagcattgcttgaacccgggaggcggaggttgtggtgagctgagatcgtgccattgcactccagcctgggcaataagagcacaactccgtctcaaaaaaaaaaattatattggatgcatataattcatgctttgatgagaatgctttaggaagttttttgaagttttttgtttttttgttttttttgagacggagtttcactcttgttgcccaggctggagtgcaatggcgcgatcttggctcaccacaacctctgcctcccaggatcaagcaattctcctgcctcagcctcccgagtagctgggattaccagcatgcaccaccacgcccagctaattttgtatgtttagtagtgacagggtttctccatgttgaggctggtctcgaactcctgacctcaggtgatctgcccgcctcagcctcccaaagtgctgggattacaggcgtgagccactgcacctggccttgaagttttttttaaacttccatttacagtgaggaaaacattttatgtataacccatgtacacatacaaattcatgtttatgtatttaaaatttattttgaggcagggtcttgctctgtcacccaggctggggtgcagtggcaggatcatggctcattgcagccttggcctcctgggtcaagtgatcctcccacctcctcccgagtagctgggactacaggctcaagccaccatgcctggctaattatttatttatttgtatttgtatttatttattttttgagatggagtctcactctgttgcccaggctggagtgcagtggtgtgatctcggctcactgcaacctccgcctcctgggttcaaacgattttcctgcctcagcctcccaagtagctgggattacaggcgtgagccaccatgcctggcctaaatttttttttttttttttaagaggcagagtctcactatgttgcctaggctggtctcaaactcctggcctcaaggtgctgggattacagccatgaggtacggtgttctgcccacttatgtgtttagagcgattcaaaaggaaaacacttccaaaaagttattgctcattaacagggttatatatatataaatgtaaagacattgtgtaaaggaactgttgtgattaattctaggatattataaaaattcagcctgtggccgagagcagtggctcacgcctgtaaccccagctacttggaaggctgaggcaggacaatcagttgaacctaggagcagaggttgcaatgagctgcggtcgcgccactgcagtgcagcctgggcgacagggcaagactccgtctcaaaaaaaagaaaaaaagaaaaaaagaaattccacctgtgtccttgtgtcacgtggcacacagcataagattttagtcttgctcataccagacttccttcagctgctcttccatgtggtagccattagtacgtataaccatttcacatgagatgtaactgataggactgaggaagtgaattttaacttacttgaattttaatggttatattgtacagtgtagctgtgtagcatagcattttgtgtcacttcattttctcaaggtttggagaaagatttttgatgtacataccaaatgtctatataaaacctaagtactgagcaatatattttttctaactttattgggtgtactttacatactgtataactcacctataggttttagttacaatccagttttatagtacactttgttgcaaaaagttctcatgcccattttcaagttagtcctgctctagacaaccactgttcagctttctttttgcataattttttctagaagtttcatgtaagtggagtagtattttagtcttttgtgtttggcttttttcacttagtgtaatgcttctgaagctaaccgaagagctttttcacatttgttgcgtgtatggatttgtttctttttgagcagtgcacattttaaactaattatcagttttatcctgtatttaaacaagtttcataaaatattaacttgctcatattgtctgtggaagtgaaacttaaaagttagcatcaaataatttacacaaaacatagaggttgggtgcagtggctcacgcctgtcaccctaacactttgggagggtgaagcaggaggattgtttgagcccaggagttgcagaccagcctgggcaacatggcggaaaaaaaattagctgggcacagtggtgcttgcctgtagtcccagctgctgcaggaggctgaggtgggagggaggtcacggctgcagtgagctgtgattgagcctctgcactttagcctggacaacagagtgagacctcatctcaaaacaaaacaaaaaccacacaaagtctcaagcaatcaattaaaaatgaaaatgaggaggctggacatggtggctcacacctgtaatcccagcactttggaaggctggggtgggcagatcatgaggtcaggagtttgaaaccagcctggccaacatagtgaaaccccgtctctactaaaaatacaaaaattagccgggcatggtggtgtgtgtcgccaaatctgtagtcccagctgaggcaggaggatcgcttgaaccagggaggtggaggttgcagtgagaagaccgcgcctctgcactccccagcctgcgtgacagggcgagacactgtctcaaaaaaaaacaaaaaaagtgattaaaattcttaattccatataccctcaccaatattctgtatcagctgcccaagtattagataggatgggctcaatcctaaaaggcacaacccccatatttaacatccctaaaattgggatgtcttacaattgatgacaggtcaattgggagtgtaaaagaataacataagctgggtgtggtggctcacgcctgtcatcccagtactttgggaggctgaggcaggtagattgccagacctcaggagttcgagaccagcctgggcaacagggtgcaaccccgactttactaaaatacaaaaaaaaaaaaaaaaattagccaggcatggcagcatgtgcctgtaatcccagctacttgggaggctgaggcaggagagttgctttaaccagggaggtggaggttgtagtgagctgagatcacgccactgcggtccagcctggccgacagagcgcaagactccgtctcaaaaataaaaaaaaaaagaatagcatgttaaattttgtgaaatagagtatgcacagatattatgcatatatttttatttaaaaaaccagctggatcaggcgccatggttccttcctgcactcccagcactttgagaggccaaggcaagaggatcacttgagtccagaagttagagatcagcctgggcaacaaagcaagcccctgtctctacaaaaagatttttaaaagagctagatgtcgcagtgtgcacctatagtcctagctacttgggaggccgaggcagaagaatcgcttgaggccaggagtttgaagctgtagtgacataggaccacaccactccactccagcctggacaacaaagcgagaccctgtctctggaaaaacaacacagctagtaaatttaaaactatactttgctaataagcattatttatcaagtccataatatagcacatctacacattaagacgcagttctagtctggttatatattattttcagtaagagaaacacaatgttgcaagttgtataaaacttagatgagtgacaagatgattttaggggtttgttctgatgtataattttttttttttttttttttttgagacggagtcttgctgtcgcccaggctggagtgcagtggcgcgatctcagctcactgcaggctccgccccctggggttcacgccattctgttgcctcagcctcccgagtagctggaactacaggcgccttccacctcgcccagctaatttttttgtatttttagttagaggcggggtttcaccgtgttagctaggatggtctcgatctcctgacctcgtgattcgcccgcctcagcctcccagagtgctgggattacaggcatgagccaccgtgcccagcctgtataaatttaatcacacatggttgaattagatatgttggtaaaaataacccaaactagaaaaacttagagtcacacaaagcaataaacaactacaaagcctagagttggtattaacaatttataaactaatagctctaactttgtatatcatgaagttttagaatccagagacacctcaccaagtctcatgactatactgaaaacactgattaaaattttttgaaattgttcagagaatgcagctaaccataactgaagttcactatttttaagaggacatgtatcaaataggggatatgactcatgagtaaaattcacattttttctagctgaaaagcaagtatatttgaagataacatttgggtaacaaaattgccatatttaaaagatactttcggcctggcggggtggctcacgcctgtaatcccaacactttgggaggccgaggtgggtgcatcatgaggtcaggagatcgagactatcctggctaacacggtgaaaccccatctctactaaaaatacaaaaaattagccaggtgtggtggcaggcgcctgtagtcctggaggctgaggcaggagaatgacgtgaacccaggaggtggagcttgcagtgagccgagatcctgccattgcactccagcctgggcgacagagcgagactccgtctcaataaataaataaattaattaaaaaatactatcaccattctaaaactgaagttaaaataacaaaggaaatgtgataaaatcagggcaattcatgagcacacaaaggtcttcaaagactatgttatgtcagccaaaaccattactatgacaaataaaaccattgtgttcccaactgcaacatcttgaagaaaacattgctaataaagaccatctaaataagaaagttagagatattgctacattttctgtattacatttgtctcaaagtttttatttgtctcaaatttttaatcatttcttttcagccagggtaatgataaatatttgtatacagaaatccattttaagttttatcattttaagataatttccatttctaagtagaaatagtatacaactattaccattgcaatctttagcattgttgttacaacagtactagttttaaaacaagtctttatattttatagatacaaactgaaatattaacaggtaaaaattaaatgtctaggtcttgcttcaaaacaatacaaggcggctgggtgtgttggctcacgcctgtaatcccaacgctttgggaggccgaggcaggtggatcacctgatgtcaggagttcaagaccagcctggccaacttggtgaaacccagtctctactaaaaatacaaaaactagttgggtgttgtggtgcgtgcctgtaatcccagctattcaggagactgaggcaggagaatcgcttgaacccgggaggcggaggctgcagtgtgccgagattgcgccactgcactccagcctggcgacagagtgagactccatctcagaaaaaaaaaaaaaaagccatttactgtgattcctaaaagtatgcatgaacatgtgttgcacagacattcaaagtcttggagaatatatacctaaatgttgataagtatattgttgattaaagtaccctatgtttcttttgcatttaaaaaatttctcacatctagatgtgtctcacaattgacgatagttttagagaaatccataatactttcatgttaggatgatcatagcagtaaataacgaatataatctattgaaagtagacaaaagttttttttgttttttgttttatttttttgagatggagttttttgctcttgttgcccaggttggagtgcagtcgcgcaatctcggctcactgcaacctctgcctccgggttcaagcaattctcctgcctcagcctcccgagtggcggggattacaggcatgtgccaccacgcccagctaattttgtattttttttttttttttttttttgtagagacggggtttctccatgttgatcaggctggtcttgaactcctgacctcaggtgatccgcctgcctcagcctcccaaagtgctgggattacagatgtgagccaccatgcttggcgcaaattaaagtttttaatgattacaatactttactgtaaagggattaatggctcttttaaaagaaaggttctcggccaggtgcagtggtgcacacctgtaatcccagctactcaggaggccgaggcactagaatctcataaacccaggaggtgaaggttgcagtgagccaggattgctccactgcactccaggctgggctacagagcgagactccatctcaaaaaaataaaaagaaaggttccctgccctaccccctaggaccccatagctccagctacggcccaaggctggggcaggaatatctcttgaggccaggtagattctagactgaatagccactgtactacagctgactggactagatctgaattccatttagctgttaaatgggcaattcgaactagtaatttgaccaaaattacatgcagggtaagaaaactagttcattatcttagtgaaagaaatagcttctacaccttcattttacatgtaaaattgtatttgaagaatgcagctgtatatgcctcacctgtaccatttaaataaaactatttaaacattttattacaggttctaaatgagaagaaacttcaagaggttgatagtttatggaaagaatttgaaactccagagaaagcaaacaaaatgtaagtactcttgaaatcaataatttagcagttaacatttagggcttgttttattttttacatttttccctgatttatataatgttacattcgtagttttctgttttgaaatctgtttcaggaataattttggtatgaacctaattattacaaatgttttacttggaatataggccatctcaattaatttgaaggcagtagtctcccccttacccacagggattatgttccagaagaccctgtggatactttaaacctcggatagtaccaaatgtgattgctgtcagtaggaacacatttgtcttcgtgtcttccacacacaaatgtaataccttttttatcttaactaagcacttaccgcacacaggggttgtaacctgctttttgagttttgcaacatcaaaactagcatgaactactttttctttcatcacaatttcatggaagattcattcttagtgtagatgttaaatctttggtttttttgtttgttt

SEQ ID NO: 13051 - DNA, 793 bp, Homo sapiens
agttccagtacagcgtggagggtttaggcagcgtgttctgattctttgcgggacggcgagcgcatttgtgctttgcccgccgcggcctaggaggccttttgaggccgcgtagtcggtgtttttgaactgactctacagcttctggcaggccgtgcggcgccctgacccggcctcaccatgttggtgctgtttgaaacgtctgtgggttacgccatctttaaggttctaaatgagaagaaacttcaagaggttgatagtttatggaaagaatttgaaactccagagaaagcaaacaaaatgtaagtactcttgaaatcaataatttagcagttaacatttagggcttgttttattttttacatttttccctgatttatataatgttacattcgtagttttctgttttgaaatctgtttcaggaataattttggtatgaacctaattattacaaatgttttacttggaatataggccatctcaattaatttgaaggcagtagtctcccccttacccacagggattatgttccagaagaccctgtggatactttaaacctcggatagtaccaaatgtgattgctgtcagtaggaacacatttgtcttcgtgtcttccacacacaaatgtaataccttttttatcttaactaagcacttaccgcacacaggggttgtaacctgctttttgagttttgcaacatcaaaactagcatgaactactttttctttcatcacaatttcatggaagattcattcttagtgtagatgttaaatctttggtttttttgtttgttt

SEQ ID NO: 13052 - DNA, 3756 bp, Homo sapiens
gatggcgtcaccttctggcgccgccggttggtttccctggcaactggagcaatcagagcaccgcagccagggagatgctggcgagacgacagcgagatcctctccaggccctgcggcgccgcaatcaggagctgaagcaacaggttgatagtttgctttctgagagccaactgaaagaagctctagaacccaataaaagacaacatatttatcaaagatgtatccagttaaagcaggcaatagatgaaaataaaaatgctcttcaaaaattaagcaaagctgatgaatctgcacctgttgcaaactataatcagagaaaagaagaggagcatactcttttggacaagcttacccaacaactgcagggccttgctgtgacaataagcagagaaaatataactgaagttggggcacctactgaagaagaggaagaaagtgaaagtgaagatagtgaagacagtggtggggaggaagaagatgcagaggaggaagaggaagagaaagaggaaaatgaatctcacaaatggtcaaccggtgaagaatacatcgctgttggagattttactgctcagcaagttggagatcttacatttaagaaaggggaaattctccttgtaattgaaaaaaaacctgatggttggtggatagctaaggatgccaaaggaaatgaaggtcttgttcccagaacctacctagagccttatagtgaagaagaagaaggccaagagtcaagtgaagagggcagtgaagaagatgtagaggcggtggatgaaacagcagatggagcagaagttaagcaaagaactgatccccactggagtgctgttcagaaagcgatttcagaggcgggcatcttctgtcttgttaatcatgtctcgttttgctacctaatagttctgatgcgaaataggatggagactgtggaagacaccaatggatctgaaacagggttcagggcatggaatgtacagagcagaggacgtatatttctggtttctaagcctgtgctccaacagataaacactgttgatgtgttaactacgatgggagctattcctgcagggttcaggccttccacgctctcacagcttctggaggaagggaatcaatttcgagcaaattacttcttacaaccagagctcatgccttcacaactggccttcagagatctgatgtgggatgctacagaaggcactattaggtcgagaccaagtcgtatttcattgattctgacattatggagctgtaaaatgattcctcttccaggaatgagcatacaggttctcagcagacatgtacgcctctgtctatttgatggtaataaggttctgagcaacattcatacagtcagagccacatggcaacctaaaaagcccaaaacatggaccttttctccccaggttactcgcatcttaccatgtttgcttgatggtgattgctttatcaggtctaattctgcatctccagatcttggaatattatttgaacttggaatttcttatattcgcaattcaactggtgaaagaggagagttaagctgtggctgggtgtttcttaaactttttgatgccagtggagttcctattccagcaaaaacttatgagcttttcttgaatggtggtactccttatgaaaaaggtattgaagtggacccttcaatatccagaagagcacacggcagtgttttctaccagattatgacaatgagaaggcagcctcaacttctagtgaaactgagatccttgaacagaagatcaagaaatgtactaagtctactgccagaaacattaattggaaatatgtgttctattcacttgttgatattttatcgacaaattcttggagatgtgctcctgaaagacaggatgagcttgcaaagtactgatttaattagccatcccatgctggccaccttccccatgctcttggagcagcctgatgtgatggatgctctcaggagttcgtgggctggaaaagaaagcacattaaaaagatcagagaagagagacaaagagttcctgaagtccacgtttctcctggtttaccatgactgcgtgctcccacttctccactccacacgcctacccccattcaggtgggcagaagaagagactgagactgcacggtggaaagttatcactgacttccttaagcaaaaccaagaaaaccagggcgccctccaagctctgctgtcaccagacggagttcatgaaccttttgacctttcagagcagacctatgacttcttgggtgaaatgagaaagaatgcagtgtgacagtggcagcctctagccctcagcttcccacggaatcagatggatcctccacgattacgtgaataaaatgatggaaccaaaaatcactgtcactttacaacttaggttttactcttttctttctacagaccatatttttaaagaaatgtttatacaataatttaaatattttttaaaaccataaaataaatttttataaggaatactgttatatctaaatttaaacagtatttattttttcaaaaacagctacttaagttaatggtatagatttctataaaagcaagattttgtcaaaaactaaatttatgattattcaagaaagtgaaaaaaacaacctacagaatgggaaaacatatttgcaaatcatctaactgataaaggtctagtatccaaaatatttaaatttatgagtgttaataaaatttatcttgttcaatgaagaggaagttaaagtgatccatttgagaaagttgtatcacttaattcagtctgatacttgaatgtgatttacccctaattaagtacaaaaacagagtcgcttttgccttttcaaatcaagaaaataagtgctctgtcaaaagcacaaaaagaaactttcaggcactggagagtggagtcgactcaccctttcaggccttgttgcatctcagataaacctgtgactgctggtaaaataatgtcccaagcctttccttttagtgataaacagtagcagcctgcgttaattgagcacctactgtgtgtctgagcatttctcattagcccagttaatcctcacacctactgtaggagataggtactgttgttttttattaccgccgaagaaacaggccagataagtgaagtaatttgcctaaggtcacagctaataagtggcacagctaatattcccagtaaagataccatgtataattttctacaacctaagatgttctgccttatcggggcgaaccttttaggattccatgtgaaaataaaatatgaggaaaagtttaacctaaataattagaatcccattagaggtacttttttttgatggcatgctgccttaaaagagccatttatttttagagatctgtcatattatgaaagttctgggctatcttagctaacttatcctaaacccttaacctaaatttaacttgagccccagtctcagaaattaacatggtatgaaggtgtttccaggccaggcgcggtggctcacgcctgtaatcccaacactttgggaggccgaggtgggtggatcacctgaggtcaggagtttgagaccagcctggccaacactatctgtactaaaaacacaaaattagctgggcgtggtagtgcgtgcctgtaatcccagctacttgggaggctgaggtagaagaattgtttgaacctgggaggtggaggttgcagtgagccaagatcgtgccattgcactccagcctaggcaacaagagtgaaactccatctcaaaaaaaaaaaaaaaaaa

SEQ ID NO: 13053 - DNA, 1932 bp, Homo sapiens
ggagatgctggcgagacgacagcgagatcctctccaggccctgcggcgccgcaatcaggagctgaagcaacaggttgatagtttgctttctgagagccaactgaaagaagctctagaacccaataaaagacaacatatttatcaaagagttggggcacctactgaagaagaggaagaaagtgaaagtgaagatagtgaagacagtggtggggaggaagaagatgcagaggaggaagaggaagagaaagaggaaaatgaatctcacaaatggtcaaccggtgaagaatacatcgctgttggagattttactgctcagcaagttggagatcttacatttaagaaaggggaaattctccttgtaattgaaaaaaaacctgatggttggtggatagctaaggatgccaaaggaaatgaaggtcttgttcccagaacctacctagagccttatagtgaagaagaagaaggccaagagtcaagtgaagagggcagtgaagaagatgtagaggcggtggatgaaacagcagatggagcagaagttaagcaaagaactgatccccactggagtgctgttcagaaagcgatttcagagataaacactgttgatgtgttaactacgatgggagctattcctgcagggttcaggccttccacgctctcacagcttctggaggaagggaatcaatttcgagcaaattacttcttacaaccagagctcatgccttcacaactggccttcagagatctgatgtgggatgctacagaaggcactattaggtcgagaccaagtcgtatttcattgattctgacattatggagctgtaaaatgattcctcttccaggaatgagcatacaggttctcagcagacatgtacgcctctgtctatttgatggtaataaggttctgagcaacattcatacagtcagagccacatggcaacctaaaaagcccaaaacatggaccttttctccccaggttactcgcatcttaccatgtttgcttgatggtgattgctttatcaggtctaattctgcatctccagatcttggaatattatttgaacttggaatttcttatattcgcaattcaactggtgaaagaggagagttaagctgtggctgggtgtttcttaaactttttgatgccagtggagttcctattccagcaaaaacttatgagcttttcttgaatggtggtactccttatgaaaaaggtattgaagtggacccttcaatatccagaagagcacacggcagtgttttctaccagattatgacaatgagaaggcagcctcaacttctagtgaaactgagatccttgaacagaagatcaagaaatgtactaagtctactgccagaaacattaattggaaatatgtgttctattcacttgttgatattttatcgacaaattcttggagatgtgctcctgaaagacaggatgagcttgcaaagtactgatttaattagccatcccatgctggccaccttccccatgctcttggagcagcctgatgtgatggatgctctcaggagttcgtgggctggaaaagaaagcacattaaaaagatcagagaagagagacaaagagttcctgaagtccacgtttctcctggtttaccatgactgcgtgctcccacttctccactccacacgcctacccccattcaggtgggcagaagaagagactgagactgcacggtggaaagttatcactgacttccttaagcaaaaccaagaaaaccagggcgccctccaagctctgctgtcaccagacggagttcatgaaccttttgacctttcagagcagacctatgacttcttgggtgaaatgagaaagaatgcagtgtgacagtggcagcctctagccctcagcttcccacggaatcagatggatcctccacgattacgtgaataaaatgatggaaccaaaaa

SEQ ID NO: 13054 - DNA, 2752 bp, Homo sapiens
ggggctgggaggcgggcgcacatcgatggcgtcaccttctggcgccgccggttggtttccctggcaactggagcaatcagagcaccgcagccagggagatgctggcgagacgacagcgagatcctctccaggccctgcggcgccgcaatcaggagctgaagcaacaggttgatagtttgctttctgagagccaactgaaagaagctctagaacccaataaaagacaacatatttatcaaagatgtatccagttaaagcaggcaatagatgaaaataaaaatgctcttcaaaaattaagcaaagctgatgaatctgcacctgttgcaaactataatcagagaaaagaagaggagcatactcttttggacaagcttacccaacaactgcagggccttgctgtgacaataagcagagaaaatataactgaagttggggcacctactgaagaagaggaagaaagtgaaagtgaagatagtgaagacagtggtggggaggaagaagatgcagaggaggaagaggaagagaaagaggaaaatgaatctcacaaatggtcaaccggtgaagaatacatcgctgttggagattttactgctcagcaagttggagatcttacatttaagaaaggggaaattctccttgtaattgaaaaaaaacctgatggttggtggatagctaaggatgccaaaggaaatgaaggtcttgttcccagaacctacctagagccttatagtgaagaagaagaaggccaagagtcaagtgaagagggcagtgaagaagatgtagaggcggtggatgaaacagcagatggagcagaagttaagcaaagaactgatccccactggagtgctgttcagaaagcgatttcagaggcgggcatcttctgtcttgttaatcatgtctcgttttgctacctaatagttctgatgcgaaataggatggagactgtggaagacaccaatggatctgaaacagggttcagggcatggaatgtacagagcagaggacgtatatttctggtttctaagcctgtgctccaaataaacactgttgatgtgttaactacgatgggagctattcctgcagggttcaggccttccacgctctcacagcttctggaggaagggaatcaatttcgagcaaattacttcttacaaccagagctcatgccttcacaactggccttcagagatctgatgtgggatgctacagaaggcactattaggtcgagaccaagtcgtatttcattgattctgacattatggagctgtaaaatgattcctcttccaggaatgagcatacaggttctcagcagacatgtacgcctctgtctatttgatggtaataaggttctgagcaacattcatacagtcagagccacatggcaacctaaaaagcccaaaacatggaccttttctccccaggttactcgcatcttaccatgtttgcttgatggtgattgctttatcaggtctaattctgcatctccagatcttggaatattatttgaacttggaatttcttatattcgcaattcaactggtgaaagaggagagttaagctgtggctgggtgtttcttaaactttttgatgccagtggagttcctattccagcaaaaacttatgagcttttcttgaatggtggtactccttatgaaaaaggtattgaagtggacccttcaatatccagaagagcacacggcagtgttttctaccagattatgacaatgagaaggcagcctcaacttctagtgaaactgagatccttgaacagaagatcaagaaatgtactaagtctactgccagaaacattaattggaaatatgtgttctattcacttgttgatattttatcgacaaattcttggagatgtgctcctgaaagacaggatgagcttgcaaagtactgatttaattagccatcccatgctggccaccttccccatgctcttggagcagcctgatgtgatggatgctctcaggagttcgtgggctggaaaagaaagcacattaaaaagatcagagaagagagacaaagagttcctgaagtccacgtttctcctggtttaccatgactgcgtgctcccacttctccactccacacgcctacccccattcaggtgggcagaagaagagactgagactgcacggtggaaagttatcactgacttccttaagcaaaaccaagaaaaccagggcgccctccaagctctgctgtcaccagacggagttcatgaaccttttgacctttcagagcagacctatgacttcttgggtgaaatgagaaagaatgcagtgtgacagtggcagcctctagccctcagcttcccacggaatcagatggatcctccacgattacgtgaataaaatgatggaaccaaaaatcactgtcactttacaacttaggttttactcttttctttctacagaccatatttttaaagaaatgtttatacaataatttaaatattttttaaaaccataaaataaatttttataaggaatactgttatatctaaatttaaacagtatttattttttcaaaaacagctacttaagttaatggtatagatttctataaaagcaagattttgtcaaaaactaaatttatgattattcaagaaagtgaaaaaaacaacctacagaatgggaaaacatatttgcaaatcatctaactgataaaggtctagtatccaaaatatttaaatttatgagtgttaataaaatttatcttgttcaatgaagaggaagttaaa

SEQ ID NO: 13055 - DNA, 2246 bp, Homo sapiens
agcaatcagagcaccgcagccagggagatgctggcgagacgacagcgagatcctctccaggccctgcggcgccgcaatcaggagctgaagcaacaggttgatagtttgctttctgagagccaactgaaagaagctctagaacccaataaaagacaacatatttatcaaagatgtatccagttaaagcaggcaatagatgaaaataaaaatgctcttcaaaaattaagcaaagctgatgaatctgcacctgttgcaaactataatcagagaaaagaagaggagcatactcttttggacaagcttacccaacaactgcagggccttgctgtgacaataagcagagaaaatataactgaagttggggcacctactgaagaagaggaagaaagtgaaagtgaagatagtgaagacagtggtggggaggaagaagatgcagaggaggaagaggaagagaaagaggaaaatgaatctcacaaatggtcaaccggtgaagaatacatcgctgttggagattttactgctcagcaagttggagatcttacatttaagaaaggggaaattctccttgtaattgaaaaaaaacctgatggttggtggatagctaaggatgccaaaggaaatgaaggtcttgttcccagaacctacctagagccttatagtgaagaagaagaaggccaagagtcaagtgaagagggcagtgaagaagatgtagaggcggtggatgaaacagcagatggagcagaagttaagcaaagaactgatccccactggagtgctgttcagaaagcgatttcagagataaacactgttgatgtgttaactacgatgggagctattcctgcagggttcaggccttccacgctctcacagcttctggaggaagggaatcaatttcgagcaaattacttcttacaaccagagctcatgccttcacaactggccttcagagatctgatgtgggatgctacagaaggcactattaggtcgagaccaagtcgtatttcattgattctgacattatggagctgtaaaatgattcctcttccaggaatgagcatacaggttctcagcagacatgtacgcctctgtctatttgatggtaataaggttctgagcaacattcatacagtcagagccacatggcaacctaaaaagcccaaaacatggaccttttctccccaggttactcgcatcttaccatgtttgcttgatggtgattgctttatcaggtctaattctgcatctccagatcttggaatattatttgaacttggaatttcttatattcgcaattcaactggtgaaagaggagagttaagctgtggctgggtgtttcttaaactttttgatgccagtggagttcctattccagcaaaaacttatgagcttttcttgaatggtggtactccttatgaaaaaggtattgaagtggacccttcaatatccagaagagcacacggcagtgttttctaccagattatgacaatgagaaggcagcctcaacttctagtgaaactgagatccttgaacagaagatcaagaaatgtactaagtctactgccagaaacattaattggaaatatgtgttctattcacttgttgatattttatcgacaaattcttggagatgtgctcctgaaagacaggatgagcttgcaaagtactgatttaattagccatcccatgctggccaccttccccatgctcttggagcagcctgatgtgatggatgctctcaggagttcgtgggctggaaaagaaagcacattaaaaagatcagagaagctctcaaagcctgtatcaccaagagaagggaaaaaaaaatggcctgagctgtaccatatattgaaaacaatgcattgctcctgcttaccttgctataaaatcatgagagacaaagagttcctgaagtccacgtttctcctggtttaccatgactgcgtgctcccacttctccactccacacgcctacccccattcaggtgggcagaagaagagactgagactgcacggtggaaagttatcactgacttccttaagcaaaaccaagaaaaccagggcgccctccaagctctgctgtcaccagacggagttcatgaaccttttgacctttcagagcagacctatgacttcttgggtgaaatgagaaagaatgcagtgtgacagtggcagcctctagccctcagcttcccacggaatcagatggatcctccacgattacgtgaataaaatgatggaaccaaaaa

SEQ ID NO: 13056 - DNA, 26959 bp, Homo sapiens
ctggagcaatcagagcaccgcagccagggagatgctggcgagacgacagcgagatcctctccaggccctgcggcgccgcaatcaggagctgaagcaacaggtatggtcaggctgtgcagagggccctggggcgggcgacaggcggacgcagctgcgcgcactgcgccttcccaccgtgaccccacctaatcctgggagcttgcccccaacctacttaccttcccaggttgtaacgcccccttaccccataacattccagcacccaaccccgattcaaacccctcctgatcccaactcaacccccagccaaaggcgaaacctcccaaaattcgtgaccatcaactaagcgccccctcctccgaccctcactcccacctaacgtctcaacctcctaccctaacaactcactaacccaccttatctcccaatctaaacttagtggtgtaaccatttccaacccaactctgagcctagctcctctcctccactttccaagcccatttcctttcagccttcctcaagtggagattattattgcctccgtgaactcaagcgaaataggtgtcaagaaatagtcttaatatgcaagaacattaagatctgataaatgagcaaaggaggtgaacgagagaggaaatacaagtaactcataaacatacgaggaatgttaacttcaaagatactcaagtaattgcaaagcacataaggtatcacaaaaatgttaaaaatcacaacactctgtcttgaggaaggtgtgatgaagcaggcacattcactgctcccgtgtataaggtgcttgtacagcatttcaggaaagcagcttgacaaggtgtaacatatgtgtatgcacctaggctcaaaaattacatttccagggatctgctatgtgtaataattagaaagtaggacagagattgatgtataaaagtattcatcacattgttacttatataatatacacagaacagcatagaagggaacaggctaatatggtatttctgtgtgacaggatgctgatgattattatgattttctttattctttttcatatttataaaaatttttaggccaggtgtggtggctcatgctagtagtaccagctacttgggaggctgagacaggaggatcacctgagcccaggagttcgagactagcctgggcaacataacaagacttggtctcaaaaaaaaaaaaactttttaaaaatacactgagttcttattaaaaataagaaaaaagtaaatagcaaccagtgggtttattttctgacattttaatttcactttaatttttttcatgtgatctattaccaagtatttttccactgagtaaaattattttataatctgaggccggtaagagattcactgatgctcatattttatccatttttgttctcttgtttaaagtaaaaaggatttggaaggtaaatatttaggtgactgtgtattggaatcacagtggtgcaacaaaagctaaatactcttctggtagaaataaaaaataaaacttgatggggcattgacttatgctgaacttcggtggatcttaatatggttctgtgtcttattttaaaatttcaacttttattttagattcagggggtacatgtgcaggtctgtcacatgggaacactgtgttatgctgaggtttggggtacagatgagcctatcacacaagcagtgagcacagtacccaataggcagtctttcagtcttcattcctcttccctcccccaccccactccagcagtcaccagtgtccattgctcccatctttatgtccatgtgtactcaacgagtgagaacatatggtatttggttttctgttcctatgctaattcacttaggacaatggcctccagctccatccatgttgctgcaaaggacatgatttcattcttttttatggttgcatattttttcatggtgtatatgtaccacattttctttatccagtccaccattggtgggcatctatgttgattccatgtctttgctattgtgaatagtgctgtagggaacatacacatgcatgtgacattttggtagaatcatttcttttttgggggtatatacacggaaatgggatttctgggtcaaatgatagttctgttttacgttgtttgggaaatctccaaactgctttccacagtggctgaactaattttcatgcccaccaacagtgtatatgtgtactcttttcttgtcagcctcaccagaatctgtcatttcttgattttttaataatagccattttgaccagtgtgagatggtacctcattgtagttttaatttgcatttctctgatgattagtcatgatgagttaattttaaatttagtgggacattaggagaaccaggaaaagttttagaaggaaactataaaaatgattattaaaacaaactattagaaagattattctccctggagaaatattggctctggagccttttgataccttgactatctggaaagtttgttttgatagtattagctaattcttccctgtcttcacagaggacacctgaagctgaatatggaacagattttctattcggtgtctgtaggacaagtaatcaacagcccctctgagtcaggcctgtgatgactggctctatcactaggtgtgtgaattttgtaaataacactcagatggatgccaaattgcaagagtagagaagaaactaatggaattttctcttttttcatccactttatcttctctacgtaatctatagaaaacagaccaaagaagtatgtgcctttttggagagtatattgacaaagttacatatagtgttagtaaacaaactactaagtcaagagaaacaaagtcatgatacattcaatacaatggataccactcagtaatgagaaggaatgaactaatggtacacacaacaatatggaagtatctcaaaaacatgctttgtggaaaggttacacaagagtgcttactgtatgagtccatttatataaaatttcaagaacaggcaaaactaatttatgttggaaaaatatcaaaacaggtttgtctgtggaggaataaggaggggatttactggcaagggcatgagggaacttactagggtgatggtagttttctacatcttgataagaattttggttacacagatgtatgcatttgtcgaaactcagcaaatgtatgcctcgtatttgtgcatttcactatatacatattttacatcaactattgaactttagttagtgacatccatagtccattatttagggagaaatgtattgataactgcaacttactttgaaaggcataaggtgggttgacggatagatcaaataagtatagtataatgttaatgttttttctaggtagcgggtatatgggttttcactgtaaaatttttaaaactttgttgtatgtttaaaagtgttcattataaaatattggataaaaaaagaagttttctttcctaaggcgatatggtatttaataatgtgatattttaaatggtctccataggttgatagtttgctttctgagagccaactgaaagaagctctagaacccaataaaagacaacatatttatcaaaggtaaagtatgctaaattatataagctttacaggaaccgcacttacatttcaatgcatagtatttaaggcatagagattggtcctttggaatcaaatggaagaatcacatagtgttgtaagttgaatgtagaagaaaccaacctaaacctgatggttgcggacttgctgttgtgacagcaactataaaaactgcttaatgtaaacataggtgacatgggcaggattaccctaaatccttagcctatgtagcccagatcctgtgacctggtcagaaacctctgtctataagcaattagtacttcattgggatgtcaactttaactcccatgagaagacaacactgttttctaggtgggtgttttttgttttgtatttgtttttacttaaaaaaaaatccttgggagagtttaaatagacgtgatgaactacatcaaatttagactattaattcataacatttgtattaagtttaggacatcattaagataatctttgtttttgagatatttaaggattttattacattccaaagaacatgagattcattctattaatttaagtgaattgtaattgtttggagaagttttacttaagtcaggcattcagagtgcttaaaggcaaaacaaatgaattttgaaatgtcaaatgaatttaatttataatagtaggattgattaagggatttagttcaagctgaattaacagtaatgaaagaaaagcaaaggttattgttcttgctttactagatttaaaaacagagtaagatttatagactgaatttgaaggccaagggaaaactacgtttttaaattttatgttagtaaactaaaaatcataattattattattttattttttgagactaaatctcactctgtcacccaggctggagtgcagtggcgcaatctcggctcattgcaacctgcacctcccaggttcaagcgattcttctgcctcaggctcttgagtagttgggattacagtcgtgccccaccacacctggctggattttgtattttgagtagagatgggtttcatcacgttggccaggctggtttcgaactcctgacctcaagggatcccccagccttggcctcccaaagtgctgggattataggtgtgagccactgtgcccagcctaataattgttatgttttattttttttgagatagagtctctctctgtcgcccaggctggagtgcagtggcatgatctcggctcactgcaagctccacctcccaggttcaagcgattctcctgcctcagcctcccgagtagctgggattacaggtgcccgccaccatgcctggctaattttttgtatttttagtagagatggggtttcaccgtgctagccaggatggtctcaatctcctgacctcatgccccctgctttggcctcccaaagtgctgggattataggcgtgagccaccgcgcccggcccctaataattatttttaagcccaagtaaccatagtcttctctgtgcatgaaaagaagattgttactgtcatttaaaaactcactttgacatttgcatatctgaaaatgtcatttaggtatcatttttatctgctcagtgctctgagtcttttcagtttgaaaactcatgtctcatgagctctgggagattttattttacaaaaagattatttcgttaattccatttgtctgtttcttcctgaaacacctttgagtcaggtattggatatcctggactgatcctctatatcccataacttcctgttaatagtttctgtttctttgtttgtatgggagatgtttttttggggggatgtggggggtctcactctgtcgttcaggctgtaatgaagtggcacaatcatggctcactgcaccttctgcctcccaggctcaagggatgcccccctcccccgccacgagctaccatgctagcaattctcttgactttaacacttttctttattacctatttcaacagccatattgttttatttcagcagtcatattggtttttttttttttaagatggagtctcactctgtcatgatcttggctcactgcaacctctgcctcctgggttcaagcgattctcctgccttagccttctgagtagctgggattacaggctcacgccatcacactcggctaattttttgtatttttagtagagacggagtttcaccatgttggccaggctgctctcaaactcccgacttcaggtgatccacccatcatggcctcccaaagtgctgggattacgtgagccaccgtgcctggccatcatcagtcatgttgttaatttacaagtgttttctcttgttctcgaattgttcttttttcatagcatcatgttcctgttttcatattgattgccttcttactacttccatgactaggaggctttttttttctccttaagttctcttctgttctctgaattgtctttgctttctctgggctcagattccttttaattagttaattaattaatttatatttggttattcttaaattttatcttcacgttgccggttttctttattaggtctggcttatctatttttattgaacaatgagggactaggttgattattccagagagctctcatgggcttttctactgttagatagagaggggtccttcctgctagtaccatcccctgaataagaatgaaattttgtatgttgatagggcttatcagaggctcggaagtagcttttagtctgaggatcccccagtgccagaatagggccggctctaaccctggtgtatgggaaacttctttagcagtcatgattctcttcaggtcgtttgttaattgtttttgtttgtttttttgtttttagggaagaatcccctggtaaggagggagagcagagaggggaaaagggagctaactggctcaggttttctgtaaatagacttttaaaagaaagaaccccaactaaatctaaacgtaatcagtatcattaatcttcccttgactaatataaagaccttagattgctttaacattgatttccctcctcaaagcttagatgtatgcatatgatttaatttacacaatataacacaataatattagataatttataaagtaaaccccagccactgtgcatgtcttttcatcagcagaatttcataatgtgtccctctatgatttagtttagttaacctttggtcctttatgtctgctgactcaagtcctagagttttcggcctggcagattatctccctcttatgcttgtgttgcgtcttccaccctttataggagaacatgcttccagcctttttccatggagcagaaatttgttgaaatctcttgctggctagttgtccttctttccttctttgcagtgttcagagtttgttaccttttcaaacgttttaatcattttttgtggggtttcaggagccagtgaagatgaatgtgtgcttagtttttatcctgaaccaggagtcttaaaatatcaactgtttgaggattttaataattacatagttataaaggaggtaattgtaataagtaatttattttcttggtacattatattaaaatagttttccactctgggctttaagcgaaatttctgagtctaagtttcagtagagatttttttggtcaagtaacatgacacctgccaaaataagcggctttactgtcagtctcatttgacaaaagcctgcagctaggttctctcagggtggattcatggcttgtgatatcctcaaagaccagcctttgatgtcattccactctgccatcctttgcttgttggtgatgtctctcctcatggttacaaagtccataccctcagtatctaagagcagatgtaggagagattcttttcatgcctggtaagggaggataaaatgggaggcaatcccaatatacgtgttttatgttacactggcagccgtgggccccctgctcaccctgcctgcagtggaggctgagaacataggtgccagtgggaagctgactgccagcaaagaggaagggtgggaaaggggcttttggggaggttgctagtagggtcagccccagtttgatgtttccccttctcttttgctacccttttgacaaaggacttttgttccctttaaaacgttttttatttattactgttttttatttttttctttaagttcagggatacatgtatggcattgtgcaggtttgttacataggtaaacgtgtgccatactggtttactggacagatcatcccatcacctaggtattaagccctgcatccattaattattcttcctgatgctctccctcctctaatacctccttcctacaggccccagtgtatgttgttaccctccttgtgtccatgtgttctcatcattcagctcccacttataagtgagaacatgcggagtttggttttctgttcctgcattagtttgctgaggataatgacttccaactgtaaccatgtccctccaaaggacatgattttgttcctttttatggctgcacagtattctatgagaacatgcagtgtttggttttctgtccttgtgataatttgctcagtatgatggtttccagcttcatccatgtcccttcaaaggacatgaactcatcattttttatggctgcatagtattccatggtgtatatgtgccacattttcttaatccagtctatcattgttggacatttgggttggttccaagtctttgctattgtgaatagtgccacaataaacatatgtgtgcatgggtctttatagcagcatgatttataatcctttgggtatatacccagtaatgggacagttgggtcaaatggtatttctagttctagattcctgaggaatcgccacactgacttccacaatggttgaactagtttacagtcccaccaacagtgtaaaagtttcctatttctccacatcctctccagcacttgttgtttcctgactttttaatgatcgccattctaactggtgtgagatggtatctcattgtggttttgatttgcatttccctgatggccagtgatgatgagcattttttcatgtgttttttggctgcataaatgtcttcttttgagaagtgtctgttcatatcctttgcccactttttgatggcgtcgtttgtttttttcttgtaaatttgtttgagttcattgtagattctgtatattagccctttgtcagatgagtagattgcaacaattttctcccattctgtaggttgcctgttcactctgatggtagtttcttttgctgtgcagaagctctttagtttaattagatcccatttgtcaattttggcttttgttgccattgcttttggtgttttagacatgacgtccttgcccatgcctatgtcctgaatggtaatgcctaggttttcttctagggtttttatggttttaggtccaacatttaagtctttaatccatcttgaattaatttttgtataaggtgtaaggaaggcatccagtttcaactttctacatatggctagccggttttcccagcaccatttattaaatagggaatcatttccccatttcttgtttttgtcaggtttgtcaaagatcagatagttgcagatatatggcattatttctgagggctctgttctattccataggtctatatctctgttttggtaccagtaccatgctgttttggttactgtagccttgtagtacagtttgaagttaggtagcgtgatgcctccagctttgttcttttggcttaggattgacttggtaatgtgggctcttttttggttccatatgaacttaaagtagttttttccaattctgtaaagaaagtcattggtagcttgatggggatggcattgaatctataaattaccttgggcagtatggtcattttcacgatattgatacttcctacccatgagcatggaatgttcttccatttgtttgtatcctcttttatttcattgagcagtggtttgtagttctccttgaagaggaccttcacatcccttgtaagttggatttctaggtattttattctctttgtagcaattgtgaatgggagttcagtcatgatttggctctctgtctgttattggtatataagaatgcttgtgatttttgcacattgactttgtatcctgagactttgctgaagttgcctatcagcttaaggagattataggctgagacgatggggttttctagatatacaatcatgtcatctgcaaacagggacaatttgacttcctcttttcctaattgaataccctttatttccttctcctgcctgattgccctggccagaacttccaacactatgttgaataggagtggtgagagagggcatccctgtcttgtgccagttttcaaagggaatgcttccagtttttgcccattcagtatgatattggctgtgggtttgtcttagatagctgttattattttgagatacgtcccatcaatacctaatttcttgagagtttttagcataaagggttgttaaattttgtcaaaggccttttctgcatctattgagataatcatgtggtttttgtcgttggttctgtttatatgctggattacgtttattgacttgcgtatgttgaaccagccttgcatcccagggatgaagcccacttgatcatggtggataggctttttgatgtgctgctggatttggtttgccagtattttattgaggatttttgcatcgaggttcatcagggatactggtctaaaattctctttttttgttgtgtctctgccaggctttggtatcaggatgatgctggcatcataaaatgagttagggaggattccctctttttctattgattggaatagtttcagaaggaatggtaccagctcctccttgtacctctggtagaatttggctgtgaatccatctggtcctggactttttttggttggtaagctattaattattgcctcaatttcagagcctgttattggtctattcagagattcagcttcttcctggtttagtcttgggagggtgtatttgtcgaggaatttatccatttcttctagattttctagtttatttgcatagaggtgtttatagtattctctgatggtagttggtatttctgtgggatcggtggtgatatcccctttatcattttttattgcatctatttgattcttctctcttttcttctttattagtcttgctagcggtttatcaattttgttgatcttttcaaaaaaccagctcctggattcattaattttttgaagggtttttttgtctctatctccttcagttctgctctgatcttagttatttcttgccttctgctagcttttgaatgtgtttgctcttggttctccagttcttttaattgtgatattagggtgtcaattttatttctttcctgctttctcttgtgggcatttagtgctataaatttccctctacacacagctttaaatgtgtcccagagattctggtatgttgtggctttgttctcgttggtttcaaagaacatctttatttctgccttcatttcgttatgtatccagtagtcattccggagcaggttgttcagtttccatgtggtttagtggttttgagtgagtttcttaatcctcagttctagtttgattgcactttggtctgagagacagtttgttataatttctgttcttttacatttgctgaggagtgctttacttccaactatgtggtcaattttggaataggtgtggtgtggtgctgagaataatgtatattctgttgatttgggttggagagttctgtagatgtctattaggtccacttggtgcagagctgagttcaattcctggatatcctcattaactttctgtcccgttgatctgtctaatgttgacagtggggtgttaaagtctcccattattattatgtgggagtctaagtctctttctaggtctctaaggacttgctttatgaatctgggtgctcctgtattgggtgcatatatatttaggatagttacctcttcttgttgaattgatccctttaccattatgtaatggccttctttgtctcttttgatctttgttggtttaaagtctgttttatcagagactaggattgcaacccctgcctttttttgttttccatttgcttggtagatcttcctccatccctttattttgagcctatgtgtgtctctgtacatgagatgggtttcctgaatacaacacactgatgggccttgactctttatccaattttccaatctgtgtcttttaattggagcatttagcccatttacatttaaggttaatattgtcatgtgtgaatttgatcctgtcattatgatgttagctggttattttgctcattagttgatgcagtttcttcctagcctcgatggtcttcacaatctggcatgtttttgcagtggctggtaccagttgttcctttccatgtttagtgcttccttcaggagctcttttagggcaggcctggtggtgacaaaatctctcagcatctgcttgtctgtaaaggattttatttctccttcacttatgaagcttagtttggctggatatgaaattcggggttgaaaattcttttctttaagaagttgaatattggccgccattctcttctggcttgtagagtttctgctgagaggtcagctgttagtctgatgggcttccctttgtgggtaacccgagctttctctctggctgcccttaacattttttccttcatttcaactttcgtgaatctgacaattatgtgtcttggagttgctcttctcgaggagtatctttgtggcgttttctgtatttcctgaatttgaatgttggcctgccttgctagattggggaagttctcctggataatatcttgcagagtgttttccaacttggttcaattctccccatcactttcaggtacaccaatcagatgtagatttgatcttttcacatagtcccatatttcttggaggctttgtttgtttctttttattcttttttctctaaacttctctgtttgctttatttcattcatttgatcttccatcactgataccctttcttccagttgatcgaatcagctactgaagcttgtgcattcgtcacgtagttcttgtgccatggttttcagctccatcaggtcctttaaggacttctctgcattggttattctagttagccattcgtctaatcttttttcaaggtttttaacttgttttccacgggttcgaacttcctcctttagctcggagaagtttgatcatctgaagccttcttctctcaactcatgaaagtcattctccgtccagctttgttctgttgctggtgaggagctgcaatcctttgaaggaggagaggcgctctgatttttagaattttcagtttttctgctctgttttttccccatctctgtggttttatctacctttggtctttgatgatggtgatgtacagatggggttttggtgtggatgtcctttctgtttgttagttttccttctaacagtcaggaccctcagctgcaggtctgttggagtttgccggaggtccactccagacgctgtttgcctgggtatcagcagcagaggctgcagaacagcgaatattggtgaacagcaaatgttgctgcctgatcattcctctggaagttttgtctcagaggagtacccggctgtatgaggtgtcagtctgcccctactggggggtgcctcccagttaggctacttgggggtcagggacccacttgaggaggcagtctgtccgttctcagatgtcaagctgcatgctgggagaaccactactgtcttccaagctgtcagacagggacatttaagtctgcagaggtttctgctgccttttgtttggctatgccctgtccccagaggtggactctaaagaggcaggcaggcctccttgagctgcggtgggctccacccagtttgagcttccaggctgctttgtttacctactcaagcctcggcaatggctaacaaacagcctcgctgctgccttgcagtttgatctcagactgctgtgctagcaattagcgaggctctctgggcgtaggaccctctgagccatgtgcgcgatgtaatctcctggtgtgccgtttgctaagactgtgggaaaagcgcagtattagggtgggggtgacccgattttccaggtgctgtctgtcatccctttccttggctaggaaagggaattcccttgtcccttgtgcttcccgggtgaggcaatgcctcgccctgcttcagctcatgctcggtgtgctgcacccactttcctgcacccactgtctgatagtccctagtgagatgaacccagtacctcagttggaaatgcagaaatcattcatcttctgcgtcactcactctgggagctgtagactggagttgttcgtatttggccatcttggaaccgccccaagtgttcctttttctctgcaattttgccaacatctgtttttttgactttttaataatcaccgttctgactggcatgagatggtacttcactgtgctgaatgtgtgtcttttgagaagtgtcacttcatgtccttttgctcactttttaatggggtttttttttcttataaatttgcttatttttagactctggatattagacattcatcagatggatagattgtaaacattttcccccattctgtaggttgtctgttcattctgatgatagtgagaggtgacagcatgctggcagtcctcacagccctcgctcactcttggcgcctcctctgcctgggctcccactttggcggcacttgaggagcccttcagcctgccgctgccctgtgggagcccctttctgggctggccaaggccggagccagctccctcagcttgcgaggaggtgtggagggagaggcgcgggtgggaaccgggcctgcacacggtgcttgtgggccagcgtgagttccgggtgggcgtgggctccgtggactctgcacttggagcggccagccagccagccccaccggccctgggcagtgaggggcttagcacctgggccagcagctgctgtgctcaatttctcacccggccttagctgccttcccgcggggcagggctcgggaccttcagcccgccatgcctgagcctccccgccctctgtgggctcctgtgcggcccgagcctccctgacaagtgccaccccctgctccacagtgcccagtcccatcgaccacccaagggctgaggagtgcgggcgcacggtgtgggactggcaggcagctccacctgcagccctggtgcgggatctgctgggtgaagccagctgggctcctgagtctggtggggatgtggagaacctttatgtctagctaagggattgtaaatacaccaatcagcactctgtatctagctcaaggtttgtaaacacaccaatcagccccctgtgtctagctcagtgtttgtgaatgcaccaattgacactctgtatctagctactctggtggagccttggagaacctttatgtctagctcagggattgtaaacacaccaatcggcactctgtatctagctcaaggtttgtaaacacaccaatcagcaccctgtgtctaactcagggtttgtgaatgcacccatcgacactctatatctaactactctggtggggacttggagaacctttgtgtggacactctttatctagctaatctagtggggacctggagaacctttgtgtctagctcagggattgtaaacgcaccagtcagcaacctgtcagaacagactactcggctctctgtaaaatggaccaatcagcaggatgtaggtggggccagataaaagaataaaagcaggctgccggagccagcaatggcaacccgcttgggtccccttccacactgtggaagctttgttctttcgctgtttgcaataaatcttgctactgctcactctttgggtccacactgcctttatgagctgtaacactcaccgcgaaggtctgcagcttcactcctgaagtcagcgagaccatgagcccactgggaggaatgaacaactccagacgtgccgccttaagagctgtaacactcaccgtgaaggtctgcagcttcactcctgagccagcgagaccacgaacccaccagaaggaagaaactccaaacacatccgaacgtcagaaggaacaaactctggacacgccgcctttaagaactataacactcactgcgagggtccacggcttcattcttgaagtcagtgagaccaagaacccaccaattctggacacaatagtttcttttgctgtgcaaaagttctttagtttgatgagatcctatttgtcaagttttgcttttgttgcaattgcttttggctttttgttgtcatgaaatatttgcctgtgcctatgtcctgaatgctattgcttggattttcttctagagtttttatagttttgggttttacatttaagtctttaatctatcttgaattaatttttgtatatggtgtatggaaggggttctagtttcaattttctgcgtatagctagccagctcttccagcatcatttattaaatagggggccctttccgcattgcttgtttttgtcaggtttgtcaaagatcagatggttgtaggtgtgcaagtcttatttctgagttctctattctgttccattggcctatgtgtctgttcttttaccagtaccatgctgttttagttactgtagccttgtaatatagtttgaagttaggtggtgtgatgcctccagctttgttctttttgcttatttgggctcttcttttgttccatataaattttaaaatagctttttctaattctgtgaagaatgtcaatggaagtttgatgggaatagcattgaatctatacattatttggggcagtatgtccattttcacgatatgattcttcctatccacaagcatggaatgtttctccatttttttgtgtcacctctgatttctggagcagtgtttgtagttatccttgagaaggtccctctcactttctttgttagctgtattcctaggtattttattctttttgtagcagttgtgaatgtgagttcaggatttagctctctgcctgcctgttgttggtatataggaatgctagcaatttttgcacattgattttgtatcctgagactttgctgaggttgcttatcagcttaagaagtttctgggccaagacaatgggttttctagatataggatcatgtcatctgcaaacagggataatttgagttcctctcttcctatttgaatactccttatttctttctcttgcctgacttcccaggccagaacttccaacactgcattgaataggagcaatgagggagggcatccttgtcttgtgcctgttttcaaagggaatgcttcaagcatttgcccattcagtatgatattggctgtcggtttgtcatatatggctctgattattttgaggtatattccttcaatatctagtttattgaaatttcttaacatgaaaagatgttgaattttattgaaagccttttctgcatttattgagatagtcatttttttttgtcttaagttctgtttatgtgatgaatcacatttattaatttgtatatgttgaaccaaactttcatcctggggatgaagccaacttgatcatggtagataagctttttgatgtgctgctggattcggtttgccagtattttgttgcggatttttgtatcgatgttcatgaaggatattggctttaagttttctgtttttgctgtatctctcccaggttttggtatcgggaggatgctggatacaatcagttagggaggagtccctccttttcagttgtttggaataatttcagtagaaatggttcccactcttctttttacctttggtagaattcagctgtgaattcatctggtcctgggagtgttttggttggtaagctatttggtaaagctgcctcaattttagaactcattattgatctgttcagggattcaatttcttcctggttcagtcttgggagggtgtatgtgtccaagaactcatccatttcttctagattttctagttcatgtgcatagaggtgtttatagtattctctgctgattgtttgtatttctgtggggtcagtggtgatatcccccttataatttctgattgtgtttatttgattcttctctcttttctttattagtctagctagtggtgtatctattttattaatttttttcaaaaaaccagctcctgaatttgttctttgtagggtttttcatgtctctatctccttcagttcagctctgatcttggttatttcttgtcttctgctagctttagggtttgtttgctcttggttctctagttcttttagttgagatgttaggttgttaacttgagatctttctagctttttgatgtgggcatttagtgatataaattttcctctgaacactgctttagctgcatttcagagattctgatacgttgtctctttgttctcattagtttcaaagaacttcttgatttctgctttaatttcattatttacctgagtcattcagggacaggtggttattttccttgtagttgtgtgattttgactggatttctttctttctttctttcttttttttaaatgtgtctatcagaatgactttatttcagtacactgagccccatcaggcagtgtggtttgtgcaaggctgtgcgagggacaggcttgggctaagagaagggaggtgagttgttaagtgcactgcagtctgtggggtgctacatcgctttcacacacacctgctcctttggcccatacctggcaggggcctttggtcataggacagcatgggggagactactgcatggagtctgggattggggtgggtcatggtgtcacaggtgagggtgccggtgaagacaggctggccccagctttgcaccacctgggctaaaggcctttggactactcctaggagtcaggcctggctccattagctcctggcactctggtctggccctctccctccttaaccaagcaggtccaaggtcaagagtggcccaagatcagccaagagggggccatcccacctctacagcttagttgcctggtcagctatagtggcaaaaggcaacatggttaattgcagctttctccagtcctaaggacactggctctccaacaccccttccttgtttaggggcctctgccaaagaaaaattctacctcctgtttcagaaaatctaaccagcaaccagcctgttgattctatggcagtgagcaagagaaagagggagaaagaggctggtgggagtgtctttgagtatagctaccaatttcaaatggtcctgcaacctgtggacactgtccgcttaccatcagcagggagaggcggggccctggaggctaggctaagcttaggtgctataaacattagtgtggcagggcaggaggcagtgagctccctctctccatccccttactgaacaaacacttcaataaataaaactgtttgaagatggcattgcaacaagaacggatggaaagcaaggacctggaatcagcaggcaccttaaactctcccaaggcccctggaaggggaatgggctgggaacattatctctgcagccattcagggggagtactactcctgccctcctccagtggctggtgtggtcctgttccctggtgaacatgagggcttcctgctccctcctgactttccagtctctgtattagctcttgggatgcttttctagcctcccaaaccaaaatggcaacaaaaccagacagaggtcaaccccagccccagtcctcagtgcccagtcagggggcattgatagcggagtgaccagcaaggggaggcagcagctgcctgggtcctcagggcaccctggtgggtgggagtgagggtggggccagtccagcctaggatgggcagcagcaaggtctcccagggggtggtttatctccctctgtctccccgtggtagtaaacggagttccctgcagccagtcagaggcccacctgaggagggagtgcagcctctgccagtgttcttccctgtcaggagccagttaatggtcacccccaggcctcaggccatcaccatcgtgggtagttcctcatcctttctggacctggggtccctgggccacatggcacttgcatgtgctcacacacttgtatacacacatgcactcacacacacaggcaattcctcacaaacactctgactcaacaaagcgagttttaaagtggagttaacttcagagagaggtgaagatgatatcccaacattagaaggttttcctgtggatagatcaggcaccgtcttcctcatattccttcttggagacccacatcttcttaaaggtgtcatggaggcaaggatagagccctcaatccacgtggaatacagtctctcctgaggtgcaaatatcctgatcttcacttcactcagtagcctgtcaccaaaacctttgaacaaggtagagcctcccaagaggacgatgttggagaaaagtgtgaactgcaggtccatgtctgacttctggatggcgaacaccaggaccttgtggatgccttcactctcctccctgatcaagtctggcctgaagagcagctcaggggcccggaattgggaaggaccaatctcaatggtgctgccatcaggcaggtagtactgagccttctctgtctctagtgtctcttccttctgggggtttatggataggtaggagggtctttcttttatggccttgacaatctcaaactcaaaggatgagtggaaatctcaaacgatgagtggaaatcatagccctccttatgcaggtagaggtgcaggaagcgagagatgttccagcttgcgatgtcaattcgcatgatggagtggggcatggcaaagccctgatagatgggcacagcatgggtgatgccatccccagaatccagcaccacccccgtggtcctgcctgtggcataaaggctgagcacagcttacatggagatgaaaatagcaggcacattgaagctcttgaagaaaacgttggcagctcattcctggtgtctttgtgggtttaaaggtgcctcagtgaggagcacgagatgctcctctgagaaagtctgcagctggtccttagaatagacatattgccagatgtgttccatgtcgttccagtccttgacaatgccatgctccgtgagatagcagattgagagcagcccttggtgctccttggctttgaagccaatgaagatgtcaccttcaagggctcctgccatgatacgaatatgcatgggtaggcccacatactttggaaagcagtatttgtggatctgatcaccagcaaaaccagctttaatcacaccagattcattgtcgatcatgacaggctggttggtgattgtatcgtaagactccacggcagaggaatctctcctggggaaggaactaccagttgggtctgccgctagtgccattcatgaatttcttaatcttgagttctaatttgattgcattttggtctgtttgttataatttcagttctttttcatttgctgaggaatattttatttccgattacttgatcaattttagagtaagtgccttgtggtgatgagtagaatgcatattttgttgtttttgggtggagagttctgtagatatctattaggttcacttgatccagagctgagttcaggtcctgaatatctttatcaattttctgtgtggatgacctgcctaatattgtcagtggggtattaaagtctcccactattattgtatgggagtccaagtcactttgaaaatcataagaacttgctgtatgaatctgggttgccgagaccagctcggtcatggagaccctaacccagcggcgctagaggaattaaagacacacacacagaaatatagtgtgtggagtgggaaatcaggggtctcacagctttcagagctgagagcattgaacagagatttacccacatatttattgacagcaagccagtgataagtattgtttctatagattatagatttactaaaagtattccttacgggaaataaagggatgggccgaaataaaggggaggttctggctagttatctgcaacaggaacatgtccttaaggcacagatcgctcatgctattgtttgtggttcaggaatgcctttaagcagttttccgccctgggtgggccaggtgttcctttccctcattctggtaaacccacaaccttcaccatgggcatcatggccatcatgaacatgtcacagtgctgcagagattttgtttatggccagttttggggccagtttatggccagatttcggggtctcttcccaacatgggtgctctttttttgggtgcatatgtatttaggatagctcttcttgttgaattgaaccttttaccattgtgtaatgcccttctttgtcttttttttatctttattggcttaaagtctgttttgtcagaagctagaattgcaacccctgcttttttctgttttccatttgcttggtaaattttcctccatccctttattttgaacctatgtgtgtctttgcaaatgacgtggatctcttgaagacagcataccgatggatcttgactctttatccagcttgccattctgtgtctttttaattggggcatttaacccacttacatttaaggttagtattgttttgtgtgagtttgatcctatcatcattattctagctggttattttgcagatttgtttatgtggttgcttcatagtgtcactggtctgtgtacttcagtgtgtttttatagtgggtggtatcaatttctcctttccgtatttagtccttccttcaggagctcttgcagggcaggcctggtggtgacaaattccctaagcatttgcttggtctgaaaaggatcttatttctccttcatgtatgaagcttagtttggccggatttgaaattctgggttggaaatttcttttctttaagaatgatgaatattggtccccagtctctgctggcttatagggtttgggtttccactgagaggtatgctgttagtctgatgagcttccttttgtaggtgagctggcctttctctctggctgcctttaacttttttttttttcattttgaccttgaagaatcatgattatgtgtgttggggttgatcttctcatggagtaccttactggggttctctggatttcctgaatttgaatgttggcttgtcttgctaggttgggggaattcttctgtatgatattctaaagtatgtttttcaacgtggttccatttttcctgtcttttttaggtaccccaataagtcacgggtttggtctgtatacataatcccatatttctctaaggttttgttcattcattttcattcttttttccctattcttgtccgcctgtcttaattcagaaacataatcttcaagctctgagattctttcctctgccttgtctattctgctattgatacttgtgattgcattataaagttcttgtgtttttcacctctatcaggtcagttatgttcctctcttaattggctgttctggctatcagctcctgtattggtttatcatgattcttagcttctttgcagtgggtttcaacatactcctttaactcaacaaagttttttattacccactttctgaagcctccttctgtaagttcagccatctcagcatcatcccacttctgtgcccttgctggagtggtgttgtggtcatttggagcagaagaggcactctggctttttgagttttcagcattttgtgtcaattatttctcatctttgtgggcttatttgcctttgatctttgaggttgctgacctttaaataggatttttgttgagtttttattgttgatgttgttgttgttgttttctgtttgtttttcttttaacagtcaggacactctactgtagtgttgctgtggtttgctgtaccccagaccctaattgcctcagtttttcccatacctggaagtatcaccagtgaaggctgcaaaacagcaaatatggcagccagctccttcctctggaagctctgtcccaggagagtactgatttgttgccagcccaaacgcactttgtaggaggtggctggaaaccccttttgggaggtctcacccagtcaggtggaatgggattacagacccacttaaagaagcagtctggctgctttttggtagagcacatatgatacattaggaggggactctttcttctggaccatttgtattctccaaagccagcaggctagaatggctaagtctactgaaccccagagatagcagccacccctgccccggtaacttggaactgcctcagaaagattccagactgctttggttggctggctggaattccaagccagtgggtcttaacttgtgagttgccatggaagtgggggccatggaagtggggcccacggaacaatgctgcttggctccctggattcagctccctttctagggatatatacagatggatatccccccttgctggggatcttggggccagagtatataaaattcctgggtcactgtatgtgcctgagcagctgctctgctgagacaccacacagttctgtgtattggacccaaggccctggtggcatgaactcaggagatctcctgatctgtgggttgcagagatccgtgggagaaacatggttttctgggcagggttgcatggtcactcaccacttctcttggttggggatgggggttcctttggctgcatgccactcccaggttggctcttgttccccttgttccctggcttttctacattctcatgggtcaaggtgtttgccttgtcagtctcaatgtgagaacctggatatttcagtttaaagtgctgaattcacttgcccttcttcattcctctcagtgagtgccatagaccacagctgcttctaattggccatcttggatcaacgttgttattccctttttcactgcttatttcatttcactcacatctataagcaaaaaaaaaaaaaaaaaaaaaaagactcaaacggcataaaaaagtgacttttgtaggttattgtttagtaaagcatttgaattaaaaaaatctcatcatgagctatagctcatatttggtcattttttgtacttctcatttgggtatctaagacttaatgctgaattgaggcatctgtggaataaataaaactctggacctgtctggacaagcaagctcaaagcaggagtgtgctgtggtgggaataggccaactgtggaatcctaaactgccttcatattgttgctgtaccattgagcagctatgtggacttggtacacatagcttgagaagctatgtagaacttctctttctttaagtggagtgagggttgttatgaggcttaaatgaggtaatgtttgtaaactgcttaacatggttggcacacagtaaactttaggtactattatcagttttgtctctgaggctagttcctaggtttatggagttgtagagctggagaagcattttaaagtccagcgttcttccttattttagagagaggaaactgatgcccagagacactgaaggtttctgaggcttggttatcatgtctatgtgttttacagcttggctatgaggatcatctgagctaataggtggaaaagcatttatatgtcagttttttagtattgttcatacagtggctaattgccttgcctgctcaacgactgaatgattttataaaatagctttctggttctgataatagaaaaatcaatatattttcttttttttcttaatttagatgtatccagttaaagcaggcaatagatgaaaataaaaatgctcttcaaaaattaagcaaagtaagtattgaggttaatcacattattaaaacatctcttcctatacaagtatttttattaagtggaagttaattcaagttggtaagttcctgggtttacgttagtgatatagtctaactgcagccagtgctggcttgccgaacaggcttgctaagtctgtgcttgggagcaaagcaaaatccagggctccaactaccgaaaaatgttcagctttgatgaactcacctgctattaaggattcagacaatcctggaaggagctatttttatttttgcattttgtgagttgttttacagtttagaattatttttattttaatttctttgtggggaaataatgcataatctggccctgagggtaagtggtaaagaagcttcttgtatcaaatggcagctctgatatcaatgtctctgcagaaacaagaggaacaggaatttaaccttgacaatcccttcaggatttttttttttttttcacatgagccttggctacagctagatgtccaggtccagagactcatggagtctttaaagtggaaggcacctgaaagtcagctctccagctgtatattactcccctttactgcatctgagatatgtggtcactgaagagctcctccaaatttctccagtgacacaaaacttttcaacttagactgtttgaaaacctaattatttctgtttcacaggtgaggaaattgaagctctcagtggtgaagcatccatgcctcttctgtcaataagtggcagaacttgggattggtgcctgtctcattgactttaaagccgatcttctgtcagaacatatctcttactgactatggaaggtctataatacttagcaagaaaataaaagagaaacctaaaacaagtggtataattttattttttcatttggtttgcattccaacacaattgcctgtttcttttaaatctaatttatttccctaagataggtgtaatgtcacactgatatttactttgttatatagcacttattggaattttttgttgttcttttgaaattaggaaactgaaattaattttttagtgaaatagacctatattctctcataggctgatgaatctgcacctgttgcaaactataatcagagaaaagaagaggagcatactcttttggacaagcttacccaacaactgcagggccttgctgtgacaataagcagagaaaatataactgagtatgcttcctttctacctttcttttttcttttttaaagatatatcaccaatagctttaatgtttaactcaaagacatatagcagtatagatataaacaaatgacactaacaatagaatcagtcaacatttatttattgtgtataatagaaggtgttagatcccatgagagatggaaagaagtgtaagtcatagtctctgccctcaggcaatttataatttagttgaaacaaaacagagatctgaaaagctaaatgaacaaatgttagaaaataaagatgatatatttaatgtcaatgttgatgtgtaaaagggaaatgatttggaatgtctacttgcattgttctccctttcataaacattctttaaaaatttgaagcaaa

SEQ ID NO: 13057 - DNA, 742 bp, Homo sapiens
ctggagcaatcagagcaccgcagccagggagatgctggcgagacgacagcgagatcctctccaggccctgcggcgccgcaatcaggagctgaagcaacaggttgatagtttgctttctgagagccaactgaaagaagctctagaacccaataaaagacaacatatttatcaaagatgtatccagttaaagcaggcaatagatgaaaataaaaatgctcttcaaaaattaagcaaagctgatgaatctgcacctgttgcaaactataatcagagaaaagaagaggagcatactcttttggacaagcttacccaacaactgcagggccttgctgtgacaataagcagagaaaatataactgagtatgcttcctttctacctttcttttttcttttttaaagatatatcaccaatagctttaatgtttaactcaaagacatatagcagtatagatataaacaaatgacactaacaatagaatcagtcaacatttatttattgtgtataatagaaggtgttagatcccatgagagatggaaagaagtgtaagtcatagtctctgccctcaggcaatttataatttagttgaaacaaaacagagatctgaaaagctaaatgaacaaatgttagaaaataaagatgatatatttaatgtcaatgttgatgtgtaaaagggaaatgatttggaatgtctacttgcattgttctccctttcataaacattctttaaaaatttgaagcaaa

SEQ ID NO: 13058 - DNA, 3861 bp, Homo sapiens
atttaattagccatcccatgctggccaccttccccatgctcttggagcagcctgatgtgatggatgctctcagggtgggtagcatgcattgcaatggaaacctgctggcttatggaagcagttatacactctgtgttaatgagttctgtctaggcctttttttttgttactaggatgatgtctcccaatccctatccattgtctaggtaactcagtcctcatctttcccatcttagcataaattcccaagggctgccttccctgacccagggagcaggtggagtgcctgctatgtacactattgcaatctttgcccattttttccttgacttaggatggccactgattgtgtcctaagagcaaaaatccaaaatggtctgtaagataaatcaattgaatttgcaggggagaatcagggcatgcacatcatctttaattccatgtgtgctgtttgctgtctgaaataactgttgagtgttatgttaaatcgtatgaaatctccaattttcagccatttttggcctaagtggcagtttcatatggtttagcctaatacatcagggtcaataagtagaagagctgcatgcatgcaaggcagatacacaggtaacatcacaagtgccatgggggaggtataacccaggaccttgaagatttaaagaaggcagcaaagaaggatccaaattctgtttcactagagaggtcctgcatgagagagcctaataaaggccagggccaagaggattttgacctgctgagatgggggtgaagacgttgcaggtagaaggcttagcatgagcagacgtttgaggcaggaaggaatagagctgacagtccagcttggcatgtcagatgcaagtaagggagtggttggtagatgggcaaggtaagcctgagtctcggtgtggggctgagggcggtggtaggtggtgggtaacccaggaaggtttcttctttaggcaaactctgccaagtgcaaagaggcagaacatgtgcaggagggaggtgagcatattagggggtgactcctgctgataaaaactaggccatatgcacctgacagcagaaacagaaggaggactcagtcatctacaaagattcttattagactttgaaaccaattcatatgctagcttggctgggttggggggtgtcaatagtaataatgacattttcaacagagatgtttaagaaaatgttcatggtacatatgatctcctgtaattttagataagttcgtctggcactatagctagataatgcagaatttctctttcttctcctataaagtcactagtatcataataattattcattacacagaacatatatacactgattcttcaacaaagatttcacaagagcctactatgtattaatataaggcactgtgctggccacaggaatatttccctaggtgtgtaacaggaatctgcaccttgttcttaggaggaaacttaggatccctaatctagtctaaaatctgcatttccctgatgagcagacagcttggagatgtgcagtgacttggccggccatggagctcagccatgacccagccggggctgtccctgcgggtcagctctgggtgcacccagaatgtgccacgggctgcttgaaagcatgagggtaaagttgtgcacatatgttatttagcaaaaagaccccatttgagccataataagtataaatatatatacatttatatacctgcctgtgaaaagatctggaagaatatattccagagaggtattggtgaatatctctggatcttggattattttatctacattttcttaattttttcacattgaattatttgtgttatgataattttaaaaaagaaagtggtggttgtttctacacccatgagccttcttctctccgtggcatagtgtattacttaggagaagcttggctgtgctgtggtggttagcacaggtttatttcttacccatggtatgtatccagcatggatcagtggaagatgctgctccacagtcacccaagggtacaggctggtggagcctctactgtctcacagcaccatctggaacaagtagctgcctctgttgccagtttccctgcagaagagggagaatggagaattgttcttgggctttcactgcctttgcttcaaaggggcctgggccacttctgctcacattgcattggccaaaaccagtcacacggtccatttaacttcaaaggaggtatagtcttctttttgttccagaagaaaggaagtggatcttggtgaggtaatagtgacctttaacacgtttgctattcccaaatgagttactctaagtgaaacatcctactatttgctggtggctgaatgaaaaataaggtgggacattgacatgtaactaacaaaaatagacaaattttaccagacactaagtctacatttgctaagtgatactcacgttaaaccatattattaggttggtgcaagagaactgtggtttttgccataaaagtagtagcaaaaaccacaattacttttgcaccaactgaataaaatttaaaatgtacagcatgtgagcctcctagagtttacttacctagcacagttcagtttgtggatgacattttaataataagaagaatggcacttggcctgtttagtaaaacactctggttctgtaagggtcctcttcaaactcctaaggacccatagcacagcagttaatagggtggaggaccatagtcccctcacgtggtaataggtatgaacattccaaaatgttctcatgagtggcatagtctgttatctcctgctgagaaacgctctatcaatgcatcatttattttatggagaatctctttattggtgccatatgttatgttcatcccagggcctccctgctgagaaaggtctgatgctttcaggttactcatgatatcaggtgccaacaggaggatatctactgacatgcacagaacccagaccctggaacaggcagccgtgagactggtcatattccacccacgcattcagtttgccaggaaatggcacagtgaaagtcttaaattcatacttctgtgggactaattgaactctggggtttttatttatttgaggaaatttctgtgaagccctgtggacagattagaaatatttactcacaaaattgtacttcagtctgtctcattctgaccattgtcatcatcatgacagagagaattgtagaaaagtttggtatttggcagtgttttctattttcattactgtcttacttggaaagcttaatactattttattattcaggtgctgtggttgtatagttttcatggatgtgttagtgtttcgctgattctattcttaagttagttttgatttataattatcatgggcttctacggcatttttcacagatacatctgcctggtcattctggtgctgggtcatttgcaatagattcctaattacagattcacttcttgcttgtatagaatctgtacagcatttttaaccctgtccataagtttatttacagagtaaatttgcataagtgttgcaaggacttgttactacttggactaacataatatttctgtttgctctttagagttcgtgggctggaaaagaaagcacattaaaaagatcagagaaggtaaaatatgagtctccacactgaactccatatttgcagtacctggtgtttgcttgcctattctaatcatgtctcttttttagcaaaagtagccatagtcataatccctcttaaccagggaaactgtttcattatggctgcaaaaacacattccaagagggttacgcatgatcgttagctaatgtgagaaggaatacttgttcaagacagccatttcagattactgagttttatttaa

SEQ ID NO: 13059 - DNA, 357 bp, Homo sapiens
atttaattagccatcccatgctggccaccttccccatgctcttggagcagcctgatgtgatggatgctctcaggagttcgtgggctggaaaagaaagcacattaaaaagatcagagaaggtaaaatatgagtctccacactgaactccatatttgcagtacctggtgtttgcttgcctattctaatcatgtctcttttttagcaaaagtagccatagtcataatccctcttaaccagggaaactgtttcattatggctgcaaaaacacattccaagagggttacgcatgatcgttagctaatgtgagaaggaatacttgttcaagacagccatttcagattactgagttttatttaa

SEQ ID NO: 13060 - DNA, 2513 bp, Homo sapiens
aatcagagcaccgcagccagggagatgctggcgagacgacagcgagatcctctccaggccctgcggcgccgcaatcaggagctgaagcaacaggttgatagtttgctttctgagagccaactgaaagaagctctagaacccaataaaagacaacatatttatcaaagatgtatccagttaaagcaggcaatagatgaaaataaaaatgctcttcaaaaattaagcaaagctgatgaatctgcacctgttgcaaactataatcagagaaaagaagaggagcatactcttttggacaagcttacccaacaactgcagggccttgctgtgacaataagcagagaaaatataactgaagttggggcacctactgaagaagaggaagaaagtgaaagtgaagatagtgaagacagtggtggggaggaagaagatgcagaggaggaagaggaagagaaagaggaaaatgaatctcacaaatggtcaaccggtgaagaatacatcgctgttggagattttactgctcagcaagttggagatcttacatttaagaaaggggaaattctccttgtaattgaaaaaaaacctgatggttggtggatagctaaggatgccaaaggaaatgaaggtcttgttcccagaacctacctagagccttatagtgaagaagaagaaggccaagagtcaagtgaagagggcagtgaagaagatgtagaggcggtggatgaaacagcagatggagcagaagttaagcaaagaactgatccccactggagtgctgttcagaaagcgatttcagagcagataaacactgttgatgtgttaactacgatgggagctattcctgcagggttcaggccttccacgctctcacagcttctggaggaagggaatcaatttcgagcaaattacttcttacaaccagagctcatgccttcacaactggccttcagagatctgatgtgggatgctacagaaggcactattaggtcgagaccaagtcgtatttcattgattctgacattatggagctgtaaaatgattcctcttccaggaatgagcatacaggttctcagcagacatgtacgcctctgtctatttgatggtaataaggttctgagcaacattcatacagtcagagccacatggcaacctaaaaagcccaaaacatggaccttttctccccaggttactcgcatcttaccatgtttgcttgatggtgattgctttatcaggtctaattctgcatctccagatcttggaatattatttgaacttggaatttcttatattcgcaattcaactggtgaaagaggagagttaagctgtggctgggtgtttcttaaactttttgatgccagtggagttcctattccagcaaaaacttatgagcttttcttgaatggtggtactccttatgaaaaaggtattgaagtggacccttcaatatccagaagagcacacggcagtgttttctaccagattatgacaatgagaaggcagcctcaacttctagtgaaactgagatccttgaacagaagatcaagaaatgtactaagtctactgccagaaacattaattggaaatatgtgttctattcacttgttgatattttatcgacaaattcttggagatgtgctcctgaaagacaggatgagcttgcaaagtactgatttaattagccatcccatgctggccaccttccccatgctcttggagcagcctgatgtgatggatgctctcaggagttcgtgggctggaaaagaaagcacattaaaaagatcagagaagagagacaaagagttcctgaagtccacgtttctcctggtttaccatgactgcgtgctcccacttctccactccacacgcctacccccattcaggtgggcagaagaagagactgagactgcacggtggaaagttatcactgacttccttaagcaaaaccaagaaaaccagggcgccctccaagctctgctgtcaccagacggagttcatgaaccttttgacctttcagagcagacctatgacttcttgggtgaaatgagaaagaatgcagtgtgacagtggcagcctctagccctcagcttcccacggaatcagatggatcctccacgattacgtgaataaaatgatggaaccaaaaatcactgtcactttacaacttaggttttactcttttctttctacagaccatatttttaaagaaatgtttatacaataatttaaatattttttaaaaccataaaataaatttttataaggaatactgttatatctaaatttaaacagtatttattttttcaaaaacagctacttaagttaatggtatagatttctataaaagcaagattttgtcaaaaactaaatttatgattattcaagaaagtgaaaaaaacaacctacagaatgggaaaacatatttgcaaatcatctaactgataaaggtctagtatccaaaatatttaaatttatgagtgttaataaaatttatcttgttcaatgaagaggaagttaaa

SEQ ID NO: 13061 - DNA, 26208 bp, Homo sapiens
cgagacgacagcgagatcctctccaggccctgcggcgccgcaatcaggagctgaagcaacaggtatggtcaggctgtgcagagggccctggggcgggcgacaggcggacgcagctgcgcgcactgcgccttcccaccgtgaccccacctaatcctgggagcttgcccccaacctacttaccttcccaggttgtaacgcccccttaccccataacattccagcacccaaccccgattcaaacccctcctgatcccaactcaacccccagccaaaggcgaaacctcccaaaattcgtgaccatcaactaagcgccccctcctccgaccctcactcccacctaacgtctcaacctcctaccctaacaactcactaacccaccttatctcccaatctaaacttagtggtgtaaccatttccaacccaactctgagcctagctcctctcctccactttccaagcccatttcctttcagccttcctcaagtggagattattattgcctccgtgaactcaagcgaaataggtgtcaagaaatagtcttaatatgcaagaacattaagatctgataaatgagcaaaggaggtgaacgagagaggaaatacaagtaactcataaacatacgaggaatgttaacttcaaagatactcaagtaattgcaaagcacataaggtatcacaaaaatgttaaaaatcacaacactctgtcttgaggaaggtgtgatgaagcaggcacattcactgctcccgtgtataaggtgcttgtacagcatttcaggaaagcagcttgacaaggtgtaacatatgtgtatgcacctaggctcaaaaattacatttccagggatctgctatgtgtaataattagaaagtaggacagagattgatgtataaaagtattcatcacattgttacttatataatatacacagaacagcatagaagggaacaggctaatatggtatttctgtgtgacaggatgctgatgattattatgattttctttattctttttcatatttataaaaatttttaggccaggtgtggtggctcatgctagtagtaccagctacttgggaggctgagacaggaggatcacctgagcccaggagttcgagactagcctgggcaacataacaagacttggtctcaaaaaaaaaaaaactttttaaaaatacactgagttcttattaaaaataagaaaaaagtaaatagcaaccagtgggtttattttctgacattttaatttcactttaatttttttcatgtgatctattaccaagtatttttccactgagtaaaattattttataatctgaggccggtaagagattcactgatgctcatattttatccatttttgttctcttgtttaaagtaaaaaggatttggaaggtaaatatttaggtgactgtgtattggaatcacagtggtgcaacaaaagctaaatactcttctggtagaaataaaaaataaaacttgatggggcattgacttatgctgaacttcggtggatcttaatatggttctgtgtcttattttaaaatttcaacttttattttagattcagggggtacatgtgcaggtctgtcacatgggaacactgtgttatgctgaggtttggggtacagatgagcctatcacacaagcagtgagcacagtacccaataggcagtctttcagtcttcattcctcttccctcccccaccccactccagcagtcaccagtgtccattgctcccatctttatgtccatgtgtactcaacgagtgagaacatatggtatttggttttctgttcctatgctaattcacttaggacaatggcctccagctccatccatgttgctgcaaaggacatgatttcattcttttttatggttgcatattttttcatggtgtatatgtaccacattttctttatccagtccaccattggtgggcatctatgttgattccatgtctttgctattgtgaatagtgctgtagggaacatacacatgcatgtgacattttggtagaatcatttcttttttgggggtatatacacggaaatgggatttctgggtcaaatgatagttctgttttacgttgtttgggaaatctccaaactgctttccacagtggctgaactaattttcatgcccaccaacagtgtatatgtgtactcttttcttgtcagcctcaccagaatctgtcatttcttgattttttaataatagccattttgaccagtgtgagatggtacctcattgtagttttaatttgcatttctctgatgattagtcatgatgagttaattttaaatttagtgggacattaggagaaccaggaaaagttttagaaggaaactataaaaatgattattaaaacaaactattagaaagattattctccctggagaaatattggctctggagccttttgataccttgactatctggaaagtttgttttgatagtattagctaattcttccctgtcttcacagaggacacctgaagctgaatatggaacagattttctattcggtgtctgtaggacaagtaatcaacagcccctctgagtcaggcctgtgatgactggctctatcactaggtgtgtgaattttgtaaataacactcagatggatgccaaattgcaagagtagagaagaaactaatggaattttctcttttttcatccactttatcttctctacgtaatctatagaaaacagaccaaagaagtatgtgcctttttggagagtatattgacaaagttacatatagtgttagtaaacaaactactaagtcaagagaaacaaagtcatgatacattcaatacaatggataccactcagtaatgagaaggaatgaactaatggtacacacaacaatatggaagtatctcaaaaacatgctttgtggaaaggttacacaagagtgcttactgtatgagtccatttatataaaatttcaagaacaggcaaaactaatttatgttggaaaaatatcaaaacaggtttgtctgtggaggaataaggaggggatttactggcaagggcatgagggaacttactagggtgatggtagttttctacatcttgataagaattttggttacacagatgtatgcatttgtcgaaactcagcaaatgtatgcctcgtatttgtgcatttcactatatacatattttacatcaactattgaactttagttagtgacatccatagtccattatttagggagaaatgtattgataactgcaacttactttgaaaggcataaggtgggttgacggatagatcaaataagtatagtataatgttaatgttttttctaggtagcgggtatatgggttttcactgtaaaatttttaaaactttgttgtatgtttaaaagtgttcattataaaatattggataaaaaaagaagttttctttcctaaggcgatatggtatttaataatgtgatattttaaatggtctccataggttgatagtttgctttctgagagccaactgaaagaagctctagaacccaataaaagacaacatatttatcaaaggtaaagtatgctaaattatataagctttacaggaaccgcacttacatttcaatgcatagtatttaaggcatagagattggtcctttggaatcaaatggaagaatcacatagtgttgtaagttgaatgtagaagaaaccaacctaaacctgatggttgcggacttgctgttgtgacagcaactataaaaactgcttaatgtaaacataggtgacatgggcaggattaccctaaatccttagcctatgtagcccagatcctgtgacctggtcagaaacctctgtctataagcaattagtacttcattgggatgtcaactttaactcccatgagaagacaacactgttttctaggtgggtgttttttgttttgtatttgtttttacttaaaaaaaaatccttgggagagtttaaatagacgtgatgaactacatcaaatttagactattaattcataacatttgtattaagtttaggacatcattaagataatctttgtttttgagatatttaaggattttattacattccaaagaacatgagattcattctattaatttaagtgaattgtaattgtttggagaagttttacttaagtcaggcattcagagtgcttaaaggcaaaacaaatgaattttgaaatgtcaaatgaatttaatttataatagtaggattgattaagggatttagttcaagctgaattaacagtaatgaaagaaaagcaaaggttattgttcttgctttactagatttaaaaacagagtaagatttatagactgaatttgaaggccaagggaaaactacgtttttaaattttatgttagtaaactaaaaatcataattattattattttattttttgagactaaatctcactctgtcacccaggctggagtgcagtggcgcaatctcggctcattgcaacctgcacctcccaggttcaagcgattcttctgcctcaggctcttgagtagttgggattacagtcgtgccccaccacacctggctggattttgtattttgagtagagatgggtttcatcacgttggccaggctggtttcgaactcctgacctcaagggatcccccagccttggcctcccaaagtgctgggattataggtgtgagccactgtgcccagcctaataattgttatgttttattttttttgagatagagtctctctctgtcgcccaggctggagtgcagtggcatgatctcggctcactgcaagctccacctcccaggttcaagcgattctcctgcctcagcctcccgagtagctgggattacaggtgcccgccaccatgcctggctaattttttgtatttttagtagagatggggtttcaccgtgctagccaggatggtctcaatctcctgacctcatgccccctgctttggcctcccaaagtgctgggattataggcgtgagccaccgcgcccggcccctaataattatttttaagcccaagtaaccatagtcttctctgtgcatgaaaagaagattgttactgtcatttaaaaactcactttgacatttgcatatctgaaaatgtcatttaggtatcatttttatctgctcagtgctctgagtcttttcagtttgaaaactcatgtctcatgagctctgggagattttattttacaaaaagattatttcgttaattccatttgtctgtttcttcctgaaacacctttgagtcaggtattggatatcctggactgatcctctatatcccataacttcctgttaatagtttctgtttctttgtttgtatgggagatgtttttttggggggatgtggggggtctcactctgtcgttcaggctgtaatgaagtggcacaatcatggctcactgcaccttctgcctcccaggctcaagggatgcccccctcccccgccacgagctaccatgctagcaattctcttgactttaacacttttctttattacctatttcaacagccatattgttttatttcagcagtcatattggtttttttttttttaagatggagtctcactctgtcatgatcttggctcactgcaacctctgcctcctgggttcaagcgattctcctgccttagccttctgagtagctgggattacaggctcacgccatcacactcggctaattttttgtatttttagtagagacggagtttcaccatgttggccaggctgctctcaaactcccgacttcaggtgatccacccatcatggcctcccaaagtgctgggattacgtgagccaccgtgcctggccatcatcagtcatgttgttaatttacaagtgttttctcttgttctcgaattgttcttttttcatagcatcatgttcctgttttcatattgattgccttcttactacttccatgactaggaggctttttttttctccttaagttctcttctgttctctgaattgtctttgctttctctgggctcagattccttttaattagttaattaattaatttatatttggttattcttaaattttatcttcacgttgccggttttctttattaggtctggcttatctatttttattgaacaatgagggactaggttgattattccagagagctctcatgggcttttctactgttagatagagaggggtccttcctgctagtaccatcccctgaataagaatgaaattttgtatgttgatagggcttatcagaggctcggaagtagcttttagtctgaggatcccccagtgccagaatagggccggctctaaccctggtgtatgggaaacttctttagcagtcatgattctcttcaggtcgtttgttaattgtttttgtttgtttttttgtttttagggaagaatcccctggtaaggagggagagcagagaggggaaaagggagctaactggctcaggttttctgtaaatagacttttaaaagaaagaaccccaactaaatctaaacgtaatcagtatcattaatcttcccttgactaatataaagaccttagattgctttaacattgatttccctcctcaaagcttagatgtatgcatatgatttaatttacacaatataacacaataatattagataatttataaagtaaaccccagccactgtgcatgtcttttcatcagcagaatttcataatgtgtccctctatgatttagtttagttaacctttggtcctttatgtctgctgactcaagtcctagagttttcggcctggcagattatctccctcttatgcttgtgttgcgtcttccaccctttataggagaacatgcttccagcctttttccatggagcagaaatttgttgaaatctcttgctggctagttgtccttctttccttctttgcagtgttcagagtttgttaccttttcaaacgttttaatcattttttgtggggtttcaggagccagtgaagatgaatgtgtgcttagtttttatcctgaaccaggagtcttaaaatatcaactgtttgaggattttaataattacatagttataaaggaggtaattgtaataagtaatttattttcttggtacattatattaaaatagttttccactctgggctttaagcgaaatttctgagtctaagtttcagtagagatttttttggtcaagtaacatgacacctgccaaaataagcggctttactgtcagtctcatttgacaaaagcctgcagctaggttctctcagggtggattcatggcttgtgatatcctcaaagaccagcctttgatgtcattccactctgccatcctttgcttgttggtgatgtctctcctcatggttacaaagtccataccctcagtatctaagagcagatgtaggagagattcttttcatgcctggtaagggaggataaaatgggaggcaatcccaatatacgtgttttatgttacactggcagccgtgggccccctgctcaccctgcctgcagtggaggctgagaacataggtgccagtgggaagctgactgccagcaaagaggaagggtgggaaaggggcttttggggaggttgctagtagggtcagccccagtttgatgtttccccttctcttttgctacccttttgacaaaggacttttgttccctttaaaacgttttttatttattactgttttttatttttttctttaagttcagggatacatgtatggcattgtgcaggtttgttacataggtaaacgtgtgccatactggtttactggacagatcatcccatcacctaggtattaagccctgcatccattaattattcttcctgatgctctccctcctctaatacctccttcctacaggccccagtgtatgttgttaccctccttgtgtccatgtgttctcatcattcagctcccacttataagtgagaacatgcggagtttggttttctgttcctgcattagtttgctgaggataatgacttccaactgtaaccatgtccctccaaaggacatgattttgttcctttttatggctgcacagtattctatgagaacatgcagtgtttggttttctgtccttgtgataatttgctcagtatgatggtttccagcttcatccatgtcccttcaaaggacatgaactcatcattttttatggctgcatagtattccatggtgtatatgtgccacattttcttaatccagtctatcattgttggacatttgggttggttccaagtctttgctattgtgaatagtgccacaataaacatatgtgtgcatgggtctttatagcagcatgatttataatcctttgggtatatacccagtaatgggacagttgggtcaaatggtatttctagttctagattcctgaggaatcgccacactgacttccacaatggttgaactagtttacagtcccaccaacagtgtaaaagtttcctatttctccacatcctctccagcacttgttgtttcctgactttttaatgatcgccattctaactggtgtgagatggtatctcattgtggttttgatttgcatttccctgatggccagtgatgatgagcattttttcatgtgttttttggctgcataaatgtcttcttttgagaagtgtctgttcatatcctttgcccactttttgatggcgtcgtttgtttttttcttgtaaatttgtttgagttcattgtagattctgtatattagccctttgtcagatgagtagattgcaacaattttctcccattctgtaggttgcctgttcactctgatggtagtttcttttgctgtgcagaagctctttagtttaattagatcccatttgtcaattttggcttttgttgccattgcttttggtgttttagacatgacgtccttgcccatgcctatgtcctgaatggtaatgcctaggttttcttctagggtttttatggttttaggtccaacatttaagtctttaatccatcttgaattaatttttgtataaggtgtaaggaaggcatccagtttcaactttctacatatggctagccggttttcccagcaccatttattaaatagggaatcatttccccatttcttgtttttgtcaggtttgtcaaagatcagatagttgcagatatatggcattatttctgagggctctgttctattccataggtctatatctctgttttggtaccagtaccatgctgttttggttactgtagccttgtagtacagtttgaagttaggtagcgtgatgcctccagctttgttcttttggcttaggattgacttggtaatgtgggctcttttttggttccatatgaacttaaagtagttttttccaattctgtaaagaaagtcattggtagcttgatggggatggcattgaatctataaattaccttgggcagtatggtcattttcacgatattgatacttcctacccatgagcatggaatgttcttccatttgtttgtatcctcttttatttcattgagcagtggtttgtagttctccttgaagaggaccttcacatcccttgtaagttggatttctaggtattttattctctttgtagcaattgtgaatgggagttcagtcatgatttggctctctgtctgttattggtatataagaatgcttgtgatttttgcacattgactttgtatcctgagactttgctgaagttgcctatcagcttaaggagattataggctgagacgatggggttttctagatatacaatcatgtcatctgcaaacagggacaatttgacttcctcttttcctaattgaataccctttatttccttctcctgcctgattgccctggccagaacttccaacactatgttgaataggagtggtgagagagggcatccctgtcttgtgccagttttcaaagggaatgcttccagtttttgcccattcagtatgatattggctgtgggtttgtcttagatagctgttattattttgagatacgtcccatcaatacctaatttcttgagagtttttagcataaagggttgttaaattttgtcaaaggccttttctgcatctattgagataatcatgtggtttttgtcgttggttctgtttatatgctggattacgtttattgacttgcgtatgttgaaccagccttgcatcccagggatgaagcccacttgatcatggtggataggctttttgatgtgctgctggatttggtttgccagtattttattgaggatttttgcatcgaggttcatcagggatactggtctaaaattctctttttttgttgtgtctctgccaggctttggtatcaggatgatgctggcatcataaaatgagttagggaggattccctctttttctattgattggaatagtttcagaaggaatggtaccagctcctccttgtacctctggtagaatttggctgtgaatccatctggtcctggactttttttggttggtaagctattaattattgcctcaatttcagagcctgttattggtctattcagagattcagcttcttcctggtttagtcttgggagggtgtatttgtcgaggaatttatccatttcttctagattttctagtttatttgcatagaggtgtttatagtattctctgatggtagttggtatttctgtgggatcggtggtgatatcccctttatcattttttattgcatctatttgattcttctctcttttcttctttattagtcttgctagcggtttatcaattttgttgatcttttcaaaaaaccagctcctggattcattaattttttgaagggtttttttgtctctatctccttcagttctgctctgatcttagttatttcttgccttctgctagcttttgaatgtgtttgctcttggttctccagttcttttaattgtgatattagggtgtcaattttatttctttcctgctttctcttgtgggcatttagtgctataaatttccctctacacacagctttaaatgtgtcccagagattctggtatgttgtggctttgttctcgttggtttcaaagaacatctttatttctgccttcatttcgttatgtatccagtagtcattccggagcaggttgttcagtttccatgtggtttagtggttttgagtgagtttcttaatcctcagttctagtttgattgcactttggtctgagagacagtttgttataatttctgttcttttacatttgctgaggagtgctttacttccaactatgtggtcaattttggaataggtgtggtgtggtgctgagaataatgtatattctgttgatttgggttggagagttctgtagatgtctattaggtccacttggtgcagagctgagttcaattcctggatatcctcattaactttctgtcccgttgatctgtctaatgttgacagtggggtgttaaagtctcccattattattatgtgggagtctaagtctctttctaggtctctaaggacttgctttatgaatctgggtgctcctgtattgggtgcatatatatttaggatagttacctcttcttgttgaattgatccctttaccattatgtaatggccttctttgtctcttttgatctttgttggtttaaagtctgttttatcagagactaggattgcaacccctgcctttttttgttttccatttgcttggtagatcttcctccatccctttattttgagcctatgtgtgtctctgtacatgagatgggtttcctgaatacaacacactgatgggccttgactctttatccaattttccaatctgtgtcttttaattggagcatttagcccatttacatttaaggttaatattgtcatgtgtgaatttgatcctgtcattatgatgttagctggttattttgctcattagttgatgcagtttcttcctagcctcgatggtcttcacaatctggcatgtttttgcagtggctggtaccagttgttcctttccatgtttagtgcttccttcaggagctcttttagggcaggcctggtggtgacaaaatctctcagcatctgcttgtctgtaaaggattttatttctccttcacttatgaagcttagtttggctggatatgaaattcggggttgaaaattcttttctttaagaagttgaatattggccgccattctcttctggcttgtagagtttctgctgagaggtcagctgttagtctgatgggcttccctttgtgggtaacccgagctttctctctggctgcccttaacattttttccttcatttcaactttcgtgaatctgacaattatgtgtcttggagttgctcttctcgaggagtatctttgtggcgttttctgtatttcctgaatttgaatgttggcctgccttgctagattggggaagttctcctggataatatcttgcagagtgttttccaacttggttcaattctccccatcactttcaggtacaccaatcagatgtagatttgatcttttcacatagtcccatatttcttggaggctttgtttgtttctttttattcttttttctctaaacttctctgtttgctttatttcattcatttgatcttccatcactgataccctttcttccagttgatcgaatcagctactgaagcttgtgcattcgtcacgtagttcttgtgccatggttttcagctccatcaggtcctttaaggacttctctgcattggttattctagttagccattcgtctaatcttttttcaaggtttttaacttgttttccacgggttcgaacttcctcctttagctcggagaagtttgatcatctgaagccttcttctctcaactcatgaaagtcattctccgtccagctttgttctgttgctggtgaggagctgcaatcctttgaaggaggagaggcgctctgatttttagaattttcagtttttctgctctgttttttccccatctctgtggttttatctacctttggtctttgatgatggtgatgtacagatggggttttggtgtggatgtcctttctgtttgttagttttccttctaacagtcaggaccctcagctgcaggtctgttggagtttgccggaggtccactccagacgctgtttgcctgggtatcagcagcagaggctgcagaacagcgaatattggtgaacagcaaatgttgctgcctgatcattcctctggaagttttgtctcagaggagtacccggctgtatgaggtgtcagtctgcccctactggggggtgcctcccagttaggctacttgggggtcagggacccacttgaggaggcagtctgtccgttctcagatgtcaagctgcatgctgggagaaccactactgtcttccaagctgtcagacagggacatttaagtctgcagaggtttctgctgccttttgtttggctatgccctgtccccagaggtggactctaaagaggcaggcaggcctccttgagctgcggtgggctccacccagtttgagcttccaggctgctttgtttacctactcaagcctcggcaatggctaacaaacagcctcgctgctgccttgcagtttgatctcagactgctgtgctagcaattagcgaggctctctgggcgtaggaccctctgagccatgtgcgcgatgtaatctcctggtgtgccgtttgctaagactgtgggaaaagcgcagtattagggtgggggtgacccgattttccaggtgctgtctgtcatccctttccttggctaggaaagggaattcccttgtcccttgtgcttcccgggtgaggcaatgcctcgccctgcttcagctcatgctcggtgtgctgcacccactttcctgcacccactgtctgatagtccctagtgagatgaacccagtacctcagttggaaatgcagaaatcattcatcttctgcgtcactcactctgggagctgtagactggagttgttcgtatttggccatcttggaaccgccccaagtgttcctttttctctgcaattttgccaacatctgtttttttgactttttaataatcaccgttctgactggcatgagatggtacttcactgtgctgaatgtgtgtcttttgagaagtgtcacttcatgtccttttgctcactttttaatggggtttttttttcttataaatttgcttatttttagactctggatattagacattcatcagatggatagattgtaaacattttcccccattctgtaggttgtctgttcattctgatgatagtgagaggtgacagcatgctggcagtcctcacagccctcgctcactcttggcgcctcctctgcctgggctcccactttggcggcacttgaggagcccttcagcctgccgctgccctgtgggagcccctttctgggctggccaaggccggagccagctccctcagcttgcgaggaggtgtggagggagaggcgcgggtgggaaccgggcctgcacacggtgcttgtgggccagcgtgagttccgggtgggcgtgggctccgtggactctgcacttggagcggccagccagccagccccaccggccctgggcagtgaggggcttagcacctgggccagcagctgctgtgctcaatttctcacccggccttagctgccttcccgcggggcagggctcgggaccttcagcccgccatgcctgagcctccccgccctctgtgggctcctgtgcggcccgagcctccctgacaagtgccaccccctgctccacagtgcccagtcccatcgaccacccaagggctgaggagtgcgggcgcacggtgtgggactggcaggcagctccacctgcagccctggtgcgggatctgctgggtgaagccagctgggctcctgagtctggtggggatgtggagaacctttatgtctagctaagggattgtaaatacaccaatcagcactctgtatctagctcaaggtttgtaaacacaccaatcagccccctgtgtctagctcagtgtttgtgaatgcaccaattgacactctgtatctagctactctggtggagccttggagaacctttatgtctagctcagggattgtaaacacaccaatcggcactctgtatctagctcaaggtttgtaaacacaccaatcagcaccctgtgtctaactcagggtttgtgaatgcacccatcgacactctatatctaactactctggtggggacttggagaacctttgtgtggacactctttatctagctaatctagtggggacctggagaacctttgtgtctagctcagggattgtaaacgcaccagtcagcaacctgtcagaacagactactcggctctctgtaaaatggaccaatcagcaggatgtaggtggggccagataaaagaataaaagcaggctgccggagccagcaatggcaacccgcttgggtccccttccacactgtggaagctttgttctttcgctgtttgcaataaatcttgctactgctcactctttgggtccacactgcctttatgagctgtaacactcaccgcgaaggtctgcagcttcactcctgaagtcagcgagaccatgagcccactgggaggaatgaacaactccagacgtgccgccttaagagctgtaacactcaccgtgaaggtctgcagcttcactcctgagccagcgagaccacgaacccaccagaaggaagaaactccaaacacatccgaacgtcagaaggaacaaactctggacacgccgcctttaagaactataacactcactgcgagggtccacggcttcattcttgaagtcagtgagaccaagaacccaccaattctggacacaatagtttcttttgctgtgcaaaagttctttagtttgatgagatcctatttgtcaagttttgcttttgttgcaattgcttttggctttttgttgtcatgaaatatttgcctgtgcctatgtcctgaatgctattgcttggattttcttctagagtttttatagttttgggttttacatttaagtctttaatctatcttgaattaatttttgtatatggtgtatggaaggggttctagtttcaattttctgcgtatagctagccagctcttccagcatcatttattaaatagggggccctttccgcattgcttgtttttgtcaggtttgtcaaagatcagatggttgtaggtgtgcaagtcttatttctgagttctctattctgttccattggcctatgtgtctgttcttttaccagtaccatgctgttttagttactgtagccttgtaatatagtttgaagttaggtggtgtgatgcctccagctttgttctttttgcttatttgggctcttcttttgttccatataaattttaaaatagctttttctaattctgtgaagaatgtcaatggaagtttgatgggaatagcattgaatctatacattatttggggcagtatgtccattttcacgatatgattcttcctatccacaagcatggaatgtttctccatttttttgtgtcacctctgatttctggagcagtgtttgtagttatccttgagaaggtccctctcactttctttgttagctgtattcctaggtattttattctttttgtagcagttgtgaatgtgagttcaggatttagctctctgcctgcctgttgttggtatataggaatgctagcaatttttgcacattgattttgtatcctgagactttgctgaggttgcttatcagcttaagaagtttctgggccaagacaatgggttttctagatataggatcatgtcatctgcaaacagggataatttgagttcctctcttcctatttgaatactccttatttctttctcttgcctgacttcccaggccagaacttccaacactgcattgaataggagcaatgagggagggcatccttgtcttgtgcctgttttcaaagggaatgcttcaagcatttgcccattcagtatgatattggctgtcggtttgtcatatatggctctgattattttgaggtatattccttcaatatctagtttattgaaatttcttaacatgaaaagatgttgaattttattgaaagccttttctgcatttattgagatagtcatttttttttgtcttaagttctgtttatgtgatgaatcacatttattaatttgtatatgttgaaccaaactttcatcctggggatgaagccaacttgatcatggtagataagctttttgatgtgctgctggattcggtttgccagtattttgttgcggatttttgtatcgatgttcatgaaggatattggctttaagttttctgtttttgctgtatctctcccaggttttggtatcgggaggatgctggatacaatcagttagggaggagtccctccttttcagttgtttggaataatttcagtagaaatggttcccactcttctttttacctttggtagaattcagctgtgaattcatctggtcctgggagtgttttggttggtaagctatttggtaaagctgcctcaattttagaactcattattgatctgttcagggattcaatttcttcctggttcagtcttgggagggtgtatgtgtccaagaactcatccatttcttctagattttctagttcatgtgcatagaggtgtttatagtattctctgctgattgtttgtatttctgtggggtcagtggtgatatcccccttataatttctgattgtgtttatttgattcttctctcttttctttattagtctagctagtggtgtatctattttattaatttttttcaaaaaaccagctcctgaatttgttctttgtagggtttttcatgtctctatctccttcagttcagctctgatcttggttatttcttgtcttctgctagctttagggtttgtttgctcttggttctctagttcttttagttgagatgttaggttgttaacttgagatctttctagctttttgatgtgggcatttagtgatataaattttcctctgaacactgctttagctgcatttcagagattctgatacgttgtctctttgttctcattagtttcaaagaacttcttgatttctgctttaatttcattatttacctgagtcattcagggacaggtggttattttccttgtagttgtgtgattttgactggatttctttctttctttctttcttttttttaaatgtgtctatcagaatgactttatttcagtacactgagccccatcaggcagtgtggtttgtgcaaggctgtgcgagggacaggcttgggctaagagaagggaggtgagttgttaagtgcactgcagtctgtggggtgctacatcgctttcacacacacctgctcctttggcccatacctggcaggggcctttggtcataggacagcatgggggagactactgcatggagtctgggattggggtgggtcatggtgtcacaggtgagggtgccggtgaagacaggctggccccagctttgcaccacctgggctaaaggcctttggactactcctaggagtcaggcctggctccattagctcctggcactctggtctggccctctccctccttaaccaagcaggtccaaggtcaagagtggcccaagatcagccaagagggggccatcccacctctacagcttagttgcctggtcagctatagtggcaaaaggcaacatggttaattgcagctttctccagtcctaaggacactggctctccaacaccccttccttgtttaggggcctctgccaaagaaaaattctacctcctgtttcagaaaatctaaccagcaaccagcctgttgattctatggcagtgagcaagagaaagagggagaaagaggctggtgggagtgtctttgagtatagctaccaatttcaaatggtcctgcaacctgtggacactgtccgcttaccatcagcagggagaggcggggccctggaggctaggctaagcttaggtgctataaacattagtgtggcagggcaggaggcagtgagctccctctctccatccccttactgaacaaacacttcaataaataaaactgtttgaagatggcattgcaacaagaacggatggaaagcaaggacctggaatcagcaggcaccttaaactctcccaaggcccctggaaggggaatgggctgggaacattatctctgcagccattcagggggagtactactcctgccctcctccagtggctggtgtggtcctgttccctggtgaacatgagggcttcctgctccctcctgactttccagtctctgtattagctcttgggatgcttttctagcctcccaaaccaaaatggcaacaaaaccagacagaggtcaaccccagccccagtcctcagtgcccagtcagggggcattgatagcggagtgaccagcaaggggaggcagcagctgcctgggtcctcagggcaccctggtgggtgggagtgagggtggggccagtccagcctaggatgggcagcagcaaggtctcccagggggtggtttatctccctctgtctccccgtggtagtaaacggagttccctgcagccagtcagaggcccacctgaggagggagtgcagcctctgccagtgttcttccctgtcaggagccagttaatggtcacccccaggcctcaggccatcaccatcgtgggtagttcctcatcctttctggacctggggtccctgggccacatggcacttgcatgtgctcacacacttgtatacacacatgcactcacacacacaggcaattcctcacaaacactctgactcaacaaagcgagttttaaagtggagttaacttcagagagaggtgaagatgatatcccaacattagaaggttttcctgtggatagatcaggcaccgtcttcctcatattccttcttggagacccacatcttcttaaaggtgtcatggaggcaaggatagagccctcaatccacgtggaatacagtctctcctgaggtgcaaatatcctgatcttcacttcactcagtagcctgtcaccaaaacctttgaacaaggtagagcctcccaagaggacgatgttggagaaaagtgtgaactgcaggtccatgtctgacttctggatggcgaacaccaggaccttgtggatgccttcactctcctccctgatcaagtctggcctgaagagcagctcaggggcccggaattgggaaggaccaatctcaatggtgctgccatcaggcaggtagtactgagccttctctgtctctagtgtctcttccttctgggggtttatggataggtaggagggtctttcttttatggccttgacaatctcaaactcaaaggatgagtggaaatctcaaacgatgagtggaaatcatagccctccttatgcaggtagaggtgcaggaagcgagagatgttccagcttgcgatgtcaattcgcatgatggagtggggcatggcaaagccctgatagatgggcacagcatgggtgatgccatccccagaatccagcaccacccccgtggtcctgcctgtggcataaaggctgagcacagcttacatggagatgaaaatagcaggcacattgaagctcttgaagaaaacgttggcagctcattcctggtgtctttgtgggtttaaaggtgcctcagtgaggagcacgagatgctcctctgagaaagtctgcagctggtccttagaatagacatattgccagatgtgttccatgtcgttccagtccttgacaatgccatgctccgtgagatagcagattgagagcagcccttggtgctccttggctttgaagccaatgaagatgtcaccttcaagggctcctgccatgatacgaatatgcatgggtaggcccacatactttggaaagcagtatttgtggatctgatcaccagcaaaaccagctttaatcacaccagattcattgtcgatcatgacaggctggttggtgattgtatcgtaagactccacggcagaggaatctctcctggggaaggaactaccagttgggtctgccgctagtgccattcatgaatttcttaatcttgagttctaatttgattgcattttggtctgtttgttataatttcagttctttttcatttgctgaggaatattttatttccgattacttgatcaattttagagtaagtgccttgtggtgatgagtagaatgcatattttgttgtttttgggtggagagttctgtagatatctattaggttcacttgatccagagctgagttcaggtcctgaatatctttatcaattttctgtgtggatgacctgcctaatattgtcagtggggtattaaagtctcccactattattgtatgggagtccaagtcactttgaaaatcataagaacttgctgtatgaatctgggttgccgagaccagctcggtcatggagaccctaacccagcggcgctagaggaattaaagacacacacacagaaatatagtgtgtggagtgggaaatcaggggtctcacagctttcagagctgagagcattgaacagagatttacccacatatttattgacagcaagccagtgataagtattgtttctatagattatagatttactaaaagtattccttacgggaaataaagggatgggccgaaataaaggggaggttctggctagttatctgcaacaggaacatgtccttaaggcacagatcgctcatgctattgtttgtggttcaggaatgcctttaagcagttttccgccctgggtgggccaggtgttcctttccctcattctggtaaacccacaaccttcaccatgggcatcatggccatcatgaacatgtcacagtgctgcagagattttgtttatggccagttttggggccagtttatggccagatttcggggtctcttcccaacatgggtgctctttttttgggtgcatatgtatttaggatagctcttcttgttgaattgaaccttttaccattgtgtaatgcccttctttgtcttttttttatctttattggcttaaagtctgttttgtcagaagctagaattgcaacccctgcttttttctgttttccatttgcttggtaaattttcctccatccctttattttgaacctatgtgtgtctttgcaaatgacgtggatctcttgaagacagcataccgatggatcttgactctttatccagcttgccattctgtgtctttttaattggggcatttaacccacttacatttaaggttagtattgttttgtgtgagtttgatcctatcatcattattctagctggttattttgcagatttgtttatgtggttgcttcatagtgtcactggtctgtgtacttcagtgtgtttttatagtgggtggtatcaatttctcctttccgtatttagtccttccttcaggagctcttgcagggcaggcctggtggtgacaaattccctaagcatttgcttggtctgaaaaggatcttatttctccttcatgtatgaagcttagtttggccggatttgaaattctgggttggaaatttcttttctttaagaatgatgaatattggtccccagtctctgctggcttatagggtttgggtttccactgagaggtatgctgttagtctgatgagcttccttttgtaggtgagctggcctttctctctggctgcctttaacttttttttttttcattttgaccttgaagaatcatgattatgtgtgttggggttgatcttctcatggagtaccttactggggttctctggatttcctgaatttgaatgttggcttgtcttgctaggttgggggaattcttctgtatgatattctaaagtatgtttttcaacgtggttccatttttcctgtcttttttaggtaccccaataagtcacgggtttggtctgtatacataatcccatatttctctaaggttttgttcattcattttcattcttttttccctattcttgtccgcctgtcttaattcagaaacataatcttcaagctctgagattctttcctctgccttgtctattctgctattgatacttgtgattgcattataaagttcttgtgtttttcacctctatcaggtcagttatgttcctctcttaattggctgttctggctatcagctcctgtattggtttatcatgattcttagcttctttgcagtgggtttcaacatactcctttaactcaacaaagttttttattacccactttctgaagcctccttctgtaagttcagccatctcagcatcatcccacttctgtgcccttgctggagtggtgttgtggtcatttggagcagaagaggcactctggctttttgagttttcagcattttgtgtcaattatttctcatctttgtgggcttatttgcctttgatctttgaggttgctgacctttaaataggatttttgttgagtttttattgttgatgttgttgttgttgttttctgtttgtttttcttttaacagtcaggacactctactgtagtgttgctgtggtttgctgtaccccagaccctaattgcctcagtttttcccatacctggaagtatcaccagtgaaggctgcaaaacagcaaatatggcagccagctccttcctctggaagctctgtcccaggagagtactgatttgttgccagcccaaacgcactttgtaggaggtggctggaaaccccttttgggaggtctcacccagtcaggtggaatgggattacagacccacttaaagaagcagtctggctgctttttggtagagcacatatgatacattaggaggggactctttcttctggaccatttgtattctccaaagccagcaggctagaatggctaagtctactgaaccccagagatagcagccacccctgccccggtaacttggaactgcctcagaaagattccagactgctttggttggctggctggaattccaagccagtgggtcttaacttgtgagttgccatggaagtgggggccatggaagtggggcccacggaacaatgctgcttggctccctggattcagctccctttctagggatatatacagatggatatccccccttgctggggatcttggggccagagtatataaaattcctgggtcactgtatgtgcctgagcagctgctctgctgagacaccacacagttctgtgtattggacccaaggccctggtggcatgaactcaggagatctcctgatctgtgggttgcagagatccgtgggagaaacatggttttctgggcagggttgcatggtcactcaccacttctcttggttggggatgggggttcctttggctgcatgccactcccaggttggctcttgttccccttgttccctggcttttctacattctcatgggtcaaggtgtttgccttgtcagtctcaatgtgagaacctggatatttcagtttaaagtgctgaattcacttgcccttcttcattcctctcagtgagtgccatagaccacagctgcttctaattggccatcttggatcaacgttgttattccctttttcactgcttatttcatttcactcacatctataagcaaaaaaaaaaaaaaaaaaaaaaagactcaaacggcataaaaaagtgacttttgtaggttattgtttagtaaagcatttgaattaaaaaaatctcatcatgagctatagctcatatttggtcattttttgtacttctcatttgggtatctaagacttaatgctgaattgaggcatctgtggaataaataaaactctggacctgtctggacaagcaagctcaaagcaggagtgtgctgtggtgggaataggccaactgtggaatcctaaactgccttcatattgttgctgtaccattgagcagctatgtggacttggtacacatagcttgagaagctatgtagaacttctctttctttaagtggagtgagggttgttatgaggcttaaatgaggtaatgtttgtaaactgcttaacatggttggcacacagtaaactttaggtactattatcagttttgtctctgaggctagttcctaggtttatggagttgtagagctggagaagcattttaaagtccagcgttcttccttattttagagagaggaaactgatgcccagagacactgaaggtttctgaggcttggttatcatgtctatgtgttttacagcttggctatgaggatcatctgagctaataggtggaaaagcatttatatgtcagttttttagtattgttcatacagtggctaattgccttgcctgctcaacgactgaatgattttataaaatagctttctggttctgataatagaaaaatcaatatattttcttttttttcttaatttagatgtatccagttaaagcaggcaatagatgaaaataaaaatgctcttcaaaaattaagcaaagtaagtattgaggttaatcacattattaaaacatctcttcctatacaagtatttttattaagtggaagttaattcaagttggtaagttcctgggtttacgttagtgatatagtctaactgcagccagtgctggcttgccgaacaggcttgctaagtctgtgcttgggagcaaagcaaaatccagggctccaactaccgaaaaatgttcagctttgatgaactcacctgctattaaggattcagacaatcctggaaggagctatttttatttttgcattttgtgagttgttttacagtttagaattatttttattttaatttctttgtggggaaataatgcataatctggccctgagggtaagtggtaaagaagcttcttgtatcaaatggcagctctgatatcaatgtctctgcagaaacaagaggaacaggaatttaaccttgacaatcccttcaggatttttttttttttttcacatgagccttggctacagctagatgtccaggtccagagactcatggagtctttaaagtggaaggcacctgaaagtcagctctccagctgtatattactcccctttactgcatctgagatatgtggtcactgaagagctcctccaaatttctccagtgacacaaaacttttcaacttagactgtttgaaaacctaattatttctgtttcacaggtgaggaaattgaagctctcagtggtgaagcatccatgcctcttctgtcaataagtggcagaacttgggattggtgcctgtctcattgactttaaagccgatcttctgtcagaacatatctcttactgactatggaaggtctataatacttagcaagaaaataaaagagaaacctaaaacaa

SEQ ID NO: 13062 - DNA, 486 bp, Homo sapiens
cgagacgacagcgagatcctctccaggccctgcggcgccgcaatcaggagctgaagcaacagaggacacctgaagctgaatatggaacagattttctattcggtgtctgtaggacaagtaatcaacagcccctctgagtcaggcctgtgatgactggctctatcactaggttgatagtttgctttctgagagccaactgaaagaagctctagaacccaataaaagacaacatatttatcaaagatgtatccagttaaagcaggcaatagatgaaaataaaaatgctcttcaaaaattaagcaaagtgaggaaattgaagctctcagtggtgaagcatccatgcctcttctgtcaataagtggcagaacttgggattggtgcctgtctcattgactttaaagccgatcttctgtcagaacatatctcttactgactatggaaggtctataatacttagcaagaaaataaaagagaaacctaaaacaa

SEQ ID NO: 13063 - DNA, 3822 bp, Homo sapiens
aactggagcaatcagagcaccgcagccagggagatgctggcgagacgacagcgagatcctctccaggccctgcggcgccgcaatcaggagctgaagcaacaggttgatagtttgctttctgagagccaactgaaagaagctctagaacccaataaaagacaacatatttatcaaagatgtatccagttaaagcaggcaatagatgaaaataaaaatgctcttcaaaaattaagcaaagctgatgaatctgcacctgttgcaaactataatcagagaaaagaagaggagcatactcttttggacaagcttacccaacaactgcagggccttgctgtgacaataagcagagaaaatataactgaagttggggcacctactgaagaagaggaagaaagtgaaagtgaagatagtgaagacagtggtggggaggaagaagatgcagaggaggaagaggaagagaaagaggaaaatgaatctcacaaatggtcaaccggtgaagaatacatcgctgttggagattttactgctcagcaagttggagatcttacatttaagaaaggggaaattctccttgtaattgaaaaaaaacctgatggttggtggatagctaaggatgccaaaggaaatgaaggtcttgttcccagaacctacctagagccttatagtgaagaagaagaaggccaagagtcaagtgaagagggcagtgaagaagatgtagaggcggtggatgaaacagcagatggagcagaagttaagcaaagaactgatccccactggagtgctgttcagaaagcgatttcagaggcgggcatcttctgtcttgttaatcatgtctcgttttgctacctaatagttctgatgcgaaataggatggagactgtggaagacaccaatggatctgaaacagggttcagggcatggaatgtacagagcagaggacgtatatttctggtttctaagcctgtgctccaagtaacatttctcattagtttttttttttttttgtacaaaaagaatagataattcatggtgtcacttgaggacttggaaacattctcattgatcctgctttcctatcatttgagtggaaacagatgttaaattttatttactattcgaaaaatcctgaaagcctttaataaaaagtaagaaattggccaggcatggtgattcacactggtaatcccaacattttgggaagctgaagcaggaggatcacttgaggccaggaattcaagaccagcttgagcaacatagtgagaccctatcctacaaaaaataagaaaaattagccaggtgtggtggctcatgcctgtagtcccagctactcgggaggctgaggtgggaggattgcatgagtttgggaagtcaaggctgtagtgagctgtgattgtgccactgcactccagagcatgagtgacagggcaagaccctgtcttaaaaaaaaaaaagtaattaattacatttttttaaaggagaaatgatccataattctgtcattaaaaaaaaattacaggccgggcacagtggctcatgggcacagtggctcacacctgtaatcccagcactttgggaggccaaggcgggtggatcacctggggtcaagagttcaagaccagcctagtcaacacagcgaaacctcacctcgactaaaaatagaaaaattagctgggcgtggtagcgcatgtctgtagtcccagctcctggggaggctgaggcaggagaattgcttgaacctgggaggcggaggttgcagtgagccgagaatactccactgtactccagcctgggcgacagagtgagactccgtctcaaaaaacaaaaaaataattacatagccaaatgaaaattctcttcctcaaactcataagtaatcaccattaacaatttagtacgtgtccttcctgacctttttcgttatttattacttataagtacatccttgtatgtgtgagggtgtgtgtctatgagtagtgtgtatgtgtatacaaaaaaaatccattaattcttcagtgcatgtgatttgccaatagacattaacttacctgtgaaatggaagcgcagggtggagcaggacaggagcagggacattttgataagggtatacttgaagcagctgctccggaacacacagctctgcacgctgggcactgtatggggcttaggtccttaggagaggccagggtgctgtgatggcatcctctcaggaatttggggccaaatcgtattattcttccactaaagtctgtatgtttatatttttcttttttgggttatagttactctagtgataaagtattatagagatgcagaaacatgactgaaaacaaatccattttgatgttactgtcttcagcagataaacactgttgatgtgttaactacgatgggagctattcctgcagggttcaggccttccacgctctcacagcttctggaggaagggaatcaatttcgagcaaattacttcttacaaccagagctcatgccttcacaactggccttcagagatctgatgtgggatgctacagaaggcactattaggtcgagaccaagtcgtatttcattgattctgacattatggagctgtaaaatgattcctcttccaggaatgagcatacaggttctcagcagacatgtacgcctctgtctatttgatggtaataaggttctgagcaacattcatacagtcagagccacatggcaacctaaaaagcccaaaacatggaccttttctccccaggttactcgcatcttaccatgtttgcttgatggtgattgctttatcaggtctaattctgcatctccagatcttggaatattatttgaacttggaatttcttatattcgcaattcaactggtgaaagaggagagttaagctgtggctgggtgtttcttaaactttttgatgccagtggagttcctattccagcaaaaacttatgagcttttcttgaatggtggtactccttatgaaaaaggtattgaagtggacccttcaatatccagaagagcacacggcagtgttttctaccagattatgacaatgagaaggcagcctcaacttctagtgaaactgagatccttgaacagaagatcaagaaatgtactaagtctactgccagaaacattaattggaaatatgtgttctattcacttgttgatattttatcgacaaattcttggagatgtgctcctgaaagacaggatgagcttgcaaagtactgatttaattagccatcccatgctggccaccttccccatgctcttggagcagcctgatgtgatggatgctctcaggagttcgtgggctggaaaagaaagcacattaaaaagatcagagaagagagacaaagagttcctgaagtccacgtttctcctggtttaccatgactgcgtgctcccacttctccactccacacgcctacccccattcaggtgggcagaagaagagactgagactgcacggtggaaagttatcactgacttccttaagcaaaaccaagaaaaccagggcgccctccaagctctgctgtcaccagacggagttcatgaaccttttgacctttcagagcagacctatgacttcttgggtgaaatgagaaagaatgcagtgtgacagtggcagcctctagccctcagcttcccacggaatcagatggatcctccacgattacgtgaataaaatgatggaaccaaaaatcactgtcactttacaacttaggttttactcttttctttctacagaccatatttttaaagaaatgtttatacaataatttaaatattttttaaaaccataaaataaatttttataaggaa

SEQ ID NO: 13064 - DNA, 15597 bp, Homo sapiens
tggtggtactccttatgaaaaaggtattgaagtggacccttcaatatccagaagaggtatggctctcatgtgttgtcttcctttccttaaagattaaacaaatagaagcatctgagaggtagctacattctaataagcatagcgttttttacttgaattcacacttttaaaaatatgtcatttgatataaaaattttaatcatttttaagtacttattttcttggtaacacatatgagactctaagacatcatgaagaatgaaatcatgaagaatgagaactaatgcattagttccttttcattgaccactgaactgatacttgtgactaatacagagactgcctattgctgggtcaaaggatgcagacatttgaaacagtaatatgcatgccaaattgccctctagaaatattgagcatcttttactatgttcattaaccaggcactgtgctagataatgggagaatgaagagcaagacagatatggtcattgcctcatggggctcagagcctgacagatttggaattccatttccactcctcagccacccctctatttgtttggtgattcaagacatgccacctctgctgaccccacaacgccagtcctgccttcttggaacagaaaggagtttggggtctgggatgcagttggttctacctggagtcagacatgctgttttcctttgtaatctggcagcaataatgctgtaactcatgtgatttagcaaacaatcctgtgcccttagggaggtctctcagctcatttagggtatatggatgactcttgcctttcattcaattcagcactactgggtggtatattttcatgaaatacttgttttattatactcactgtctcaagtacttaaagtttcgtgagttacttttgatttttcttaaaagcacacggcagtgttttctaccagattatgacaatgagaaggcagcctcaacttctagtgaaactgagatccttgaacagaagatcaagaaatgtactaaggtgggtacctgcttttacctgtccagtgaatttgggatcattcagcacttggagaccatctctgcttttggcttttcctcatatttagtcatcttttgttataatatttttgtcctctttaattcttcccccaaaggtcagtagggaaatgggtaacaaagctgaaattagcttactcttctatttactagttagctcttctaaccaaatctgttatttgagccatctagtaaatagaagacttgactaaatggggcttaccaatgcatgattctaccctcagggaacttttttaaatgtcaagtttattgagatataatttacatgcagtaaaatttactctttttagtttataattctttgtgttttgacaaatgtatactgtcatgtaattaccactacaatcaagatagagaactttccctcactctaaaaagttatctcatgcccctttgtagtcagctctgtatccccagcctcaggcaggcacacctattttctttctcagcagttttgctttgtccaaaatgtcatacaaatggaatcataacactcaggagccttttgagtctggcttctttcacttagcctagtgcatttgagacttacccatgccattgcatgtgccagtaatttgttcctttttgttctaaatagtacagactgtccctgacttactcaagatttttcaactttaccatggtgcaaaagcaaaacctgttcagtagacactatacttcagtacagattcaatgaattacatgagatatttatactttattacaaaataggctttgtattagatgattttgcccaactgtaggttaatgtgttatgagcatgtttaaggtaggcctgtctaagctctgatgttcagtagactagttgtaggctgggcatggtggctcacacctataattgcagcactttgggaggtggaggtggtagaatcgcttgaggccaggagttcaagaccagcctgggcaacatggcaagaccccatctctaccaaaaaaaaaaaattagctgggtatggtgatgcacacctgtagtcccagctacttgggaggcttaggtgggaggattgcttgaggattgcttgagcccaagaggttgaggctgcagtgagctgtgatggtgccactgcaccccagcctgggcagcagagtgagaccctgattaaaaaaaaaaaaagtctaagtgtattaaatgcattttcaacttatgatattatcttcaacttatgatattttcaatttatgatgggtttctggggctataacccaccataagttgaggagcatctgaattccctttgatagatatactacaatgtgtttattcattcacaaattgaagggcatttgggttgtttctaggtttgggcaattataaataaagctgctttaaacatttgtgtacaaattttctgcatgtggatatatgtcttcatctctcatgggtataaatacctaggagtgagattactgggacatatggagtttaactttataagaaactgccaaactgttttcatttttctttttctttctttttttttttttttttgagacagagtctggctctgtcccccaggctggagtgcagtggcaccatctcggctcactgcaagctccgcctcccgggttcacgccattttcctgcctcagcctaccgagtagctgggactacaggcgcccgccaccacgccctgctaatttttttgtatttttagtagagacagggtttcaccatgttggccaggatggtctcgaactcctgacctcgtgatccgcccacctcggcctcccaaagtgctaggattacaggcttgagccaccgcatccggccctaccaaactgttttcaaaatgactgtagcactttgcactctcattagcaatgtatgagagttccagttactctatattcttgacagcacttgatatgatcagtttttctgttttggccattctaataaatgagaatagtggtttctcatggtgttttaaatatacattttcctcagggagtttgtaaactaataaaatctcagatctatcagtttctcactcagtaccctcctagactagtcatttaacatctctatcagggtcttaatgtctacatctttaaaatggacataataataataatatcaaccccataaaggtgtaatgaggtttaatggaaagaaaatacataaaacagccagtatttacagtgtgtggcacatggtaactaacacaatagtgttagctataattatttactactataattatcttatatatagataaatgtaaacataaagccaggtagatggtgctatatcataaaatttgttcaaatgaagatgtgtagctggtaaaatcagggggcatttgaaatcacctttgaaggattgggaagatgcagaggaaaggagctccacagaggaggcacaaggccaagagggggaaggaagagcatggcatgggacagagactgttgcagctgaactgtcccaccatgacctgctcattgctcacagattattaagaagtagggaagtcagtgaagacttggcatgctcctgtgaatggtttttctcattccagatcatagtcttagcttaaatatcccttgttcttaccactactactgaaatttattttataattatagtgttaacagttcaatctttcaatagccattaataatgtgttcatgggtattatttactctcttagcttttttcccccttggatgttcatagagcctgtaaatcctcttttttggccagcctttccttggaaaattgttatttttcaagattagaaagaaagcagcacagtagtagtctttgtgaaagaaaacccaaatcttgtttggcctcattcttcctacatctttggcctccccactcctcatcttgttgataagcttccaagagtccggaagcactcccatgtgtatatttcaagtacagctcttaatagtgtttctttggcccccaaatactggttttcagacactttgtatgacctcaagatcaaattggactgtgtggtgcagaagttagcaaggcagccccttcttcttaagcagtgaatgctctactgtatgctgggttcttaaaggtcctgtgtccttgtgctccatacctcaggactgcgtcatttgtttcattacagtacagaataggcacccgaaaaatgtttgtgaaataatttcaaagcagagctctccctgctagtgtgaaaatatactcctcaggacttccgctcagcttccacctgtccctggcctccctctgccttgtcttggtgtgtgctcttccacagagagacttgagtgctggcttgaaattgcctctccactttgcatgaccccaaaatatacattcctgggaatttcaaacgtgagttgggacacactgctggtgcaactccaggctggctcgcacagaaaccagcttatgggcagtgaaacctgggccttgcagcagggctgggggctgtagtcagggggcggggtggggctgtgctgtgggttcaaggtaagagactaggcaccagcctgggcccttttggacatcactgagcctgtgcatcctggaggtggagactgaagcaggactgatccatttcaacatcctctctcctcccctgacccgaaaccttcggtaggtgggagaacaagacgggtaatgacaccaatagtccttctcctcctctccttcaaaggcacgccccgcctctatcctcaccctcccttctttacaaacttcacctttgtttatgcaaacttctctgctcaaaggagaaaggacaggggctctttccattatgccaaaggacatgagacagtggagacaaggccaagggcagaaagcctagttagagtttgcattagtgcccatttttacccagtgcccttgctgtttggctttacactgccctctctgactcagccagcagtcctacacatgtatatcttttggatatcaggaatcctgtgaaaatgtgaattattcggtgtagaccactggcaccagagtcctgctcacggggcttggcagtcttcttttgtggagtaggttgtgatcatggcgaccttgtcaacataagaaaaagagagcaaatagatgcttcagtttcaccaagatttgtcttttggagctatttttcaaaagggtttaacttgatgtgatttgaccaaaagcatgtgtataaacccctgaggagggaaagccctgaatttgacttcagattttcagtgcatgagttctaaatatcaagaaaccctgatctggagaagtaggttgcgtgtgtgtgtgtgtgtgtgtgtgtgtgtaaatttgctataaattcattatccttttttttgatgcattccatcttttttctcctttactttcattatatcgttgctaaaaataaataaggtaataatgttagttgcttgaatgcttgagacccattcattgtgttcattgccagagtttgctggtctacatgtgaattcaggaggaagtatatttttacttacttaattcagctaacctttagcagcccagaactttctattcgtcttaagtttgggaaaatcagatgctttctctaaagaatatctaataaagggcaagcagcattgcttcatgttgtgagaaagtgccagaaggaaaggagtgcccacactgggtggaccaatgcctgccaggcaaagcaggcaggtctacgagaaaaggagagggccaagcagaaggaaggaagttcccacccctttccctggcaaaaccttggctgttcttcatcatgagccctgagtttgggcatgcagctgaaacactgtgcaatgggaccgtggaccaaagggcagaacatgagcatgttgttcatgctcaggtcgttctgccccttgctcatgaacatgtccatggtcccagaacaacccagaatcagagcctgatccctgagaaagcatgtggtgacactgaggcagctgaaatggtcccctgcatcccgtctttaaaatgtaggtcaaatgtatacaagatcagaatttagccaggttgaaaaaagacagtttaaaaaagacagtttctgaccttatgtatcacatgctgtatatcaagataactgtgctaagagaacctgtattatatttttagatgtttctagaaattcaggatttaaagagtggtcaaggatacttctttaattccatgaaacttttttttttattataagttttagggtacatgtgcagaacgtgcaggttagttacatatgtatacatgtgccatgttggtgtgctgcacccattaactcatcatttaacattaggtatatctcctaatgctatccctcccccaccccaccccacaacaggccccggtgtatgatgttccccttcctgtgtccgtgtgttctcattgttcaattcccacctataagtgagaacatgcggtgtttggttttttgtcttgcgatagtttgctgagaatgatggtttccagcttcatccatgtccctacaaaggacatgaactcatcattttttatggctgcatagtattccatggtgtatatgtgccacattttcttaatccagtctatcattgttggacatttgggttggttccaagtctttgctattgtgaatagtgccgcaataaacatacgtgtgcatgtgtctttatagcagcatgatttataatcctttgggtatatacccagtaatgggatggctgggtcaaatggtatttctagttctagatccctgaggaatcaccacactgacttccacaatggttgaactagtttacagtcccaccaacagtgtaaaagtgttcctatttctccacatcctctccagcacctgttgtttcctgactttttaatgatgactgttctacctggtgtgagatggtatctcattgtggttttgatttgcatttctctgatggccagtgatcatgagcattttttcatgtgttttttggctgcataaatgtcttcttttgagaagtgtctgttcatatccttcgcccactttttgatggggttgtttgtttttttcttgtaaatttgtctgagttcactgtagattctgtatattagccctttgtcagatgagtagattgcaacaattttctcccattctgtaggttgcctgttcactctgatggtagtttcttttgctgtgcaggagctctttagtttaattagatcccatttgttaattttggctttggttgccattgcttttggtgttttagacatgaagtccttgcccatgcctatgtcctgaatgagattgcctaggttttcttctagggtttttatggttttaggtctaacatttaagtctttaatccatcttgaattaatttttgtataaggtgtaaggaagggatccagtttcagctttctacatatggctagccagttttcccagcaccatttattaaatagggaatcctttccccattgcttgtttttgtcaggtttgtcaaagatcagatggttgtagatatgcggcattatttctgagggctctgttctgttccataggtctatatctctgttttggtaccagtactgtgctgttttggttactgtagccttgtagtatagtttgaagtcaggtagcgtgatgcctccagctttgttcttttggcttaggattgacttggcaatgcgggctcttttttggttccatgtgaactttaaagtagttttttctaattctgtgaagaaagtcattggtagcttgatggggatggcattgaatctataaattaccttgggcggtatagccattttcacaatattgattcttcctgtccatgagcatggaatgttcttccatttgtttgtatcctcttttatttcattgagcagtggtttgtatttctccttgaagaggtccttcacatcccttgtaagttggattcctaggtattttattctctttgtagcaattgtgaatgggagttcactcatgatttggctctctgtttgtctgttattggtgtataagaatgcttgtgatttttgcacgtggattttgtaccctaagactttgctgaagttgcctatcagcttaaggagattttgggctgagacaatggggttttctagatatacaatcatgtcatctgcaaacagggacaatttgacttcctcttttcctaattgaataccctttatttccttctcctgcctgattgccctggtcggaacttccaacactatgttgaataggagtggtgagagaggacatccctgtcttgtgccagttttcaaagggaatgcttccagtttttgtccattcattatgatattggctgtgcgtttgtcatagatagctcttattattttgagatacgtcccatcaatacctaatttattgagagtttttagcatgaagggatgttgaattttgtcaaaggccttttctgcatctattgagataatcatgtggtttttgtcattggttctgtttatatgctggattacatttattgatttgcatatgttgaaccagtcttgcatcccagggatgaagcccacttgatcatggtggataagctttttgatgcattccatgaagcttaattactcgtggaatccattgctgtcacctcatcacagtggtcacattcatcctgttctcttccaacaggctggaagcctgaatattacctctgtgataattttcccttctaaaaatctaatcttaggaattaagataaaggattaatttacaaaaagtaagatctctttttaaatctttggtgatttttctcagcccaaagacatcttccttttgatagaagacaacatatcatttgtaaggtttttgagattttctatatggtccttcctcatgcttaatgacagagtttatatatttctaaaaatagtattagaaatatatattagaatgatctaagatattttcttgagtactttcaaaggttaaatcttgtgcatgatacattcccagtatttactatacatcatgtgtgagggtcttaaagaactcacttttttttttttttttttttttttttttgagacggggtctcgctgtgtctcccaggttggagtgcggtggcgcaatctcggctcactgcaagctccgcctcccgggttcacgccattctcctgcctcagcctcccaagtagctgggactacaggcgcctgccaacacgcccagctaattttttgtatttttagtagaaacggggtttcaccgtgttagccaagatggaagaactcacttttcatgtttccagattattattttgaaatctaaatattgaaattttttatatttttaaatttctgactattttttgatgctattgtaaattgttttgttggtttccttctcaaattgtgcattgttagtgtataaagtacgatttttacgtgttgattttgtattctgcaactttgctagtcatttattctgaaggtatttttcatggagtatttagggttttctacatatattctacatatttctacatcattttgtctgcaaacaaagacacttttctttttttagaaaaatatttccattattgtgttgagtaaaagtggcaggagcaggatccttgtcttgttccttatcttagaggaaaagctttcagtgtttcaccactgagtatgatgttagctgtgggcttttcatatatggcctttattatgttgcagtagtttctttctattcctagtttgttgagtgtttttatcatgaaagggtgtcaaattttaggctttctcagcatcaattgagaaaataatgtgggtttttccccttaattctgttaatgtagcacattatgttgattgatttttggatgttgagccatccttgaatttcattaataaatttgacttggtcatggtgtacaagctttttaatgtgctgttgaattcactttgctagtattttgttgaggattttgcatcaatattcaggaatattggcctgtagtttttttttttttttcttgtagtattgttggcttttttactagggtaattctgacctcataatgagtttgatagtgttttttcctcttcattttttggaaaagtttgaggaaaattggtgttaattcttctttaaaggtttggtagaattctccagtgaagccatctgatgctgggcttttctttatcaggagattttttaaattactgattcaatctccttacttgttattgagattttctatttctttgtgattcagccttagtaggttgtgtatttctagaaatgtgcctgtttcatttaggtcatccaacttgttggcatacaactatttatagtactctcttacacattttttatttctgtaaaatcaatagtaatatcccctctttcatttctgattttagttgagtgttccttagtcattctcactaaaggtttgtcaattttgttcatcttttcaaagaacagagtcttgctttcattgattttctctattgtttttctattctttattttgtctatatctgacctaatctttattatttcttccttctgctagttttgttcttctagttccttagggcataaagttaggttgttgacttgagctcttccttcttttttaatgttaagtatttatagctataaatttccctcttaggactgttttcactgtatcttgtaaattttggtatgttgtgttttcatttcatttctcaagatattttctagtttctcttgagatttcttctttgagccattgttgtttaagtatgttgtttaatttccacatatttatgtgttttccagttttccttctgcttttgatttctagtttcatttcattatgattgaaaaaagatattttgtatgatttcaatatttttaaatttattaagacttactttgtgactcaacatatggtctttcctggagaatatgtcatgtgcacttgagaaaaatgtgtattctgctgttgccgggtagagtgttttgtaaatgtcagctagatccaattagtctacagtgttattgatcttctgtttcattgttctataccttatcgaaagtaggatattgaaatcttctctattattatagatctatgtattgctcccttcaattctgtcagtgtttgcttcatatatttaggagcactgatgtttggtgcatatatgtttataattgttatatattctgaattgactgttttatgattgtacaatatcctttgtctcttgtaacttttggggggcttgaagtctattttgtctgatattaatatggctaaacatgttctcttttagttgctatttgcatgaaattttttttctgttctttcactttctacccatgagtgtcctaagtctaccgtgagtctcttatagataacatataattaaatcgtgtttttttagtgcatcctgccaatctgtatcttttgattgaggagtctaatttatttacatttaaagtgattactaatagagaaggacttacttttgccattttattactcatttgctgcttatcttatagctttttttgttcttaatttcctccctcactgattttctttgtgtttgatttttcatagtgacaaattttgattcccttttactttccatttgaaaatattctatagttattttctttgtggttaccatggtattacatataacatcctaaagttataacaatctattttaaactaataccaacttaacttggtattgcatacaacatccttaggttatagcagtctatcttaaactgataccaatttaacttcgatgttgaattattttctattttttagcccttactgtataccagacactacattaagcactccatacttatttcatttgttgttgttgttttgttttgagacagagtcttgctgtgtcacccaggttggagtgcagtggcacaatcttggctcatggcaacatccaccgcccaggctcaagggattcttctgccttggcctctgagtagctgggattacaggtgcccgccaccaaacctggctaatttttgtattttcagcagagatatggtttcaccatgttggccaggctggtctcaaactcctgacctcaagtgattcacctgtctcggcctcccaaagtgttaggattacaggtgtgagccaccatgcccagcccacacttacttcattttaatccttttagtaaccttctgaaatgcaagtattactattggtatccaataaatgaggaaaccaaagcacaaggagatgaattaattaatttaaagtcacatagctaagaagtgacaaagtcaggacttattccaggtctgtcacaccctcccatgttccacccagtactgtgaacagcctgaattatttcttctgcattcaccaaatcaggcatggcagccacatgcctttgttaaagcttgtagctgactagtccccttctttccaaaacataattagtggcttcccgtttttatttgacatttaacataggtatatatgctaacatggaagcacaaaaatggcaacacagggttgagactcgaaagtgtaaacaaatataaaaagttatctgaaatttaatgtggcctacttgtagtagaaatttttctttaaatagttaaaaatgtgttccagtaatgaagcaaaatttgggactgtttattaaagtaatatacatcaaaacattataagttggattgtaggggattgtctaatgaatacatttttttcttctttaatagtctactgccagaaacattaattggaaatatgtgttctattcacttgttgatattttatcgacaaattcttggagatgtgctcctgaaagacaggatgagcttgcaaagtactggtaagtgggctttgccacttccttatgtgcagtaatgcttcatactctgagtaaaggtaacctataccatcttgtatcttctgtttctggttgtgacttttggaataaaatatttagaacagcattgatgttaatacattacttatgggacatcttcagatccaaagcattgagctttgtgaactcgacacatattcagttctttcaaacatatgtattttcacatttcaaattctagagttttgagatcccaagagtcagatatagtcatattttcccttaatgtctctgagtaatctgttttttcccatgtgtttggtatgcacataatcattttgaagagaaaccaaaatcaaccaaaatagctggttcttagtgcatgaagtataagtatcaaatggattagtttaaattggtgaatccagatatggagtatttgggtgtcctatgtactgtctttattcttgcaacttttttgtacgtttgaaatttttaccaagtaaaatgttaaaaaataagtttaaaaatcaatgagtcaccatacatgattgaacctgcaaagataaatgcatgtgttatagtaattgccttcaaaaagaaaagcagtttaattgtattggctcttctttcagttcaataaatcagtaaccagatatgtactgagtacctggtatgtgccagatattatgctaggcccagtgatgaatgagacaggcataggcgtcccaggcctcaaacacataatttcatgaataatcctctccacccttttgaaataagtgctgtgaaggaaaatacacaacgagaacatgcactgggaagacttgattaatgtgtagggtaaggaaaggcttctttgagtgagtaatatttaacaaaagatgtgagagaggaattagacctatgagggaagtgtgtggggaaggattctttctgggtagaggggccagcatgtctgaagacccaaggaaagaagacatgcatgtgttggagggcttgaaattgaggcaggccagtatggatggagcagagtgagtgagaggcttagcacttgtggacaaataacattcataggcaggagtcctctcccagggacttatcacctggatagataggtagaagtggaactcaaaggcagagaagcgcagaaagttctcaaggaatcattataactctaagggggaggacgggtaagccttttaatcaccattgcctttgaattcattttcatgactcttgagaaacttcatgaatgatgtgacctcttaaagaggataaggcttgttagttttcccaataggtaagaagtttactcagaattgttgacttcatttgaatttaatcattagaataaaatatcctaataatatctaaagaatgaatttttctctactgaggacaccagattatagaataccttgcccttgccatttcaaaagtgtctgctatggtttcagtgtgtcccatctaaaattcatgttaccaatgtaatggtattgaaaagtggggcctttgagtggcgattaggccatgagggctgttgccttatgaatgggattagagacccttacagaagggcttgacaagggaattcgtctcacccttttgccttcagccacgtgatggcacagtgttcctcccctctggaggatgttgtaagaaggcccttaccagacaccaaatgccattaccttgatcttggatttcccagcctccagaacttggagaaataattttattttgtttatgttacccagtctcaggtattccactacagcagcgcaaacagactaagacatgtctttcctgatgtgcttctttgcacagatttttcatgtgctgttatctattgtgaaatgtcaatattctccctcactgtgtttggtcatatggccagaatcctcaattcctaattcttccagtttcacctaccactgtctgctggctccagacacaagtttgggtccttccctgagcgctggtggcctggaatcagacctgagcagcaggtcctctgtctcctttccccccaatgcttcctagtttctgctcagtctcccaagagcagggctacctctaaggggaagattccttttaccatgccacagccataaggaagaaagagaagttgaagaaaaacacagaacaaaattttctagtcttattctgttcagagcctccttgcccttactctaaaagctccattaatttggtacaggaactcaccaggatatgggtataggggcaaatgaaggttgaagggacagctttgagctctcctagaagtcaaagtgtgtagaatgtgttatcaacaaatcatttggcacaataattttcatctgaatatttttgtgtctattgcaataaaatccattgagtgaagtttgcataaaattctttctgttgttttgcatttcagatttaattagccatcccatgctggccaccttccccatgctcttggagcagcctgatgtgatggatgctctcagggtgggtagcatgcattgcaatggaaacctgctggcttatggaagcagttatacactctgtgttaatgagttctgtctaggcctttttttttgttactaggatgatgtctcccaatccctatccattgtctaggtaactcagtcctcatctttcccatcttagcataaattcccaagggctgccttccctgacccagggagcaggtggagtgcctgctatgtacactattgcaat

SEQ ID NO: 13065 - DNA, 577 bp, Homo sapiens
tggtggtactccttatgaaaaaggtattgaagtggacccttcaatatccagaagagcacacggcagtgttttctaccagattatgacaatgagaaggcagcctcaacttctagtgaaactgagatccttgaacagaagatcaagaaatgtactaagtctactgccagaaacattaattggaaatatgtgttctattcacttgttgatattttatcgacaaattcttggagatgtgctcctgaaagacaggatgagcttgcaaagtactgatttaattagccatcccatgctggccaccttccccatgctcttggagcagcctgatgtgatggatgctctcagggtgggtagcatgcattgcaatggaaacctgctggcttatggaagcagttatacactctgtgttaatgagttctgtctaggcctttttttttgttactaggatgatgtctcccaatccctatccattgtctaggtaactcagtcctcatctttcccatcttagcataaattcccaagggctgccttccctgacccagggagcaggtggagtgcctgctatgtacactattgcaat

SEQ ID NO: 13066 - DNA, 10006 bp, Homo sapiens
ggttggtttccctggcaactggagcaatcagagcaccgcagccagggagatgctggcgagacgacagcgagatcctctccaggccctgcggcgccgcaatcaggagctgaagcaacaggttgatagtttgctttctgagagccaactgaaagaagctctagaacccaataaaagacaacatatttatcaaagatgtatccagttaaagcaggcaatagatgaaaataaaaatgctcttcaaaaattaagcaaagctgatgaatctgcacctgttgcaaactataatcagagaaaagaagaggagcatactcttttggacaagcttacccaacaactgcagggccttgctgtgacaataagcagagaaaatataactgaagttggggcacctactgaagaagaggaagaaagtgaaagtgaagatagtgaagacagtggtggggaggaagaagatgcagaggaggaagaggaagagaaagaggaaaatgaatctcacaaatggtcaaccggtgaagaatacatcgctgttggagattttactgctcagcaagttggagatcttacatttaagaaaggggaaattctccttgtaattgaaaaaaaacctgatggttggtggatagctaaggatgccaaaggaaatgaaggtcttgttcccagaacctacctagagccttatagtgaagaagaagaaggccaagagtcaagtgaagagggcagtgaagaagatgtagaggcggtggatgaaacagcagatggagcagaagttaagcaaagaactgatccccactggagtgctgttcagaaagcgatttcagaggcgggcatcttctgtcttgttaatcatgtctcgttttgctacctaatagttctgatgcgaaataggatggagactgtggaagacaccaatggatctgaaacagggttcagggcatggaatgtacagagcagaggacgtatatttctggtttctaagcctgtgctccaagtaacatttctcattagtttttttttttttttgtacaaaaagaatagataattcatggtgtcacttgaggacttggaaacattctcattgatcctgctttcctatcatttgagtggaaacagatgttaaattttatttactattcgaaaaatcctgaaagcctttaataaaaagtaagaaattggccaggcatggtgattcacactggtaatcccaacattttgggaagctgaagcaggaggatcacttgaggccaggaattcaagaccagcttgagcaacatagtgagaccctatcctacaaaaaataagaaaaattagccaggtgtggtggctcatgcctgtagtcccagctactcgggaggctgaggtgggaggattgcatgagtttgggaagtcaaggctgtagtgagctgtgattgtgccactgcactccagagcatgagtgacagggcaagaccctgtcttaaaaaaaaaaaagtaattaattacatttttttaaaggagaaatgatccataattctgtcattaaaaaaaaattacaggccgggcacagtggctcatgggcacagtggctcacacctgtaatcccagcactttgggaggccaaggcgggtggatcacctggggtcaagagttcaagaccagcctagtcaacacagcgaaacctcacctcgactaaaaatagaaaaattagctgggcgtggtagcgcatgtctgtagtcccagctcctggggaggctgaggcaggagaattgcttgaacctgggaggcggaggttgcagtgagccgagaatactccactgtactccagcctgggcgacagagtgagactccgtctcaaaaaacaaaaaaataattacatagccaaatgaaaattctcttcctcaaactcataagtaatcaccattaacaatttagtacgtgtccttcctgacctttttcgttatttattacttataagtacatccttgtatgtgtgagggtgtgtgtctatgagtagtgtgtatgtgtatacaaaaaaaatccattaattcttcagtgcatgtgatttgccaatagacattaacttacctgtgaaatggaagcgcagggtggagcaggacaggagcagggacattttgataagggtatacttgaagcagctgctccggaacacacagctctgcacgctgggcactgtatggggcttaggtccttaggagaggccagggtgctgtgatggcatcctctcaggaatttggggccaaatcgtattattcttccactaaagtctgtatgtttatatttttcttttttgggttatagttactctagtgataaagtattatagagatgcagaaacatgactgaaaacaaatccattttgatgttactgtcttcagcagataaacactgttgatgtgttaactacgatgggagctattcctgcagggttcaggccttccacgctctcacagcttctggaggaagggaatcaatttcgagcaaattacttcttacaaccagagctcatgccttcacaactggccttcagagatctgatgtgggatgctacagaaggcactattaggtcgagaccaagtcgtatttcattgattctgacattatggagctgtaaaatgattcctcttccaggaatgagcatacaggttctcagcagacatgtacgcctctgtctatttgatggtaataaggttctgagcaacattcatacagtcagagccacatggcaacctaaaaagcccaaaacatggaccttttctccccaggttactcgcatcttaccatgtttgcttgatggtgattgctttatcaggtctaattctgcatctccagatcttggaatattatttgaacttggaatttcttatattcgcaattcaactggtgaaagaggagagttaagctgtggctgggtgtttcttaaactttttgatgccagtggagttcctattccagcaaaaacttatgagcttttcttgaatggtggtactccttatgaaaaaggtattgaagtggacccttcaatatccagaagaggtatggctctcatgtgttgtcttcctttccttaaagattaaacaaatagaagcatctgagaggtagctacattctaataagcatagcgttttttacttgaattcacacttttaaaaatatgtcatttgatataaaaattttaatcatttttaagtacttattttcttggtaacacatatgagactctaagacatcatgaagaatgaaatcatgaagaatgagaactaatgcattagttccttttcattgaccactgaactgatacttgtgactaatacagagactgcctattgctgggtcaaaggatgcagacatttgaaacagtaatatgcatgccaaattgccctctagaaatattgagcatcttttactatgttcattaaccaggcactgtgctagataatgggagaatgaagagcaagacagatatggtcattgcctcatggggctcagagcctgacagatttggaattccatttccactcctcagccacccctctatttgtttggtgattcaagacatgccacctctgctgaccccacaacgccagtcctgccttcttggaacagaaaggagtttggggtctgggatgcagttggttctacctggagtcagacatgctgttttcctttgtaatctggcagcaataatgctgtaactcatgtgatttagcaaacaatcctgtgcccttagggaggtctctcagctcatttagggtatatggatgactcttgcctttcattcaattcagcactactgggtggtatattttcatgaaatacttgttttattatactcactgtctcaagtacttaaagtttcgtgagttacttttgatttttcttaaaagcacacggcagtgttttctaccagattatgacaatgagaaggcagcctcaacttctagtgaaactgagatccttgaacagaagatcaagaaatgtactaagtctactgccagaaacattaattggaaatatgtgttctattcacttgttgatattttatcgacaaattcttggagatgtgctcctgaaagacaggatgagcttgcaaagtactgatttaattagccatcccatgctggccaccttccccatgctcttggagcagcctgatgtgatggatgctctcagggtgggtagcatgcattgcaatggaaacctgctggcttatggaagcagttatacactctgtgttaatgagttctgtctaggcctttttttttgttactaggatgatgtctcccaatccctatccattgtctaggtaactcagtcctcatctttcccatcttagcataaattcccaagggctgccttccctgacccagggagcaggtggagtgcctgctatgtacactattgcaatctttgcccattttttccttgacttaggatggccactgattgtgtcctaagagcaaaaatccaaaatggtctgtaagataaatcaattgaatttgcaggggagaatcagggcatgcacatcatctttaattccatgtgtgctgtttgctgtctgaaataactgttgagtgttatgttaaatcgtatgaaatctccaattttcagccatttttggcctaagtggcagtttcatatggtttagcctaatacatcagggtcaataagtagaagagctgcatgcatgcaaggcagatacacaggtaacatcacaagtgccatgggggaggtataacccaggaccttgaagatttaaagaaggcagcaaagaaggatccaaattctgtttcactagagaggtcctgcatgagagagcctaataaaggccagggccaagaggattttgacctgctgagatgggggtgaagacgttgcaggtagaaggcttagcatgagcagacgtttgaggcaggaaggaatagagctgacagtccagcttggcatgtcagatgcaagtaagggagtggttggtagatgggcaaggtaagcctgagtctcggtgtggggctgagggcggtggtaggtggtgggtaacccaggaaggtttcttctttaggcaaactctgccaagtgcaaagaggcagaacatgtgcaggagggaggtgagcatattagggggtgactcctgctgataaaaactaggccatatgcacctgacagcagaaacagaaggaggactcagtcatctacaaagattcttattagactttgaaaccaattcatatgctagcttggctgggttggggggtgtcaatagtaataatgacattttcaacagagatgtttaagaaaatgttcatggtacatatgatctcctgtaattttagataagttcgtctggcactatagctagataatgcagaatttctctttcttctcctataaagtcactagtatcataataattattcattacacagaacatatatacactgattcttcaacaaagatttcacaagagcctactatgtattaatataaggcactgtgctggccacaggaatatttccctaggtgtgtaacaggaatctgcaccttgttcttaggaggaaacttaggatccctaatctagtctaaaatctgcatttccctgatgagcagacagcttggagatgtgcagtgacttggccggccatggagctcagccatgacccagccggggctgtccctgcgggtcagctctgggtgcacccagaatgtgccacgggctgcttgaaagcatgagggtaaagttgtgcacatatgttatttagcaaaaagaccccatttgagccataataagtataaatatatatacatttatatacctgcctgtgaaaagatctggaagaatatattccagagaggtattggtgaatatctctggatcttggattattttatctacattttcttaattttttcacattgaattatttgtgttatgataattttaaaaaagaaagtggtggttgtttctacacccatgagccttcttctctccgtggcatagtgtattacttaggagaagcttggctgtgctgtggtggttagcacaggtttatttcttacccatggtatgtatccagcatggatcagtggaagatgctgctccacagtcacccaagggtacaggctggtggagcctctactgtctcacagcaccatctggaacaagtagctgcctctgttgccagtttccctgcagaagagggagaatggagaattgttcttgggctttcactgcctttgcttcaaaggggcctgggccacttctgctcacattgcattggccaaaaccagtcacacggtccatttaacttcaaaggaggtatagtcttctttttgttccagaagaaaggaagtggatcttggtgaggtaatagtgacctttaacacgtttgctattcccaaatgagttactctaagtgaaacatcctactatttgctggtggctgaatgaaaaataaggtgggacattgacatgtaactaacaaaaatagacaaattttaccagacactaagtctacatttgctaagtgatactcacgttaaaccatattattaggttggtgcaagagaactgtggtttttgccataaaagtagtagcaaaaaccacaattacttttgcaccaactgaataaaatttaaaatgtacagcatgtgagcctcctagagtttacttacctagcacagttcagtttgtggatgacattttaataataagaagaatggcacttggcctgtttagtaaaacactctggttctgtaagggtcctcttcaaactcctaaggacccatagcacagcagttaatagggtggaggaccatagtcccctcacgtggtaataggtatgaacattccaaaatgttctcatgagtggcatagtctgttatctcctgctgagaaacgctctatcaatgcatcatttattttatggagaatctctttattggtgccatatgttatgttcatcccagggcctccctgctgagaaaggtctgatgctttcaggttactcatgatatcaggtgccaacaggaggatatctactgacatgcacagaacccagaccctggaacaggcagccgtgagactggtcatattccacccacgcattcagtttgccaggaaatggcacagtgaaagtcttaaattcatacttctgtgggactaattgaactctggggtttttatttatttgaggaaatttctgtgaagccctgtggacagattagaaatatttactcacaaaattgtacttcagtctgtctcattctgaccattgtcatcatcatgacagagagaattgtagaaaagtttggtatttggcagtgttttctattttcattactgtcttacttggaaagcttaatactattttattattcaggtgctgtggttgtatagttttcatggatgtgttagtgtttcgctgattctattcttaagttagttttgatttataattatcatgggcttctacggcatttttcacagatacatctgcctggtcattctggtgctgggtcatttgcaatagattcctaattacagattcacttcttgcttgtatagaatctgtacagcatttttaaccctgtccataagtttatttacagagtaaatttgcataagtgttgcaaggacttgttactacttggactaacataatatttctgtttgctctttagagttcgtgggctggaaaagaaagcacattaaaaagatcagagaaggtaaaatatgagtctccacactgaactccatatttgcagtacctggtgtttgcttgcctattctaatcatgtctcttttttagcaaaagtagccatagtcataatccctcttaaccagggaaactgtttcattatggctgcaaaaacacattccaagagggttacgcatgatcgttagctaatgtgagaaggaatacttgttcaagacagccatttcagattactgagttttatttaaataaaggggaagtttctaagccaaagtctctcagttgtgtatcaaatttcttttatttttaaaaaacttctctagctctcaaagcctgtatcaccaagagaagggaaaaaaaaatggcctgagctgtaccatatattgaaaacaatgcattgctcctgcttaccttgctataaaatcatggtaattaccaatccgaacttgctttaatcggtgagtcgtggtttgactgctctcatccaggatttggcaaatgggaagggctatagatggaaaatcttcttggcttttcaggtcttgtggtctctgtcacactactcagctctggtgttgtaacacaaaagcagccacagacaatatgtaaatgaccaaatgtgactgttttcctataaaactttatttatgaaaagaggtgagagtccacatttggcccacagtccatactttaccagtcctgatctaaagtattcattatctacaaggaaaatgaagtaacaaatgagctgaaaaccctaaaaattaggaaacaatttatacattgtatccttatttcagcctccatttgatcagtaccatctacatacatgtgactttgccaaaactgccaggcttagtgctattctagtacagcagccttgggcctgtagacattgcccttatgtggacatgtgtggtgggatgggtgatatctctgtgtagactctgctgcctgtggacagctctgccctcaacttgctgtgctctctgagattcccaccatggcctgtgggcatcggggcttgacatgggtacagctgatgctgcaccattcttatctgtgaagggtctgacatcctcatcaccaaaggacccctcgacctccatcccaggcattgctggaaataagccaacaactctggatcctatgcagaacacctgctacaattatcttagataacatgacagttacctctgatatgctgtcagtaagtaggttcagctgacttggcattgttttagttatatttacccctaaccacactggtgtcaccaaaattagactgcaataccttgacagaatgtgtgagacaccctccatggagcttaggagacaccctggtctcatggagccacgtagaggctctcagggagaactgctccactgtactctgtgtaactctgctcacttccacttctgaagtgccatgtcctgcctgagcagctggctcagagccgatacctgccaggcactaatggcaccctccatcctacctcttaggtggcttttagttaatagagttcacagaatttaacactttaaaaataacaatgttatttgtgggggtggtgttttcccagagagacaaagagttcctgaagtccacgtttctcctggtttaccatgactgcgtgctcccacttctccactccacacgcctacccccattcaggtgggcagaagaagagactgagactgcacggtggaaagttatcactgacttccttaagcaaaaccaagaaaaccagggcgccctccaagctctgctgtcaccagacggagttcatgaaccttttgacctttcagagcagacctatgacttcttgggtgaaatgagaaagaatgcagtgtgacagtggcagcctctagccctcagcttcccacggaatcagatggatcctccacgattacgtgaataaaatgatggaaccaaaaatcactgtcactttacaacttaggttttactcttttctttctacagaccatatttttaaagaaatgtttatacaataatttaaatattttttaaaaccataaaataaatttttataaggaatactgttatatctaaatttaaacagtatttattttttcaaaaacagctacttaagttaatggtatagatttctataaaagcaagattttgtcaaaaactaaatttatgattattcaagaaagtgaaaaaaacaacctacagaatgggaaaacatatttgcaaatcatctaactgataaaggtctagtatccaaaatatttaaatttatgagtgttaataaaatttatcttgttcaatgaa

SEQ ID NO: 13067 - DNA, 5245 bp, Homo sapiens
aaaatgtccatatgtctgaagcttcatacttgaccttggggtctcagaaaagaattgaactttcttccttctgttttcccctgctccccggtatcctgctatgccctcaaccctgagcgtctctagagacctcactgcagtctggagggggaagtgcctaggggcgggcgctcacggtaggctgtgctgctcctctcttaccacccccaccgccaccctctgcccccagggagaacagcagcaacatcctggacaacctgctgtcccgcatggagcagtacgcgaacaatctggaggaactggtggaggagcggacccaggcatacctggaggagaagcgcaaggctgaggccctgctctaccagatcctgcctcagtgagtgcctgagtctggggaccccccccaacacaaagcccctgtcccgacccccaactctgatcctgcacctgccctgaccccttagctcagtggctgagcagctgaagcgtggggagacggtgcaggccgaagcctttgacagtgttaccatctacttcagtgacattgtgggtttcacagcgctgtcggcggagagcacacccatgcaggtaggccagggttcagccacaggtgccaggcaagctcagcatctggatcccaccagacctgccttctggttctgctttacccacctgaccccaggtggggtcccctacttcctgtctctcttagcttctcttcccttccaggtggtgaccctgctcaatgacctgtacacttgctttgatgctgtcatagacaactttgatgtgtacaaggtgagggtgggagtggggatgggaagggacagacagacatggacaaggtcagaaaaagatgaggggtaggcagaatgatgtggagtcttaagagaggagatcggggacacgggcagagacagtgacacagggagacccgggaacaggcagagaacccatgtgggatgggggatgagcaaagacagatgagggtacagaatgacagacgctgcacccggtgtgacggtgtggccggccgcacagttgcagccgtcaagtcctgcaccccctcgccactcccacaggtggagacaattggcgatgcctacatggtggtgtcagggctccctgtgcggaacgggcggctacacgcctgcgaggtagcccgcatggccctggcactgctggatgctgtgcgctccttccgaatccgccaccggccccaggagcagctgcgcttgcgcattggcatccacacaggtaaggccactgaaggtgcaggcgggcatccagaggccaaggcttcgcaagggaaacttgtcccctggcccagcccctcgccctttcatctctctctctctctctctctctctctctctctctctctgtctctctctctctctctctctctctctctctctcacacacacacacacacacacacacagagctgggacctcagatcctgcctcctgcctgtcttggattgtccacctacctcccttaacacccctccctccctcactcgctgatgggctctgctccttcccttgctcctcccaggacctgtgtgtgctggagtggtgggactgaagatgccccgttactgtctctttggggatacagtcaacacagcctcaagaatggagtctaatggggaaggtacagtgccccctcctagagggaatggggagggcagggtggctgagggaaatgccatcctggggcagcctgtgcctgcacagcccgtttcagctcctagccctttcgcctcccaagttccccttctcataatattaagagttcaacctgggctcatcaacttgactgtaaccagagactcaggttcctgctgcccctcttgtcaaacgatgtaaaagtatttccgggccagtgctggagagttcccagcaggaatctgattttaagaccctctgtgggccgggcgtggtgactcacacctgtaatcccagcactttgggaagctgaggcaggcggatcacctgaggtcgggggttcgagaccagcctgaccaacatgatgaaatcccgtctctactaaaaatacaaaaaactagccaggtgtgatggcaggctcctgtaatcccagctacttgggaggctgaggcagaagaattgcttgaacccgggaggcagaggttgcgatgagccaagattacaccacgcaccccagcttgggcaataagagttaaactctgtctcaaaaaaaaaaaaaaaaaaaaaaaaaaagaccctctgctccacctttgatgtggtaaagatggcttcagagccagcataagtgaggctgtgaatctcagctccacagctggctgtgtgtcagtttgctatacctctctgagccatggttttcctcatctgtaaaaagagggaaaaaatctatctcacaggaattatgtgagaaacccattaaaaatgtctaccacataattgtcatttaacttttccaagccttagcggattatctgtaaaatgatgtctatctcaggattgcaagaagcctagcacaaaccctggtacccagcaggcacctaataaattcttactcctacccgccccttgctcttgcctcctgtttatcttctatccttctgctgtattcgacacaattcaatgcagtaaacatttattgagtgactactgagtgccaggccctgggatagtaacatggcccagatccagagttagctgagaaattcatgtggaccccatctaaaccttatggtgaaagaaaggctgcttgggagccagtcctgggagcccagagggatctagttcggcaaatattccctgggcactattttgggggctgtcagagtacagccccttgttgagggtccagtcctcaaggagcacattcccagaaattgttcaacattctgggcgctgggggtgcttgtaatcccagcactttgggaggccgaggtgggcagatcacttgaggccaggagttggagactagcctggccaacatggtgaacctcctgtctctactaaaaatacaaaaaattagctgggcgtggtggcacgtgcccgtaatcccagctactcaggaggctgagacatgaaaatcacttgaacccaggaggtggatgttgcagtgagccgagactgcacccctgggcaacagagcgagactctgtctcaaaaaaaaaaaagagagaaagaaagaaaagaaaagaaagaaactgttaaacacaacaaggccactgtgattgatgcaaaccccagaagtagggacatgagttcagacagtggtcaaagagagggtgtggcaatattgggccccactccatcactgacctcctcagccacttgggcagatcaccctgggcctcagttcctcggccacaaaatgagggtatagcatgaaatcatgaaagcaacaatttacatagtgcttcctaggtagcacattccgtttgaatactttatggatgttaaatttaatcctcacaacaaggttttgagatgggtactgacactatcagcattttacagattaggaaaatgaagcagagagaatttattttacatacctaagcaagtatccaagctgaggttcatactgaggcagtgcaggatccaaagtgccagctcctaaccaccatgctgtgtagagccgggtgacactccagagagtgctgtccaacaggatgttccatagtcatgaaaatgttctgtattctgtgctgtccaatacagtagcctctaggcacatatggctacttatcactggaaatgtgacgggtgcaactgaggccctgatttttttttttttttttggagacagagtttcgctctgtcgcccagcctggatggagtgcagtggtgcaatctcggctcactgcaacctccgcctcccaggttcaagcgattctcctgcctcagcctcccaagtagctggaattacaggtgagtgccaccacacacagctaatttttgtatttttagtagagacggggtttcgccatattggccaggatggtctcgaactcctggcctcaagtgatcctcctgcctcagcctcccaaagtgctgggattacaggtgtgagccacagcacccagcctgaatttttaactgtatttagtttaaattaatttaagttgaaacaggcacatgtgattagtggctactgtattggattacacagctccagagttctaaatgagaggctaatgtggtcacgcactacattcagggggtggggcccctctgagctagagggcttcctggcccaaaagagggagagagggtacctgtccacctgtccacccccacagtccctggtctcttttgcctctactttcctgctctcctctctcacattgctcaccttcccttctcccctgtcctacccagccctgaagatccacttgtcttctgagaccaaggctgtcctggaggagtttggtggtttcgagctggagcttcgaggggatgtagaaatgaaggtagagggagaagcctctgccctccccaccttttggggtcctagagggagttacccttctcaagcagccaatgccactcccatccctaaggctctcatctgactggggaaagggcatgtgccactccccagcccatcctcttttttccctccagggcaaaggcaaggttcggacctactggctccttggggagagggggagtagcacccgaggctgacctgcctcctctcctatccctccacacctccctaccctgtgccagaagcaacagaggtgccaggcctcagcctcacccacagcagccccatcgccaaaggatggaagtaatttgaatagctcaggtgtgctgaccccagtgaagacaccagataggacctctgagaggggactggcatggggggatctcagagcttacaggctgagccaagcccacggccatgcacagggacactcacacaggcacacgcacctgctctccacctggactcaggccgggctgggctgtggattcctgatcccctcccctccccatgctctcctccctcagccttgctaccctgtgacttactgggaggagaaagagtcacctgaaggggaacatgaaaagagactaggtgaagagagggcaggggagcccacatctggggctggcccacaatacctgctcccccgaccccctccacccagcagtagacacagtgcacaggggagaagaggggtggcgcagaagggttgggggcctgtatgccttgcttctaccatgagcagaga

SEQ ID NO: 13068 - DNA, 1706 bp, Homo sapiens
aaaatgtccatatgtctgaagcttcatacttgaccttggggtctcagaaaagaattgaactttcttccttctgttttcccctgctccccggtatcctgctatgccctcaaccctgagcgtctctagagacctcactgcagtctggagggggaagtgcctaggggcgggcgctcacggtaggctgtgctgctcctctcttaccacccccaccgccaccctctgcccccagggagaacagcagcaacatcctggacaacctgctgtcccgcatggagcagtacgcgaacaatctggaggaactggtggaggagcggacccaggcatacctggaggagaagcgcaaggctgaggccctgctctaccagatcctgcctcactcagtggctgagcagctgaagcgtggggagacggtgcaggccgaagcctttgacagtgttaccatctacttcagtgacattgtgggtttcacagcgctgtcggcggagagcacacccatgcaggtggtgaccctgctcaatgacctgtacacttgctttgatgctgtcatagacaactttgatgtgtacaaggtggagacaattggcgatgcctacatggtggtgtcagggctccctgtgcggaacgggcggctacacgcctgcgaggtagcccgcatggccctggcactgctggatgctgtgcgctccttccgaatccgccaccggccccaggagcagctgcgcttgcgcattggcatccacacaggacctgtgtgtgctggagtggtgggactgaagatgccccgttactgtctctttggggatacagtcaacacagcctcaagaatggagtctaatggggaagccctgaagatccacttgtcttctgagaccaaggctgtcctggaggagtttggtggtttcgagctggagcttcgaggggatgtagaaatgaaggtagagggagaagcctctgccctccccaccttttggggtcctagagggagttacccttctcaagcagccaatgccactcccatccctaaggctctcatctgactggggaaagggcatgtgccactccccagcccatcctcttttttccctccagggcaaaggcaaggttcggacctactggctccttggggagagggggagtagcacccgaggctgacctgcctcctctcctatccctccacacctccctaccctgtgccagaagcaacagaggtgccaggcctcagcctcacccacagcagccccatcgccaaaggatggaagtaatttgaatagctcaggtgtgctgaccccagtgaagacaccagataggacctctgagaggggactggcatggggggatctcagagcttacaggctgagccaagcccacggccatgcacagggacactcacacaggcacacgcacctgctctccacctggactcaggccgggctgggctgtggattcctgatcccctcccctccccatgctctcctccctcagccttgctaccctgtgacttactgggaggagaaagagtcacctgaaggggaacatgaaaagagactaggtgaagagagggcaggggagcccacatctggggctggcccacaatacctgctcccccgaccccctccacccagcagtagacacagtgcacaggggagaagaggggtggcgcagaagggttgggggcctgtatgccttgcttctaccatgagcagaga

SEQ ID NO: 13069 - DNA, 15305 bp, Homo sapiens; identical to SEQ ID NO: 1225

SEQ ID NO: 13070 - DNA, 4185 bp, Homo sapiens
acactccctggggcaggcgctcacgcacgctacaaacacacactcctctttcctccctcgcgcgccctctctcatccttcttcacgaagcgctcactcgcaccctttctctctctctctctctctctctaacacgcacgcacactcccagttgttcacactcgggtcctctccagcccgacgttctcctggcacccacctgctccgcggcgccctgcgcgcccccctcggtcgcgccccttgcgctctcggcccagaccgtcgcagctacagggggcctcgagccccggggtgagcgtccccgtcccgctcctgctccttcccatagggacgcgcctgatgcctgggaccggccgctgagcccaaggggaccgaggaggccatggtaggagcgctcgcctgctgcggtgcccgctgaggccatgccggggccccggcgccccgctggctcccgcctgcgcctgctcctgctcctgctgctgccgccgctgctgctgctgctccggggcagccacgcgggcaacctgacggtagccgtggtactgccgctggccaatacctcgtacccctggtcgtgggcgcgcgtgggacccgccgtggagctggccctggcccaggtgaaggcgcgccccgacttgctgccgggctggacggtccgcacggtgctgggcagcagcgaaaacgcgctgggcgtctgctccgacaccgcagcgcccctggccgcggtggacctcaagtgggagcacaaccccgctgtgttcctgggccccggctgcgtgtacgccgccgccccagtggggcgcttcaccgcgcactggcgggtcccgctgctgaccgccggcgccccggcgctgggcttcggtgtcaaggacgagtatgcgctgaccacccgcgcggggcccagctacgccaagctgggggacttcgtggcggcgctgcaccgacggctgggctgggagcgccaagcgctcatgctctacgcctaccggccgggtgacgaagagcactgcttcttcctcgtggaggggctgttcatgcgggtccgcgaccgcctcaatattacggtggaccacctggagttcgccgaggacgacctcagccactacaccaggctgctgcggaccatgccgcgcaaaggccgagttatctacatctgcagctcccctgatgccttcagaaccctcatgctcctggccctggaagctggcttgtgtggggaggactacgttttcttccacctggatatctttgggcaaagcctgcaaggtggacagggccctgctccccgcaggccctgggagagaggggatgggcaggatgtcagtgcccgccaggcctttcaggctgccaaaatcattacatataaagacccagataatcccgagtacttggaattcctgaagcagttaaaacacctggcctatgagcagttcaacttcaccatggaggatggcctggtgaacaccatcccagcatccttccacgacgggctcctgctctatatccaggcagtgacggagactctggcacatgggggaactgttactgatggggagaacatcactcagcggatgtggaaccgaagctttcaaggtgtgacaggatacctgaaaattgatagcagtggcgatcgggaaacagacttctccctctgggatatggatcccgagaatggtgccttcagggttgtactgaactacaatgggacttcccaagagctggtggctgtgtcggggcgcaaactgaactggcccctggggtaccctcctcctgacatccccaaatgtggctttgacaacgaagacccagcatgcaaccaagatcacctttccaccctggaggtgctggctttggtgggcagcctctccttgctcggcattctgattgtctccttcttcatatacaggaagatgcagctggagaaggaactggcctcggagctgtggcgggtgcgctgggaggacgttgagcccagtagccttgagaggcacctgcggagtgcaggcagccggctgaccctgagcgggagaggctccaattacggctccctgctaaccacagagggccagttccaagtctttgccaagacagcatattataagggcaacctcgtggctgtgaaacgtgtgaaccgtaaacgcattgagctgacacgaaaagtcctgtttgaactgaagcatatgcgggatgtgcagaatgaacacctgaccaggtttgtgggagcctgcaccgacccccccaatatctgcatcctcacagagtactgtccccgtgggagcctgcaggacattctggagaatgagagcatcaccctggactggatgttccggtactcactcaccaatgacatcgtcaagggcatgctgtttctacacaatggggctatctgttcccatgggaacctcaagtcatccaactgcgtggtagatgggcgctttgtgctcaagatcaccgactatgggctggagagcttcagggacctggacccagagcaaggacacaccgtttatgccaaaaagctgtggacggcccctgagctcctgcgaatggcttcaccccctgtgcggggctcccaggctggtgacgtatacagctttgggatcatccttcaggagattgccctgaggagtggggtcttccacgtggaaggtttggacctgagccccaaagagatcatcgagcgggtgactcggggtgagcagccccccttccggccctccctggccctgcagagtcacctggaggagttggggctgctcatgcagcggtgctgggctgaggacccacaggagaggccaccattccagcagatccgcctgacgttgcgcaaatttaacagggagaacagcagcaacatcctggacaacctgctgtcccgcatggagcagtacgcgaacaatctggaggaactggtggaggagcggacccaggcatacctggaggagaagcgcaaggctgaggccctgctctaccagatcctgcctcactcagtggctgagcagctgaagcgtggggagacggtgcaggccgaagcctttgacagtgttaccatctacttcagtgacattgtgggtttcacagcgctgtcggcggagagcacacccatgcaggtggtgaccctgctcaatgacctgtacacttgctttgatgctgtcatagacaactttgatgtgtacaaggtggagacaattggcgatgcctacatggtggtgtcagggctccctgtgcggaacgggcggctacacgcctgcgaggtagcccgcatggccctggcactgctggatgctgtgcgctccttccgaatccgccaccggccccaggagcagctgcgcttgcgcattggcatccacacaggacctgtgtgtgctggagtggtgggactgaagatgccccgttactgtctctttggggatacagtcaacacagcctcaagaatggagtctaatggggaagccctgaagatccacttgtcttctgagaccaaggctgtcctggaggagtttggtggtttcgagctggagcttcgaggggatgtagaaatgaagggcaaaggcaaggttcggacctactggctccttggggagagggggagtagcacccgaggctgacctgcctcctctcctatccctccacacctccctaccctgtgccagaagcaacagaggtgccaggcctcagcctcacccacagcagccccatcgccaaaggatggaagtaatttgaatagctcaggtgtgctgaccccagtgaagacaccagataggacctctgagaggggactggcatggggggatctcagagcttacaggctgagccaagcccacggccatgcacagggacactcacacaggcacacgcacctgctctccacctggactcaggccgggctgggctgtggattcctgatcccctcccctccccatgctctcctccctcagccttgctaccctgtgacttactgggaggagaaagagtcacctgaaggggaacatgaaaagagactaggtgaagagagggcaggggagcccacatctggggctggcccacaatacctgctcccccgaccccctccacccagcagtagacacagtgcacaggggagaagaggggtggcgcagaagggttgggggcctgtatgccttgcttctaccatgagcagagacaattaaaatctttattccagtga

SEQ ID NO: 13071 - DNA, 992 bp, Homo sapiens
tttgtctgtttgtttctttatgcactcctggtaactcacagaacagaaaagaggttggtgatgctcactgggaattaggcaatgaagggcaggggactgcccaggggcgcttcgccaccagcaggctaaaaagataagaaaatgggcttgaggcgggaggaggataaagtcccacagcctggacaggacttggagaaggcatcccattggatcccctgctttggaatgggcatcacttcatgcagggcatagggtccagtttgaccttgagctaagcagagacgcagctctgggaggtgggctcccaactgttggggccccacagtactagggaatagtcagctcccaactctctgctctccactgacccctttctcaggctgccaaaatcattacatataaagacccagataatcccgagtacttggaattcctgaagcagttaaaacacctggcctatgagcagttcaacttcaccatggaggatggcctggtaagaaggggtcccgggaccctccagcgtggacctccagcccccactccatgaccctctgccagcctccatccttccctattcccagttctccccttccttccctcccttcccattgttccatgtttctcgtgatgatggaggaggacactggcaagttcagcctctgaaactcaggtcatcatcagtaatatggagacgatacatcctgccctgtctacctagtaggattcaggaagtgatgctaatccaaaggcatcgtttaaatagtaaaatctccctgtgatataggggtgttattttctcccatcctcttccaaaatcccagtgcctcttgttcccttccccacagctcccacctccatgcccttcatatgcccaccccagccgacctctgtttgcccctacaggtgaacaccatcccagcatccttccacgacgggctcctgctctatatccaggcagtgacggagactctggcacatgggggaactgttac

SEQ ID NO: 13072 - DNA, 473 bp, Homo sapiens
tttgtctgtttgtttctttatgcactcctggtaactcacagaacagaaaagaggttggtgatgctcactgggaattaggcaatgaagggcaggggactgcccaggggcgcttcgccaccagcaggctaaaaagataagaaaatgggcttgaggcgggaggaggataaagtcccacagcctggacaggacttggagaaggcatcccattggatcccctgctttggaatgggcatcgtttaaatagtaaaatctccctgtgatataggggtgttattttctcccatcctcttccaaaatcccagtgcctcttgttcccttccccacagctcccacctccatgcccttcatatgcccaccccagccgacctctgtttgcccctacaggtgaacaccatcccagcatccttccacgacgggctcctgctctatatccaggcagtgacggagactctggcacatgggggaactgttac

SEQ ID NO: 13073 - DNA, 5689 bp, Homo sapiens
agggcgagcgggcgcgcgaagatggcggcggccgccggcgggccgtgtgtgaggagcagtagagaactgtggactattctgcttggaaggtcagctctgagagagctgagtcagattgaggcagaactgaataaacattggcggcgattgttagaggggctttcttactacaaacctcccagtccaagttcagctgaaaaagtgaaagctaataaagatgtagcttcaccattgaaggaactgggtttaagaatcagcaagtttttgggtcttgatgaagaacagagtgtgcagttactccagtgttacctgcaagaggactacaggggtactcgggactcagtaaagacagtactgcaagatgagaggcagagccaggccttaatcctgaagattgcagattattattatgaagaaagaacctgtattcttcgttgtgtcttacaccttctcacttacttccaagatgaaagacacccctatagggttgaatatgcagactgtgttgataaattggagaaggaactagtttcaaaatacagacagcagttcgaagagctttataaaactgaagcaccaacttgggagacacatggaaatctcatgacagagcgccaagtgtctcgctggtttgttcagtgccttcgggaacagtccatgctgctagaaattattttcctttattatgcatactttgagatggcacccagtgacttacttgtattaaccaagatgtttaaagagcaaggatttggtagtaggcagaccaataggcacctggtggatgagactatggatccttttgtagatcggattggctacttcagtgccctcatcctggtggagggcatggatatcgagtccttgcataagtgtgctttggatgacagaagagaactgcatcagtttgcgcaggatgggcttatttgtcaggatatggactgtttaatgttgacctttggggacattccacatcatgccccagtgcttttggcctgggctctcctccgtcacactctgaacccagaagagacaagcagtgtggtccggaagataggtggcacagccatccagctgaatgtgtttcagtacttgacccgattgctccagtcccttgccagtgggggaaatgattgcaccaccagcactgcatgcatgtgtgtctatggactgctctctttcgttctgacctcgttggagctgcacaccctgggcaatcagcaggatataattgatacagcatgtgaagtattggccgacccttctcttccggaactgttctggggaacagagccaacttctggccttgggatcattctggacagtgtgtgtggaatgtttccccaccttctctccccactcctgcaactgctccgagccctggtatcagggaagtccacagccaaaaaggtgtatagcttcttggataagatgtctttctacaatgaactttataaacacaagcctcatgatgtgatctcccatgaagatggaactctttggcggagacaaacacccaaactcctttatccccttgggggtcaaaccaaccttcgcatacctcaaggcactgtgggccaagtaatgttggatgatagggcatacctggtacgctgggaatactcctatagcagctggaccctctttacctgcgagattgaaatgttgcttcatgttgtttcaactgcagatgtgattcagcactgccagcgagtcaaacccatcattgatctcgtccataaggtcatcagtacagacctgtcgatagcagactgtctcctgcccatcacatctcgcatctacatgctgctgcagcggttaacgacagtgatctccccacctgtggatgtcattgcttcttgtgtcaactgcttaactgttttggctgcccgcaatccagcaaaggtctggactgatcttcgtcacacaggttttttaccatttgtggcccatcctgtctccagcctgagtcagatgattagtgcggaagggatgaatgctggagggtacggaaacctcttgatgaacagtgaacagcctcagggcgagtatggggttactattgcctttctgcgcttgatcaccacccttgtcaaggggcaacttggtagtacccagagccaaggacttgtaccctgtgtaatgtttgtgctgaaggagatgcttcccagctaccataagtggcgctacaactctcatggagtgagggaacagattggttgcctgatcttggagctgattcatgcgatactgaacctgtgccacgagacagacctgcacagcagtcatactcccagcctgcagtttctctgcatctgcagcctggcatacacagaagcaggacagacagttatcaatatcatgggcattggcgtggacaccattgacatggtgatggctgctcagcctcgaagtgatggggcagagggccaggggcagggccagctgctgatcaagacagtgaaactggcattctccgtcaccaacaatgttattcggctgaaacctccttctaatgtggtgtcccccctggaacaggctctctcacaacatggtgctcatggaaacaacctcattgctgttctagccaaatacatctaccacaaacatgaccctgctttgccacgtcttgccattcagctgctgaaacgtctggccacggtggccccaatgtcagtgtatgcttgtctgggcaatgatgcggctgccattcgtgatgccttcctgacccgattgcagagcaaaattgaggacatgcgcatcaaagtcatgattctagagttcctcactgttgcagtagagacccagccaggcctcatcgaactgtttctgaacctggaagttaaggatggcagtgatggctcaaaggaattcagccttgggatgtggagctgtctccatgcagtgctggagctgattgattcccaacagcaagatcgatactggtgcccacccctgctgcatcgtgccgccattgcctttttgcatgctctgtggcaggatcggagggacagtgccatgctggtcctccgaaccaaacccaagttttgggaaaatttaaccagtccgctgtttggaaccctttctcctccctctgaaacatcagagcccagcatcctggaaacctgtgccctaatcatgaagataatttgcttggagatatactatgtagtaaagggttcattagaccagtcattaaaggatacactgaagaaattttccatcgagaaacgctttgcctactggtcagggtatgtcaagtcattggcagttcacgtggccgaaacagaaggcagcagctgcacctccttgttagagtaccagatgctggtgtccgcctggaggatgcttctcatcattgccaccactcatgcagatataatgcacctgactgactctgtggtgcgtcgccagctctttcttgacgtgcttgatggaaccaaagcattactcctagttccagcctcagtgaactgccttcgccttggctccatgaagtgcactctgctgcttatcctcctccggcagtggaagagagagttaggttctgtggatgaaatccttggacccttgacggagatcctggagggagtgctgcaggccgaccagcaactcatggagaagaccaaggccaaggtgttctcagcattcatcacagtgttgcaaatgaaggagatgaaagtaagtgacatcccccagtactcccagctggtgctgaatgtctgtgagaccctccaagaggaagtgattgcactcttcgaccagacccgccacagtctggcattaggcagtgccacagaggacaaggacagcatggagactgacgactgttctcggtcccggcacagggaccagcgtgatggggtgtgtgtcctgggcctgcacctggccaaggagctgtgtgaggtagacgaggatggtgactcctggctgcaggtaacccgcaggctccccatcctacccaccctcctcaccactctagaggtgagccttcgcatgaagcagaacctgcatttcactgaggccacattgcatctgctcctcaccctggctcgcactcagcagggagccacagcagtggctggagctggcatcacccagagcatttgtttgccccttctgagtgtgtaccagctgagcaccaacggcacagcacagacacctagtgcctctcggaagtccctggatgccccctcttggccaggagtctaccgcctgtccatgtccctgatggagcagctgctcaaaactctgcgctacaacttcctgcctgaggccctggacttcgtgggtgtccaccaggagcggaccttacagtgcctcaacgcagtgaggacagtgcagagtctggcctgcctggaggaggcggaccacaccgtgggttttattctgcagctctctaacttcatgaaggagtggcacttccacctgcctcagctcatgcgtgatatccaggtcaacctgggttacttgtgccaggcatgtacctctctcctgcacagtcgaaagatgctgcagcattacttacagaacaaaaatggggatggcctcccctcagctgttgcccagcgagtccagaggccaccgtctgctgcttctgctgccccctcctcctcaaagcagcccgctgctgacacagaggcatcagagcagcaggccttgcacacagtccagtatggccttctcaagatcctcagcaagacgctggcagccctgcgccacttcaccccagatgtctgccagattctgctggatcagtccctggaccttgctgaatacaacttcctgtttgccctgagctttaccactcccacctttgactccgaagtggccccctccttcgggacccttctggccacagtgaatgtggccctcaacatgcttggagagctggacaagaaaaaggagcccctcacccaggcagtggggctcagcacacaggcagaagggaccaggacgttaaagtccctcctgatgtttaccatggaaaactgcttctacctgctcatctctcaggcgatgcggtaccttagggacccggctgtgcacccccgggacaaacagcggatgaagcaggagctcagctctgagttgagcacgctgctgtccagcctctcgcgctacttccgccggggagcccccagctcccctgccactggtgtcctcccctcgccgcagggcaagtccacctctctctccaaagccagccctgagagtcaggagcctctgatccagttggtgcaggcgtttgtccggcatatgcaaagatagggcagtgctgttctgcccacctacccctctccaccagcctacactgcaccctggctggcaggggtgctgctggctgctagggcctatacaatggagggcacctcctgtcacccccctcccggagtagccacgactccagccaccacccactgacgttatttttatactagatgaagaggtcaacagcaggcatggggagccgagtcttctgtgctcaggtcctcacgctgcagacgccccctagaggaactttccttcctttccagcattccccacagcactgccggccaggggagaggcggcagcccagcagagggctctatgcacgggtttcaaacctgttttccacactctgtctttgcagttttggtaattctgtggtctatttatacagatattaaaatcttgtttatagaca

SEQ ID NO: 13074 - DNA, 3937 bp, Homo sapiens
tcatgatccgcccgcctcgacctcccaaagtgctgggattacaggcatgagccaccgtgcccggccctaacaatattattatataacaagattactttccaaaaatttaacaaatcgttttgtatattgagattttttgcttttagagagcagacaaaatggctatgaggcagtgtacaagtttgtatgatcagaaagagcaaaattacctctgttctctcattttgcaggagcagtagagaactgtggactattctgcttggaaggtcagctctgagagagctggtaagtggtggtgttcttgagtgggttctctgggttctttgtgtagcttttgttaccaaaaaaaacctttttttaaatgtaggaagtaaacacatttatttatttagagacagagtttcgctcttgtttcccaggctggagtgcaatggcgtgatctcggctcaccgcaacctccgcctcccaggttcaagcgattctcctgcctcagcttctcgagtagctgggattacaggcatgcaccaccacgcccgactaattttgtatttttagtagagatggggtttttccattttggtcaggctggtctccaactcccgaccttaggtgatctgccctccttggcctcccaaattgctgtgattataggcgtgagccaccacacctggcctatttatttattttgagatggagtttcactcttgttacccaggctggagtgtaacagcatgatcccagctcactgcaacctccgcctcccgagttcaagcgattttcctgccacagcctcccgagtagctgagattacaggtgcatgccaccacacctggctaatttttgtatttttagtggagacagggtttcaccatgttggccaggctggtgttgaactcctgacctcaggtgatctacttgccttggcatctcaaagtcctgggataacaggcgtgacggccactttttttttttttttttttttttttgaggggggtgtcttgctcccaggctggagtgtaagtagctcgatcttggctcacttcaacctctgccacctgggttcaagtgattctcctgcctcagcctccccagtagctgggattagaggtgcccaccaccacgccctgctgatttttatatttttagtagagacagggttttgccatgttggccaggtcggtcttgaactcccgacctcaggtgatctgcctgcctcagcctcccaaagtgctgggattacaggcatgagccaccacacccggctacgtttttttgttgttgttgagacagagtctggctctcgcccaggttggagtgcagtggcacgatcttggctcactgcaacctctgtctcctgggttcaagtgattcctgccttagcctctcaaggagctggggattacagatgcatgccaccacgcccggctaatttttgtatttttagtagagatggggtttcaccatgttggccaggctggtcttgaattcctggcctcaggtgatctgcccacctcagtctcccaaagtgcttggattgcaggcatgagccactgtgcctggtataaacactttttttttgttcctaaaactttataaacgtggtcagatgcagtggctcatgcctgtaaccccagcactttggaaggccaaggcagaaggatcaattgagtgcacaagctcaaggccaaccctggcaagatagcaagaccccgtctctacaaaaaattttttaaaaaattagccaggcatggtggtgcatgtctgtagtcccagctacttaggagtccaaggtgggaggattgcttgatcctgggaggttgaggctgcagtgaactctagcctgggagacacatcgagaccccagctcaaaaaagcaaaaagctttataaacattacgcattccctacttctttgctgaaatgagactacctagcctagctgctgaagtcttttaaatctacctttgtatttcattgattccttttatgaaaagatacctgtgttcattgcttggctgctgagagtaggggtgcaaataccattcttctacctcaacctaagaaagattcttggccaggcatggtggctcacgcctgtaatcccagcactttgggaggccgaggcgggcggatcacctgaggtcaggagttcgtgaccagcctcaacatggagaaaccccgtctctactaaaaatacaaaattagcccggtgtggtggtgcatgcctgtaatcccagctactcgggaggctgaggcaggagattcgcttgaacccggaagtggaggttgcagtgagtcgagatcgcgcaactgtactccagcctgggtgacaaagcgagactccatctcaaaaaaaaaaaaaaaaaaaagtcaggcttggtggcatatgcttgtattagtagttccagctactcaggaggctgtggtggaaagatcgcttaagctcaggatatcaagcctgcagtgagccatgattgcatcactgcactccagcctgggtgacagaacaggaccctgtctcaaaaaacaacaaagaaaacttcaccacaacatcatttatattattaaataattacagtcagcttaagtatatcaaacattagaggaatggtaaatgaattatgatctaccaacttgatacaagtattatgcagcaacttgaaagtatgtttatcaagactttcataataaggttaagtcattatgttataatgttaagcaaagaaaagaaggttacagaattctgtattcaaaatgatttcaactctggggaaaaatgcatattaaaaacactcaaaggaatgtgtaatacttagtgtgattctggaatctgattttttttttttttttttgagacggagtttcgtgcttgttgtcctggctagagtgcattggtgcaatctcggctcaccacaacctctgcctcccaggttcaagtgattctcctgcctcagcctcccgagtagctgggattacaggcatacaccaccacgcccagctaattttgtattttttagtagagacagggtttctccatgttggtcaggctggtctccaactcccaaccctaggggatccgcccgcttcggcctcccaaagtgctaggattacaggcctgagccaccatgcctggccgagtctgattattaataaaactgcatttgggccgggcgcagtggctcacacctgtaatccctgcactttgctgacatgggcagatcacgagttcaggagttcaagaccagcttggacaatatggtgaaaccccatctctactaaaaatacaaaaaaaactgactggcatggtggcgtgcgcctgtagtcccatctgctcaggaggctgaggtaggagaattgcttgaacccaggaggcggaggttgcagtgagccaagattgcgccactgcactccatcctgggtaacagagtgagactccgtctcaaaaaaaaaaaaaaaaaagaaagcacaaaaaactgcatttgcggtcgggtgccttggctcacgcctgtaatcccagcactttgggaggccaaggcaggcagatcacttgaggtggggagttcgagatcagcctagccaacatggtgaaactccatctctactaaaaatacaataattagctgggtgtggtggctggcacctgtaattccagctactcgggaggctgaggctcgagaatcacttgaacctgggaggcggaggttgcagtcagccaagttggtgccactgcactccagcctgggtgatagagtgagactctgtctcaaaaaaaaaaaaaaatactgcatttgtataattaccttgttcttttccagagtcagattgaggcagaactgaataaacattggcggcgattgttagaggggctttcttactacaaacctcccaggtatggcagttccgggtgtctggttaaagtaattgtcctaaggaagctg

SEQ ID NO: 13075 - DNA, 408 bp, Homo sapiens
tcatgatccgcccgcctcgacctcccaaagtgctgggattacaggcatgagccaccgtgcccggccctaacaatattattatataacaagattactttccaaaaatttaacaaatcgttttgtatattgagattttttgcttttagagagcagacaaaatggctatgaggcagtgtacaagtttgtatgatcagaaagagcaaaattacctctgttctctcattttgcaggagcagtagagaactgtggactattctgcttggaaggtcagctctgagagagctgagtcagattgaggcagaactgaataaacattggcggcgattgttagaggggctttcttactacaaacctcccaggtatggcagttccgggtgtctggttaaagtaattgtcctaaggaagctg

SEQ ID NO: 13076 - DNA, 1749 bp, Homo sapiens
tggcccatcctgtctccagcctgagtcagatgattaggtgagccaagtcctagggtggtgggccatattccctagtgagaaccacatatgtctcagatctagcctaggtttattaattttatttttatgtatttgtttgtttatttttttgagatggagtctcactctgttgcccaggctggagtgcagtggtgcagcctccgcctcccatgttcaagcagttgttgtgtttcagcctcccgagtagctgggattataggctcgagccaccacgcccagctaatttttgtattatttatgtatttatttactttttttattttttgagatggagtttcgctctgttaccgaggccagagtgcagtggcacgatctaagctcactgcagcctctgcctcccgggttcaagcaattctcccacctcagcctccccggtagccaggattacagatgtgcggcaccacgcccggctaattttttgtatttttaatagagacgaggtcttaccatgttggtctgactcgtctggaactcctggtctcaagtgatctgcccgccttagcctctcaaagtgctgggattataggcgtgagccaccgcgcctggcctgatttttttttttttttttttgagatggagttgcgctcttgttgccccggctggagtgcaatggcgtgatcttggctcaccacaacctccgcctcccaggttcaagtgattctcctgcctcagcctcccaagtagctgggattacaggcattcaccaccacgccccggtaattttgcatttttggtagagatagtgtttcaccgtgttggccaggctggtctcgaactcctgacctcaactgatccgcctgccttggcctcccaaagtgctgggattacaggcatgagccatggtgcccggccgagagcaagagagatttcttatccaacatcaatcacgttagtatgtgagcatttactttccagcccagaaaatccagaggtttctagattcagggacttggtgtcccgttattaagccacaatcactctgtactttttctcatttcatgggttctcgagctcagccagtagaccacttaccagtacacaggctccatcttactacctgagcattctcgccttgctgtctcttgacaaaaatgtttccctgatgttcctttgatttttttactttcaatctaggttttacatcaataaaacatgttcttaatgtttaccctgggtacagaactgtcttgattggattatttccactggagagcttttctattttatattcaagtcatctagactataacaagaatgctctatgattagtttcttgaaaccttgaaatttccctatcattttttttccctctacttctttttccagtgcggaagggatgaatgctggagggtacggaaacctcttgatgaacagtgaacagcctcagggcgagtatggggttactattgcctttctgcgcttgatcaccacccttgtcaaggtacagtctgattttgttcacaaagggcagaaaaagaaaaggtccagtcttgtcagatgactctgaaatagtttccctggcccctggtgctgtaatcttcttgtctgtaggcagaatagtcatcttgaagttacagtgacaacagtttctatgtattgagtacctagtatgtgccagttatgtactctattaggtgcttaattatgtgaatttatttaatgattggaaggtttatgaagtagaatgga

SEQ ID NO: 13077 - DNA, 400 bp, Homo sapiens
tggcccatcctgtctccagcctgagtcagatgattagtgcggaagggatgaatgctggagggtacggaaacctcttgatgaacagtgaacagcctcagggcgagtatggggttactattgcctttctgcgcttgatcaccacccttgtcaaggtacagtctgattttgttcacaaagggcagaaaaagaaaaggtccagtcttgtcagatgactctgaaatagtttccctggcccctggtgctgtaatcttcttgtctgtaggcagaatagtcatcttgaagttacagtgacaacagtttctatgtattgagtacctagtatgtgccagttatgtactctattaggtgcttaattatgtgaatttatttaatgattggaaggtttatgaagtagaatgga

SEQ ID NO: 13078 - DNA, 1796 bp, Homo sapiens
ttctgccaattttctgggagctcttcagtgcccttctgtgggagcccattgaggtttttgtggaagcagagctctaagcctgtgtgttccggtctccaccaggtggccccaatgtcagtgtatgcttgtctgggcaatgatgcggctgccattcgtgatgccttcctgacccgattgcagagcaaaattgaggacatgcgcatcaaagtcatgattctagagttcctcactgttgcagtagagacccagccaggcctcatcgaactgtttctgaacctggaagttaaggatggcagtgatggctcaaaggtaagcctgtaacctgggatgacactgggagttggctcactgggaggcagatgctgggctctgcaagtacagctgctggcagtggctgtggaactgaactcttacctgtcccttcttgcaggaattcagccttgggatgtggagctgtctccatgcagtgctggagctgattgattcccaacagcaagatcgatactggtgcccacccctgctgcatcgtgccgccattgcctttttgcatgctctgtggcaggatcggagggacagtgccatgctggtcctccgaaccaagtaagtctgcctctgggagtagtttcattgttctggtctataaaatgggagtaataatagctcttatcccagaggtttgttgtgacagttcactgggaataagagtgcttagtcctggttcaatacctgggagttttacactaattctctttctaatgctgctgcaagtattaaggatctttaaatattaagcacctggaaggttcagttgcttttgtgttcctgccttttgctaactagctgcatcaaaactcattattcttgagaaacagtagattcaggagagaggcgcttgctcaagtcactggattgaatgaaacattccgttctattggacctgctggcacaaagggaaggagtgttaaaaggctaaatttgggagtctgctgtcttatttccctccctcctcttctgtggggcttttgggaatctacagtggaaggaatcttgaagagtttttattgatcaactctataatgcataagtgtgattcatgagaggaaaatgtaattttatctatggaaacctttcatttatacgggaacaactgacttatcagacacatattaggattgagactggtaaaatatgaagtgaccaccaaagggagcttgagagaggagaaaatgactgtgagagggaaaaagttatgatttcaaacatttatttcctttttagacccaagttttgggaaaatttaaccagtccgctgtttggaaccctttctcctccctctgaaacatcagaggtaagctgtggcagagggcaggatggtggctacaagtcccttggaggaaaggctgtgggctgtgagatggggccgtagacaatgatacctcccctaattaaacaacagaatgttcccttcactagaaacgtctttctcagggaagtgccagctttctgtccctttgatgtcttgctttgggaaggaaagtggtttgcgctactgtgtgttggtggctctgtggtcttctccattcagttggagacgttgtggacctgacgcctctgctcttgcaagtcaggacattcacattcaacaggggttgtgctaacttgttctgcaagtgttgggcccctgctctgttccctgtttgatatactgggggagatcagtgatcagagatgtgataattgcctgttctgctatctccacagcccagcatcctggaaacctgtgccctaatcatgaa

SEQ ID NO: 13079 - DNA, 584 bp, Homo sapiens
ttctgccaattttctgggagctcttcagtgcccttctgtgggagcccattgaggtttttgtggaagcagagctctaagcctgtgtgttccggtctccaccaggtggccccaatgtcagtgtatgcttgtctgggcaatgatgcggctgccattcgtgatgccttcctgacccgattgcagagcaaaattgaggacatgcgcatcaaagtcatgattctagagttcctcactgttgcagtagagacccagccaggcctcatcgaactgtttctgaacctggaagttaaggatggcagtgatggctcaaaggaattcagccttgggatgtggagctgtctccatgcagtgctggagctgattgattcccaacagcaagatcgatactggtgcccacccctgctgcatcgtgccgccattgcctttttgcatgctctgtggcaggatcggagggacagtgccatgctggtcctccgaaccaaacccaagttttgggaaaatttaaccagtccgctgtttggaaccctttctcctccctctgaaacatcagagcccagcatcctggaaacctgtgccctaatcatgaa

SEQ ID NO: 13080 - DNA, 19023 bp, Homo sapiens
gggttactattgcctttctgcgcttgatcaccacccttgtcaaggtacagtctgattttgttcacaaagggcagaaaaagaaaaggtccagtcttgtcagatgactctgaaatagtttccctggcccctggtgctgtaatcttcttgtctgtaggcagaatagtcatcttgaagttacagtgacaacagtttctatgtattgagtacctagtatgtgccagttatgtactctattaggtgcttaattatgtgaatttatttaatgattggaaggtttatgaagtagaatggaagaggccaaaagggtattgcagttactatcaagctattttgacagtaacctgggataatatcatatcccagtatatatacatgtgtgtatattcctgaagcaaaatttcacagtttatttcacaacatttattcttaccacacaagttgtaccctgatattttctattcagtctcctccctatttaagtgaattttgaccatagactgatctcataatctactaatgggttacaactcggtttgaaaaatactgacatagagcataaataatgacatagagcataaattttggagtcagaattaggtttacattcaggttgacagcttactagctgcatgaccttgagcaagtaaagaatatcttaagagtctctaaaacagaatgctatatggtctctacctcatgggattgagaagagggtcatgcatgaaaaaaactatacttcctgcctgcaggaatcaatgaatgcttaaaaagaaatgattgtaggctgggtgcagtgattcatgcctgtaatcccagcactttgggaggccgaggcggatggatcacctgaggctgatcaggagtttgagaccagcctggccaacatggtgaaacctcatctctactaaaaatacaaaaattagctgggcgtggtggtggacgcctgtaatcccagctactcagtgggctgaggcaggagaattgcttgaacctgggaggcggaggttgcagcgagtcgagatcacgccattgcactccagcctaggtgccaagagtgaaactccatcttgggggcgaaaaaaaagattgcatatagagataggaatatatagatatttatatataactaaagagtccccatttttagtagaaggatgctacagttaacagatatcattgggtatcagatttttgcatatcagatctcctttctagtatttcagtgatgggattgaggttagggacggctggcaatcatgatagtgaagtggcattgttcatcatcagcaatcctctatcctttatgtttaaggtgcctcccttctgtccagatttagcctgcatcccttttcttcgtgttggtgccttttgtgacattctctttcatcactttttctattctagaaaagacccacaacttgggctcaactataaagtaggacttttgatgtttcttttttttcattgatgaccaaggtttgcctagatttcctttggacctatctatggttttggaattaaatctctaggtaactaaatgacttttccttaaatgtgcggaagtcctcactgcatggtttcttgtaggggcaacttggtagtacccagagccaaggacttgtaccctgtgtaatgtttgtgctgaaggagatgcttcccagctaccataagtggcgctacaactctcatggagtgagggaacagattggtaaggacagcatgggcagggaagacctggggatttctggccccactggagagcttttttctttccctttcttgagataaggggtcatttcacaaggccacatcattcctctgtcttttctggagtccaggttgcctgatcttggagctgattcatgcgatactgaacctgtgccacgagacagacctgcacagcaggtaatgaagggttgattactagagcttggtgctcgccaaggcaagacacgggcttttgctgtgcaaagccgtctcagttcttccagagaatttaccttgcttgagcccagaactcagtaatcttgaggttgttagttgctttccattggcctgtttatcatttctcactgtggacagagaagtaggaatgagagagagagagagagagagagagtgtgtgtgtgtgtgtgtgtgtgtgtgtgtgtgtgtgtgtgtgtatgtgtatacatacactaatatattaatcattctttatgatcgttacaaaagttcattcctgacgagacactcttcatatatatctgcatcccagggccagttactatgtattcttggttttttcctctttctgtattgactgtaactttctttccatgctactgcttatagatgtcttattttaatggttctatgcattccatcatatggattaattatgatccttttcagtagctgtatctgttacttgatggacatttagattgcttctcagggtgatctttaggtgatcaagtctgtttcaggaaagtgatcagagtgccttcagcttgcagagagctggtctccagtgtccagtaggttaggttagccaccctagcctaattggacaatgcccttccttccaagatacactgagtggctccctggtaactcagaatacctctgtcttccagtcatactcccagcctgcagtttctctgcatctgcagcctggcatacacagaagcaggacagacagttatcaatatcatgggcattggcgtggacaccattgacatggtgatggctgctcagcctcgaaggtagggctccttctccacgttccctttgtctgtctttattgtgcctgcatgttactaataactccagtttaagttaacttgcagtagcttttagaagacgacattgttcttcctaggacatagcctttacataccctagtggctgctgtatagattggcgtatagcaaagggagttgattactcctcctctctcctagtttggactggggcctctaacagaagctgttgaactctgggattattgttggaatctaattcatgagagcacatatattgcgaatgaagtcatactgtctgaatcatctttggtttccatttggcaccctagtgatggggcagagggccaggggcagggccagctgctgatcaagacagtgaaactggcattctccgtcaccaacaatgttattcggctgaaacctccttctaatgtggtgtcccccctggaacaggctctctcacaacatggtatgtatttctcttccagtcacaacatggtatgtatttctcttccagtcatttttgctcataaatacgtatcttaggcagtgtttttggatgtcaacagtattttctgcttcttgaggaagtttgggaatgattaccagctcctttcctgaaattggaaacaaaaggactagatggtactttatttctgcctcctattgatgatagaataatagttaagaatgcagatttgaagtcagactgccttggttcaaattttgtatccaatcaactgtgtgaccttgggtacgttattaaacaactctgcctctgatttctcatctgtaaaatggggataatggtacaggttgagtatcccttatctgaaatgcttgggaccagaagtgttttgggtttcagatttttttttcatattttggaatagttgcagtatacttaccagtttagcataaatccaaaatgttccagtgagcatttcctttgagctatagttagagattttgacacattccagattttttttaattttttaatttttttttttttttttttttttttttgagacagtctagctctgttgcccaggctggagtgcagtggcgcaatctcggcttactgcagcatctgcctcctgggtttaagcaatcctcctgcctcagcttcccgagtagctgggattacaggcatctgtcccacgcccggctaatttttgttttgttttgttttattttgttgttttgttctgtttggtagagacgagctttcgctatgttggccaggctggtctcgaactcctgacctcaggtgacttgccctctttggcctcccaaagtgctgggattacaggcatgagccaccgtgctctaatttgaggttttcagattatggatgcctgtagtatcttcctaataagattataataaagggctgggcatggtggctcacgtctgtaatcccagcactttgggacggtgaggctggggaggatactttgagtccaggagttcgagaccagcttgggcaaaataaggagacctccatctataccaaaacaaacaaaaaaaagtagctgggcctggtggcatatgcctgtggtcccagctactcaggaggctgaggttgggggattgtttgaagcttggcaggtcaaagctgcagtgagccatgattttgccactgcactccagcttggacaacatagtgaaaccctctctcaaaaagaaaaaaagataggctgggtgcagtggctcacgcttttaatcccagcactttgggaggccgaggtgggcggatcacgaggtcaggagtttgagaccagcctggccaacacagtgaaaccccatctctactaaaaatacaaaagttagctgggtatggtggtgggtgcctgtaatcctagcactttgggaggccgaggtgggtggatcacttgaggtcgggttcaagaccagcctggccaacatggtgaaaccctgtctctattaaaaattttaaaaattagctggacgtggtggtgcacgccagtaatcccagctactcaggaggctgaggcaggagaattgcttgaacctgggaggtggaggtgcagtgagtcgagatcgtgccactgcacttcagcctgggtgactgagtgagactctgtctcaaaaaaaattaataaataaataaaaattaataaaataagcacctattttattcaaaatgtatctttgctgtcgatgagttgggttgaactgtttatccccaaattctgactattcttttgctcctcaatcaagagaaggatacagccacctaggtttgctgtggccctccaagtacttgagggtaaattccttcacatacacactgtgggtcttttttgaacagtcagtgctctaaggacttgaattaggcacacttgatatctaaactgtttcctgtgctgctttaggtgctcatggaaacaacctcattgctgttctagccaaatacatctaccacaaacatgaccctgctttgccacgtcttgccattcagctgctgaaacgtctggccacggtaggatcgtacttcatgcacacacactgtttatatgagggtgtttttttccccctgattacaaaagacatgctcaggccacgtgcagcggcttaacgcctgtatataattccagcactttgggaggccaaggtgggaggatcatttgagcccaggagttcaagaccagcctgggccacatagtgagaccccatctctaatatagaaaaaaggagaaaaggctgcgtgcggtggctcatgcctgtaattccagcactttgggaggctgaggtgggtagatcacaaggtcaggagttcaagaccaacctggccaagatggtgaaaccctatctctcctaaaaatacaaaaattagggggccgggcatggtggctcacgcctgtaatcccagcactttgggaggccgaggcgggtgtatcacagagtcaggagatcaagaccatcctggctaatacggtgaaaccccttctctactgaaaaatacaaaaaattagccaggcattatggcaggcgcctgtagtcccagctaattgggaggctgaggcaggagaatggcatgcactagggaggcggaacttgcagtgagctgagatcgcgccactgcactccagcctgggtgacagagcaagactccatctcaaaaattagccaggcgtggtggcaggtgcctgtgatcccagctacttgggagcctgaggcagagagttgcttgaacccgggaggcagaagttgcggtgagctgtgatcacgccactgcactccagcctgggcgacagagcgagactccgtctcaagataaaaggagaaaaaagacatgcttattgtaaaatatttatttaaatgttacaaatagatgtaacagaaagttaagatgccctatgatctccttattccaagaatccctatgggcagggggatatgccatgctccagatttcttttttttttttttttttttgaaatagggtctggctatgtctccaaggctgtgctccacatttcttatctgtgttcttgtattttaaaaagtatcggctgggcgctgtggctcacacctgtaatcccagtactttgggaggctgaagcaggtggatcatgaggtcaggggttcaagaccagcgtggccaagatggtgaaaccccacctctactaaaaataccaaaattagctgggtggcaggtgcctgtaatcccagctactcaggaggctgaggcaggagaatcgcttgaaactgggcaacagaggttgcagtgagctgagatcacatcactgcactccagcctgggcgacagagtgagacaccgcctcaaaaaataaaataataaaggtatttagggctgggcgtggtggctcatgcctgtaatcccaggactctgggaggcccaggtgggtggcttgcctgagctcaggagtttgaaaccatcctgggcaacacggtgaaaccccatctctactaaaatacaaaaaaattagccgggtgtggctgcgtgtgcctgtagtcccaggtactcagtaggctgaggcaggagaattgcttgaacccgggaggtggaggttgcagtgagccgagttcacaccactgtgctccagcctgggcgacagagtcaaaaaaaaaaaaaaaagtatttgagtgtgtacttttgttcttgataaaagcagaattcctggtactgtttttctttcttttttttttttttttttgagacggagtctcgctctgttgcctaggctggagtgcagtggcgcgatctcggctcactgcaagctccgcctcctgggttcagccattctcctgccttagcctcccgagtagctgggactacaggcgcctgccactgcacccggctaattttttgtattttttttagtagagacggggtttcaccgtggtctcgatttcctgacctcgtgatctgcccgcttggcctcccaaagtgctgggattacaggcatgagccaccgcgcccagcccttcctggtactgtttttgttttgagacagtcccactccatcacccaggctggagtgctgtggcatgatctcactgcagcctccactcccaggttcatgcgattctcctgtctaagcctcccaggttgctgggattacaggcgcccactacaacacccagctgatttttttgtatttttagtagggacgaagttttgccatgttggccaggctagtctcgaactcctgatctcaagtgatctgcctgcctcagcctcccaacatgctgggattacaggcgtgagccactgtgcctggcccctggtactgttttatgactggcttcctttacttgataccatatcaggcagtcttgatgtgcttcatgccacataggcacatttggacttccttcattcttttttgtcttttttcctttttttaatttggacttccttcattctttttaatgtttgcatatcacatcctagaatggatgcatcctgatttatttgcgctactttctgtctttcactattacaagcagtgctgcagtgaacattattatccctaccaccctgtaaacatttgtttacagttccaaagatttatgtaggtataaatgaacatgatattttttattagatatttccaaattaccttccaaaaaacattgtaacagtttatacttataacaccaagtattctatcgttgctgcaaggtcttcatcattgtttagtctttgccaatctaataagcaaaaaaatgtttcacttttcagtttgtatttatttaaccatgagggaagttgagcatttctttatactgattactgtctttcctgtgaatttgcgggcatctcatgcttgtttgtggtgatgtcccttttagcccagagctgtagtctggatgcttccctttctgccaattttctgggagctcttcagtgcccttctgtgggagcccattgaggtttttgtggaagcagagctctaagcctgtgtgttccggtctccaccaggtggccccaatgtcagtgtatgcttgtctgggcaatgatgcggctgccattcgtgatgccttcctgacccgattgcagagcaaaattgaggacatgcgcatcaaagtcatgattctagagttcctcactgttgcagtagagacccagccaggcctcatcgaactgtttctgaacctggaagttaaggatggcagtgatggctcaaaggtaagcctgtaacctgggatgacactgggagttggctcactgggaggcagatgctgggctctgcaagtacagctgctggcagtggctgtggaactgaactcttacctgtcccttcttgcaggaattcagccttgggatgtggagctgtctccatgcagtgctggagctgattgattcccaacagcaagatcgatactggtgcccacccctgctgcatcgtgccgccattgcctttttgcatgctctgtggcaggatcggagggacagtgccatgctggtcctccgaaccaagtaagtctgcctctgggagtagtttcattgttctggtctataaaatgggagtaataatagctcttatcccagaggtttgttgtgacagttcactgggaataagagtgcttagtcctggttcaatacctgggagttttacactaattctctttctaatgctgctgcaagtattaaggatctttaaatattaagcacctggaaggttcagttgcttttgtgttcctgccttttgctaactagctgcatcaaaactcattattcttgagaaacagtagattcaggagagaggcgcttgctcaagtcactggattgaatgaaacattccgttctattggacctgctggcacaaagggaaggagtgttaaaaggctaaatttgggagtctgctgtcttatttccctccctcctcttctgtggggcttttgggaatctacagtggaaggaatcttgaagagtttttattgatcaactctataatgcataagtgtgattcatgagaggaaaatgtaattttatctatggaaacctttcatttatacgggaacaactgacttatcagacacatattaggattgagactggtaaaatatgaagtgaccaccaaagggagcttgagagaggagaaaatgactgtgagagggaaaaagttatgatttcaaacatttatttcctttttagacccaagttttgggaaaatttaaccagtccgctgtttggaaccctttctcctccctctgaaacatcagaggtaagctgtggcagagggcaggatggtggctacaagtcccttggaggaaaggctgtgggctgtgagatggggccgtagacaatgatacctcccctaattaaacaacagaatgttcccttcactagaaacgtctttctcagggaagtgccagctttctgtccctttgatgtcttgctttgggaaggaaagtggtttgcgctactgtgtgttggtggctctgtggtcttctccattcagttggagacgttgtggacctgacgcctctgctcttgcaagtcaggacattcacattcaacaggggttgtgctaacttgttctgcaagtgttgggcccctgctctgttccctgtttgatatactgggggagatcagtgatcagagatgtgataattgcctgttctgctatctccacagcccagcatcctggaaacctgtgccctaatcatgaagataatttgcttggagatatactatgtagtaaagtgagtactttcccctcttgagattttaactgaaggttgggggagtgggagttggtggcctaccactgggtgcatggctggaagagccaaggcagaggagagaactggtttggaaccattcatggaaggccagtgagctgtgttcctggccaatccaccgatggcatttatgattgtcagaaagagttattgtgaagcaaactccatgcaactgggattttatggaggaggaatcctggaaaggcctcagcctaacccacacgttggaggtgtcctggagccgtctgcctttaagcccatgcaaggtcgttttctctgcctcaacaagggtctgtacccattatattcccatctgctttcaaaatctaactggaggttttttcttgacactgtaggggttcattagaccagtcattaaaggatacactgaagaaattttccatcgagaaacgctttgcctactggtcagggtatgtcaagtcattggcagttcacgtggccgaaacagaaggcagcagctgcacctccttgttagagtaccagatgctggtgtccgcctggaggatgcttctcatcattgccaccactcatgtaagacccttttggggagagttttcactttggtaccttagcaatgatgtgttgacatgagcctagcagatacagctccttgtgcggaagaattaatcagggtttatccctgagagctaaactgtaataggttctatgctgagagattgggactgtggggtatttgagggtgttgggtccaggagaccattaagaggaatgcagagaagtgatttgaaatcctttcagagttcctaaagcctcctgtacctcccttaggccttggctgggtcttagctgctccctggctgcatctgcctcttgtgcaaaggcataactgtcttctcgtgctgtgtaccttgtagatgctaggtcaataaatacttgttgactagtcagcagggagctgtgacagctgcagcagcaccctctctaaaaagcagtttgtcattggttctagaaactgcatttcctggtcttagaaaaagaacagaggccattgtctctgtactctgtctactgggagttggttttgagagagagagataacatctggaagaaatgcattgttcttggcttttttgtggtttgactccgtcacgctgtatcataaggacttggtattgaagtgttctttcttggggtatccagattaatttttttttttttttcttgagacggagtcttgctccgtcacccaggctggaatgcagtggtgcgatcttggcttactgcaacctccgccttccgggttcaaggaattctcctgtctcagcctcccaggtagctgggattataggtgcctgccaccacgcccagctaatttttgtatttttcgtagagatggggtttcaccttgttggtcaggctggtctcgaactcctgacctcaggtgatccacccacctcggcctcccaaagtgctgggattacaggtgtgagccaccacgcttggcccagattaatcttttgacttcatgaacaacttcagcttgatagatgcctcctttttccaagcacctcctacatctgtgaaatttgttgcctagtgccagactgcccacatgcttggagctttgagcctaggaggggcaggtttgtggctactcttgctgtggcatggtggttttggacccctaaggctccaaacacacttaaaggctcacctgtctttgagaatggttgattccccagggtataacctttatgtcacctgccttttaggccctagttaggcagcagttcttgaattgtagctctgaaaatcccaccatcctctttccccaaaggaaacctatctggctctctgtctcacctgtctacctatacaaaagaaaagaaaaaaaaagagaaagaaacctaagtccaggatgttggtcacccattcattctcttaatggcattagtggaacgcttccaggcattgagatgcagcagtgaataaggcagataagatctttgatcgcatagagagtgccctatgatggaggaggtaaattataaacaaatttagcaataaaaaatatggtttcagatagtgataatttgctgtgaaggaaataattaaagtgctgtggtaatgaacacatgagatagaagtagtcagggtggccttctctgagtggtgatgtcccagctgagagctgaatgtgtgaagaagccttccaggtggagcccgtggaggagagaagtctaggcagatggacttgcaagtgcaaagttccagcagtggaaaagagcttgatatgttcatgaaagaggcaagcagggttggactagagtgagcacagatgggactgatactacatcagttggaccagatcctgtggggtctttggaccatgttgaagagcttggtttgcgtttcccgggcactgggaagcctttcaaggattctaagcagagggaggacagagtctcaaagaggaggtgaacctgggcttgattctgaccatatctaagggttgacagaagaacagcagggccttcaagccctattttactttattttttagggaacaggatctcactatgttgatcaggttggagtgcagtggtgcaatcatggctcactgcagcctcaacctccagggctcacgtgatcttcccacctcagcctcccaagtaactaggactacaggcatgcaccaccatacccagctaattaaacattttttgttgttgttgagatagggtctcatcatgttgcccagactataagccctattttattttatttatttatttaagacggagtctctctctgtcgccaggctggagtgcagtggtgcgatctcggctcactgcagcctccgcttcctgggttcaagcaattctcctgcctcagcctcccgagtagctgggactacaggtgcgcgccaccatgcctggctaatttttgtatttttagtagagacagggttccaccgtgttggccaggatggtcttgatctcctgacctcgtgatccgcccacctcagcctcccaaagtgttaggattacaggcatgagccaccacgcccggcctatataagccctattttaaatcagggagactgttttaccaatgactaattgcctagcagaggaccccatgtttcttggcctctaaaatctggaaaattttcccagctgaaacctttttctgttcctttgcaggcagatataatgcacctgactgactctgtggtgcgtcgccagctctttcttgacgtgcttgatggaaccaaagcattagtaagtgtgtctgggagattttacatttctcccagggaggttgtctttgaagtcaaatagcagaggtcatgagtctgccagccagccgcacaaatagtcaggtcacagggctcacgttggcctgggaggcctgagactgtagtgggtcagcagagctctgctgctgccatgccaaccctggcttctccccctccactccactcctgtgagctcactgctggggaagaaaggcaatgaggccggaggtgccctgtggatggcatgcgaatctttccactgacttctgactggtgtgctgtctcctttcagctcctagttccagcctcagtgaactgccttcgccttggctccatgaagtgcactctgctgcttatcctcctccggcagtggaagaggtgaggctgtgccaggagaggcaagcccgaggccagagccttcttgtcagtgcctgcttgccttcctgaaagggagaaatagtgggtggaagctgggctggttttccatcttgaggaatgggagtgacatagcagataggagggtgaggcagactggtggatatcctgagatggagcaggggcagtgtgtggccttttatgaggtattttgtctcactccccaccccgtattcttttttttttttttttttgagacggagtctcactctgtcgcccaggctggagtgcagtggcgcgatctcggctcactgcaacctccacctcccaggttcaagtgattctcgtgcctcaacctccctagtagctgggattacgggtgcgcgctaccatgcctaatttttgtatttttagtagagacagggtttcaccatgttggccaggctggtctcgaactcctgacctcaggtgatccacccgccttggcctcccaaagtgctaggattacaggcatgagccaccacgcctggcccacccagtattctttctagagagttaggttctgtggatgaaatccttggacccttgacggagatcctggagggagtgctgcaggccgaccagcaactcatggagaagaccaaggccaaggtgttctcagcattcatcacagtgttgcaaatgaaggagatgaaaggtgaggggcagaggcagggggagcagcagctgcagtctgcccactcctgctgacagccaggcagggcttccttcagcttagggccacacatttcttctgggacttttgagtttccagtcatggaattcttaccccaagaaagctatttttttccctcatgtgtctctccctcctctcccactggacagatgctgtccctcctagcgccctagtacatctccagccccttcctaggaaggaaaccttggtgtacagtgagagttggcctggtgagcatgacagtgtccctccctgtctattctacagtaagtgacatcccccagtactcccagctggtgctgaatgtctgtgagaccctccaagaggaagtgattgcactcttcgaccagacccgccacagtctggcattaggcagtgccacagaggacaaggacagcatggagactgacgactgttctcggtcccggcacagggaccagcgtgatggggtgagacagtgccctagaaggccatccgtcctttccactgcccgccagctctgtgcctgactctggggataagtagtgatcaagacagatagtcgctgcacttctggagttcacggcctggtgggaaaggttaatagatcagacactgcagaaaagcagaagcagcccattgtactgcaggagagaagtgcagggagaacttagtctcacttctgacttgaactgggacttaggtgccttttcagcaatgacttagagattgtagccgcgggcaaatgcaggatccgaagtgaaataggaaatgatgtaaggcttttaagcaggggaaaaagttgatctgatttttactctagaaagatcactctggacttaaactccaggcctcaagccatcctcccagttcagccttccaaagtgttgggattacaggcgtgcccaagaaagatcactctggatgcagtattgaatagtatttttcaaattgtgggatcatgacctattagagagagtcttgaaattagcacattttgttacaaccagtctcgctctgtcgcccagggtggagtgcagtggtgcgatcttggctcactgcaagctctgcttcccagattcacgccattctcccacctcagccacccgagtagctggggctacaggtgtctgccaccacgcccggctaactttttgtatttttcatagagacggggtttcactgtgttagccaggatggcctcgatctcctgacctcgtaatccgcccgccttgatctcccaaagtgctgggattacaggcgtgagccaccacgcctggccacaaccagcatttttttaaaataaagtagaataaagtgtttaagaaaatatcactgtgctttgtgtgacattagggtaggtattattagtgaaaaactgtaaacgtgtacatgaggatacagtctaaaaagtctttatgggccgggcacggtggctaacgcctgtaatcccagcactttgggaggccgaggcgggcagatcatgaggtcaggagatggagaccatcctggctaacacggtgaaaccctgtctctatgaaaaatacaaaaaattagccgggcgtggtggcgggcacctgtagtcccagctactcgggaggctgaggcaggaggatggcgtgaacccaggagcggaggttgcagtgagccgagatcgcgccgctgcactccagcctgggggacagagcgaggctccatctcaaaaaaaatgtctttatgactctgggtcatggccaaaaagaaggttgaaaggccactggtacaaggatagattagagaggatggagcaggattatttaggagatggttgcagtagcagagcaggaggtggcatcgggcagggtcgtaggggtccctcagactccatgtggcagagttggttggagtgtccaacatgagacgaggtggctctgacaagggtggtggcagtgtgggaggtgggagggaagaggcgggggtagctctggtcagtttagggttgctcattagattggctggagttgctgctgttcattgagagctggacataggagaggggcagggtgggagagagtgtgcattctgtgttactcaagctcacttagcaatgtgtgtaaccaagcaggtcttgggcaaccaggcccaccgctgcctgtcgtcctcttcctcctcctcttcttcttcccccttttactcatctttgcctctgggcaggtgtgtgtcctgggcctgcacctggccaaggagctgtgtgaggtagacgaggatggtgactcctggctgcaggtaacccgcaggctccccatcctacccaccctcctcaccactctagaggtgagccttcgcatgaagcagaacctgcatttcactgaggccacattgcatctgctcctcaccctggctcgcactcagcaggtaggaggccagcccgaaggcaggagggagcgtccttgcttgcctgggtgggttctgacaatcccagaagctgtgatctagcctgagagccctacctaccctaggcagggcaggggcaggctccatctcatttcctgtctttccctcctcccagggagccacagcagtggctggagctggcatcacccagagcatttgtttgccccttctgagtgtgtaccagctgagcaccaacggcacagcacaggtgagtgtcaggagcttgccaggaggcccagcctgaccaccctacagttccagttgaaaagtgtcctcccctacctttccccggaagttgctttcctctaaattgcctaatacactgatggtgaggaatcttccctgcccccaggcggatctctagcaagagaaactcaccactaaaaggcaccgcctggcctttgtgcactacctctgggagatgggatggattcttcccattgcaggtgtgaggaagactaaaccagattgataacacatccctggaccaggcctctagccaaggcagctgtcctctcctgtcattcccaaagacagtgtgtcattgtgacttctccacccctgcaccaccagaccaggactgggagaagggaagtgggtggtctgggggcttgatggggcctcagcaccctgccctctgtgtcccttggttatttctagtttaacagatacctcctaatttcaaaagagtagtcttcacctgaacctctctctctcatgagagtcgtgaagtatttggtcatctagcccagctaccccttagaggaagtatgtaggggccagagcagggcagtgacatgtccaggttcgcatagctcgtcagtggcagacctgagtctggaaccctgggtcttgtgtctcagcctggtgctctttccttgaatctgctggtgttggcccctttctggccctggtggccagacagtggctgtgtctattctgggagatcttttcctttcagcgcagctgggctgccttagttgctgtactacaaggaggtcctgcctctcagcagggttcctgagcttgtctgctgtttgtatcttagacacctagtgcctctcggaagtccctggatgccccctcttggccaggagtctaccgcctgtccatgtccctgatggagcagctgctcaaaactctgcgctacaacttcctgcctgaggccctggacttcgtgggtgtccaccaggagcggaccttacaggtgaggggctgcctgcattgcaggggtgggagtttcagggtaaaaaaggtactgggccattcatggggcaggtgggtgtggagcctgggcctcagtagcggagggttgtcgatgccttcatttttgagatgctctaagtactctgctggctcactggccagctagtctgctgaaggacgggaacggtctcgggtcagaatcctggttgtaccactaagccatttctttgccaactcagcatttgggggcctgggacgttgcctctccacaggagggtaggtgtgggtatgtcaggtccctcagccatccccatctttccctgatgtgtgctttcctcccagtgcctcaacgcagtgaggacagtgcagagtctggcctgcctggaggaggcggaccacaccgtgggttttattctgcagctctctaacttcatgaaggagtggcacttccacctgcctcagctcatgcgtgatatccaggtgggggcccaagatggtgtcttggagtctggggtaatgcttggagacagggaggctgtgaggtctcactggggcactcctagtgaattgcaggatgttcctgaacgggggcttttcccttggggagcacagggtttgctgtcatgtgcttactctggctaaatgtttccttccatagtcaagggcagccatgtaggttaagaatttggacttttatcagttagatcttggttcagatcccttaagaatacacttggggccgggcatggtggctcacgcctgtaatcctagcactttgggaggcagtcaggagttcgagatcagcctggccaacatggtgaaaccctgtctctactaaaaatacaaaaattagctgggcgtggtggcacgtgactgtaatcccagctactcgggaggctgagttgggagaatcgcttgaacctgggaggcggaggttgcagtgagctaggatcgaaccattacactccagcctgggtgacagagcgagactccgtcccaaaaagaaaaaaaaaaaaaaa

SEQ ID NO: 13081 - DNA, 2941 bp, Homo sapiens
gggttactattgcctttctgcgcttgatcaccacccttgtcaaggggcaacttggtagtacccagagccaaggacttgtaccctgtgtaatgtttgtgctgaaggagatgcttcccagctaccataagtggcgctacaactctcatggagtgagggaacagattggttgcctgatcttggagctgattcatgcgatactgaacctgtgccacgagacagacctgcacagcagtcatactcccagcctgcagtttctctgcatctgcagcctggcatacacagaagcaggacagacagttatcaatatcatgggcattggcgtggacaccattgacatggtgatggctgctcagcctcgaagtgatggggcagagggccaggggcagggccagctgctgatcaagacagtgaaactggcattctccgtcaccaacaatgttattcggctgaaacctccttctaatgtggtgtcccccctggaacaggctctctcacaacatggtgctcatggaaacaacctcattgctgttctagccaaatacatctaccacaaacatgaccctgctttgccacgtcttgccattcagctgctgaaacgtctggccacggtggccccaatgtcagtgtatgcttgtctgggcaatgatgcggctgccattcgtgatgccttcctgacccgattgcagagcaaaattgaggacatgcgcatcaaagtcatgattctagagttcctcactgttgcagtagagacccagccaggcctcatcgaactgtttctgaacctggaagttaaggatggcagtgatggctcaaaggaattcagccttgggatgtggagctgtctccatgcagtgctggagctgattgattcccaacagcaagatcgatactggtgcccacccctgctgcatcgtgccgccattgcctttttgcatgctctgtggcaggatcggagggacagtgccatgctggtcctccgaaccaaacccaagttttgggaaaatttaaccagtccgctgtttggaaccctttctcctccctctgaaacatcagagcccagcatcctggaaacctgtgccctaatcatgaagataatttgcttggagatatactatgtagtaaagggttcattagaccagtcattaaaggatacactgaagaaattttccatcgagaaacgctttgcctactggtcagggtatgtcaagtcattggcagttcacgtggccgaaacagaaggcagcagctgcacctccttgttagagtaccagatgctggtgtccgcctggaggatgcttctcatcattgccaccactcatgcagatataatgcacctgactgactctgtggtgcgtcgccagctctttcttgacgtgcttgatggaaccaaagcattactcctagttccagcctcagtgaactgccttcgccttggctccatgaagtgcactctgctgcttatcctcctccggcagtggaagagagagttaggttctgtggatgaaatccttggacccttgacggagatcctggagggagtgctgcaggccgaccagcaactcatggagaagaccaaggccaaggtgttctcagcattcatcacagtgttgcaaatgaaggagatgaaagtaagtgacatcccccagtactcccagctggtgctgaatgtctgtgagaccctccaagaggaagtgattgcactcttcgaccagacccgccacagtctggcattaggcagtgccacagaggacaaggacagcatggagactgacgactgttctcggtcccggcacagggaccagcgtgatggggtgtgtgtcctgggcctgcacctggccaaggagctgtgtgaggtagacgaggatggtgactcctggctgcaggtaacccgcaggctccccatcctacccaccctcctcaccactctagaggtgagccttcgcatgaagcagaacctgcatttcactgaggccacattgcatctgctcctcaccctggctcgcactcagcagggagccacagcagtggctggagctggcatcacccagagcatttgtttgccccttctgagtgtgtaccagctgagcaccaacggcacagcacagacacctagtgcctctcggaagtccctggatgccccctcttggccaggagtctaccgcctgtccatgtccctgatggagcagctgctcaaaactctgcgctacaacttcctgcctgaggccctggacttcgtgggtgtccaccaggagcggaccttacagtgcctcaacgcagtgaggacagtgcagagtctggcctgcctggaggaggcggaccacaccgtgggttttattctgcagctctctaacttcatgaaggagtggcacttccacctgcctcagctcatgcgtgatatccaggtgggggcccaagatggtgtcttggagtctggggtaatgcttggagacagggaggctgtgaggtctcactggggcactcctagtgaattgcaggatgttcctgaacgggggcttttcccttggggagcacagggtttgctgtcatgtgcttactctggctaaatgtttccttccatagtcaagggcagccatgtaggttaagaatttggacttttatcagttagatcttggttcagatcccttaagaatacacttggggccgggcatggtggctcacgcctgtaatcctagcactttgggaggcagtcaggagttcgagatcagcctggccaacatggtgaaaccctgtctctactaaaaatacaaaaattagctgggcgtggtggcacgtgactgtaatcccagctactcgggaggctgagttgggagaatcgcttgaacctgggaggcggaggttgcagtgagctaggatcgaaccattacactccagcctgggtgacagagcgagactccgtcccaaaaagaaaaaaaaaaaaaaa

SEQ ID NO: 13082 - DNA, 805 bp, Homo sapiens
ccagtccgctgtttggaaccctttctcctccctctgaaacatcagaggtaagctgtggcagagggcaggatggtggctacaagtcccttggaggaaaggctgtgggctgtgagatggggccgtagacaatgatacctcccctaattaaacaacagaatgttcccttcactagaaacgtctttctcagggaagtgccagctttctgtccctttgatgtcttgctttgggaaggaaagtggtttgcgctactgtgtgttggtggctctgtggtcttctccattcagttggagacgttgtggacctgacgcctctgctcttgcaagtcaggacattcacattcaacaggggttgtgctaacttgttctgcaagtgttgggcccctgctctgttccctgtttgatatactgggggagatcagtgatcagagatgtgataattgcctgttctgctatctccacagcccagcatcctggaaacctgtgccctaatcatgaagataatttgcttggagatatactatgtagtaaagtgagtactttcccctcttgagattttaactgaaggttgggggagtgggagttggtggcctaccactgggtgcatggctggaagagccaaggcagaggagagaactggtttggaaccattcatggaaggccagtgagctgtgttcctggccaatccaccgatggcatttatgattgtcagaaagagttattgtgaagcaaactccatgcaactgggattttatggaggaggaatcctggaaaggcctcagcctaacccacacgttggaggtgtcctg

SEQ ID NO: 13083 - DNA, 392 bp, Homo sapiens
ccagtccgctgtttggaaccctttctcctccctctgaaacatcagagcccagcatcctggaaacctgtgccctaatcatgaagataatttgcttggagatatactatgtagtaaagtgagtactttcccctcttgagattttaactgaaggttgggggagtgggagttggtggcctaccactgggtgcatggctggaagagccaaggcagaggagagaactggtttggaaccattcatggaaggccagtgagctgtgttcctggccaatccaccgatggcatttatgattgtcagaaagagttattgtgaagcaaactccatgcaactgggattttatggaggaggaatcctggaaaggcctcagcctaacccacacgttggaggtgtcctg

SEQ ID NO: 13084 - DNA, 2291 bp, Homo sapiens
gtccctccctgtctattctacagtaagtgacatcccccagtactcccagctggtgctgaatgtctgtgagaccctccaagaggaagtgattgcactcttcgaccagacccgccacagtctggcattaggcagtgccacagaggacaaggacagcatggagactgacgactgttctcggtcccggcacagggaccagcgtgatggggtgagacagtgccctagaaggccatccgtcctttccactgcccgccagctctgtgcctgactctggggataagtagtgatcaagacagatagtcgctgcacttctggagttcacggcctggtgggaaaggttaatagatcagacactgcagaaaagcagaagcagcccattgtactgcaggagagaagtgcagggagaacttagtctcacttctgacttgaactgggacttaggtgccttttcagcaatgacttagagattgtagccgcgggcaaatgcaggatccgaagtgaaataggaaatgatgtaaggcttttaagcaggggaaaaagttgatctgatttttactctagaaagatcactctggacttaaactccaggcctcaagccatcctcccagttcagccttccaaagtgttgggattacaggcgtgcccaagaaagatcactctggatgcagtattgaatagtatttttcaaattgtgggatcatgacctattagagagagtcttgaaattagcacattttgttacaaccagtctcgctctgtcgcccagggtggagtgcagtggtgcgatcttggctcactgcaagctctgcttcccagattcacgccattctcccacctcagccacccgagtagctggggctacaggtgtctgccaccacgcccggctaactttttgtatttttcatagagacggggtttcactgtgttagccaggatggcctcgatctcctgacctcgtaatccgcccgccttgatctcccaaagtgctgggattacaggcgtgagccaccacgcctggccacaaccagcatttttttaaaataaagtagaataaagtgtttaagaaaatatcactgtgctttgtgtgacattagggtaggtattattagtgaaaaactgtaaacgtgtacatgaggatacagtctaaaaagtctttatgggccgggcacggtggctaacgcctgtaatcccagcactttgggaggccgaggcgggcagatcatgaggtcaggagatggagaccatcctggctaacacggtgaaaccctgtctctatgaaaaatacaaaaaattagccgggcgtggtggcgggcacctgtagtcccagctactcgggaggctgaggcaggaggatggcgtgaacccaggagcggaggttgcagtgagccgagatcgcgccgctgcactccagcctgggggacagagcgaggctccatctcaaaaaaaatgtctttatgactctgggtcatggccaaaaagaaggttgaaaggccactggtacaaggatagattagagaggatggagcaggattatttaggagatggttgcagtagcagagcaggaggtggcatcgggcagggtcgtaggggtccctcagactccatgtggcagagttggttggagtgtccaacatgagacgaggtggctctgacaagggtggtggcagtgtgggaggtgggagggaagaggcgggggtagctctggtcagtttagggttgctcattagattggctggagttgctgctgttcattgagagctggacataggagaggggcagggtgggagagagtgtgcattctgtgttactcaagctcacttagcaatgtgtgtaaccaagcaggtcttgggcaaccaggcccaccgctgcctgtcgtcctcttcctcctcctcttcttcttcccccttttactcatctttgcctctgggcaggtgtgtgtcctgggcctgcacctggccaaggagctgtgtgaggtagacgaggatggtgactcctggctgcaggtaacccgcaggctccccatcctacccaccctcctcaccactctagaggtgagccttcgcatgaagcagaacctgcatttcactgaggccacattgcatctgctcctcaccctggctcgcactcagcaggtaggaggccagcccgaaggcaggagggagcgtccttgcttgcctgggtgggttctgacaatcccagaagctgtgatctagcctgagagccctacctaccctaggcagggcaggggcaggctccatctcatttcctgtctttccctcctcccagggagccac

SEQ ID NO: 13085 - DNA, 568 bp, Homo sapiens
gtccctccctgtctattctacagtaagtgacatcccccagtactcccagctggtgctgaatgtctgtgagaccctccaagaggaagtgattgcactcttcgaccagacccgccacagtctggcattaggcagtgccacagaggacaaggacagcatggagactgacgactgttctcggtcccggcacagggaccagcgtgatggggtgtgtgtcctgggcctgcacctggccaaggagctgtgtgaggtagacgaggatggtgactcctggctgcaggtaacccgcaggctccccatcctacccaccctcctcaccactctagaggtgagccttcgcatgaagcagaacctgcatttcactgaggccacattgcatctgctcctcaccctggctcgcactcagcaggtaggaggccagcccgaaggcaggagggagcgtccttgcttgcctgggtgggttctgacaatcccagaagctgtgatctagcctgagagccctacctaccctaggcagggcaggggcaggctccatctcatttcctgtctttccctcctcccagggagccac

SEQ ID NO: 13086 - DNA, 6642 bp, Homo sapiens
ttgtaccctgtgtaatgtttgtgctgaaggagatgcttcccagctaccataagtggcgctacaactctcatggagtgagggaacagattggtaaggacagcatgggcagggaagacctggggatttctggccccactggagagcttttttctttccctttcttgagataaggggtcatttcacaaggccacatcattcctctgtcttttctggagtccaggttgcctgatcttggagctgattcatgcgatactgaacctgtgccacgagacagacctgcacagcaggtaatgaagggttgattactagagcttggtgctcgccaaggcaagacacgggcttttgctgtgcaaagccgtctcagttcttccagagaatttaccttgcttgagcccagaactcagtaatcttgaggttgttagttgctttccattggcctgtttatcatttctcactgtggacagagaagtaggaatgagagagagagagagagagagagagtgtgtgtgtgtgtgtgtgtgtgtgtgtgtgtgtgtgtgtgtgtatgtgtatacatacactaatatattaatcattctttatgatcgttacaaaagttcattcctgacgagacactcttcatatatatctgcatcccagggccagttactatgtattcttggttttttcctctttctgtattgactgtaactttctttccatgctactgcttatagatgtcttattttaatggttctatgcattccatcatatggattaattatgatccttttcagtagctgtatctgttacttgatggacatttagattgcttctcagggtgatctttaggtgatcaagtctgtttcaggaaagtgatcagagtgccttcagcttgcagagagctggtctccagtgtccagtaggttaggttagccaccctagcctaattggacaatgcccttccttccaagatacactgagtggctccctggtaactcagaatacctctgtcttccagtcatactcccagcctgcagtttctctgcatctgcagcctggcatacacagaagcaggacagacagttatcaatatcatgggcattggcgtggacaccattgacatggtgatggctgctcagcctcgaaggtagggctccttctccacgttccctttgtctgtctttattgtgcctgcatgttactaataactccagtttaagttaacttgcagtagcttttagaagacgacattgttcttcctaggacatagcctttacataccctagtggctgctgtatagattggcgtatagcaaagggagttgattactcctcctctctcctagtttggactggggcctctaacagaagctgttgaactctgggattattgttggaatctaattcatgagagcacatatattgcgaatgaagtcatactgtctgaatcatctttggtttccatttggcaccctagtgatggggcagagggccaggggcagggccagctgctgatcaagacagtgaaactggcattctccgtcaccaacaatgttattcggctgaaacctccttctaatgtggtgtcccccctggaacaggctctctcacaacatggtatgtatttctcttccagtcacaacatggtatgtatttctcttccagtcatttttgctcataaatacgtatcttaggcagtgtttttggatgtcaacagtattttctgcttcttgaggaagtttgggaatgattaccagctcctttcctgaaattggaaacaaaaggactagatggtactttatttctgcctcctattgatgatagaataatagttaagaatgcagatttgaagtcagactgccttggttcaaattttgtatccaatcaactgtgtgaccttgggtacgttattaaacaactctgcctctgatttctcatctgtaaaatggggataatggtacaggttgagtatcccttatctgaaatgcttgggaccagaagtgttttgggtttcagatttttttttcatattttggaatagttgcagtatacttaccagtttagcataaatccaaaatgttccagtgagcatttcctttgagctatagttagagattttgacacattccagattttttttaattttttaatttttttttttttttttttttttttttgagacagtctagctctgttgcccaggctggagtgcagtggcgcaatctcggcttactgcagcatctgcctcctgggtttaagcaatcctcctgcctcagcttcccgagtagctgggattacaggcatctgtcccacgcccggctaatttttgttttgttttgttttattttgttgttttgttctgtttggtagagacgagctttcgctatgttggccaggctggtctcgaactcctgacctcaggtgacttgccctctttggcctcccaaagtgctgggattacaggcatgagccaccgtgctctaatttgaggttttcagattatggatgcctgtagtatcttcctaataagattataataaagggctgggcatggtggctcacgtctgtaatcccagcactttgggacggtgaggctggggaggatactttgagtccaggagttcgagaccagcttgggcaaaataaggagacctccatctataccaaaacaaacaaaaaaaagtagctgggcctggtggcatatgcctgtggtcccagctactcaggaggctgaggttgggggattgtttgaagcttggcaggtcaaagctgcagtgagccatgattttgccactgcactccagcttggacaacatagtgaaaccctctctcaaaaagaaaaaaagataggctgggtgcagtggctcacgcttttaatcccagcactttgggaggccgaggtgggcggatcacgaggtcaggagtttgagaccagcctggccaacacagtgaaaccccatctctactaaaaatacaaaagttagctgggtatggtggtgggtgcctgtaatcctagcactttgggaggccgaggtgggtggatcacttgaggtcgggttcaagaccagcctggccaacatggtgaaaccctgtctctattaaaaattttaaaaattagctggacgtggtggtgcacgccagtaatcccagctactcaggaggctgaggcaggagaattgcttgaacctgggaggtggaggtgcagtgagtcgagatcgtgccactgcacttcagcctgggtgactgagtgagactctgtctcaaaaaaaattaataaataaataaaaattaataaaataagcacctattttattcaaaatgtatctttgctgtcgatgagttgggttgaactgtttatccccaaattctgactattcttttgctcctcaatcaagagaaggatacagccacctaggtttgctgtggccctccaagtacttgagggtaaattccttcacatacacactgtgggtcttttttgaacagtcagtgctctaaggacttgaattaggcacacttgatatctaaactgtttcctgtgctgctttaggtgctcatggaaacaacctcattgctgttctagccaaatacatctaccacaaacatgaccctgctttgccacgtcttgccattcagctgctgaaacgtctggccacggtaggatcgtacttcatgcacacacactgtttatatgagggtgtttttttccccctgattacaaaagacatgctcaggccacgtgcagcggcttaacgcctgtatataattccagcactttgggaggccaaggtgggaggatcatttgagcccaggagttcaagaccagcctgggccacatagtgagaccccatctctaatatagaaaaaaggagaaaaggctgcgtgcggtggctcatgcctgtaattccagcactttgggaggctgaggtgggtagatcacaaggtcaggagttcaagaccaacctggccaagatggtgaaaccctatctctcctaaaaatacaaaaattagggggccgggcatggtggctcacgcctgtaatcccagcactttgggaggccgaggcgggtgtatcacagagtcaggagatcaagaccatcctggctaatacggtgaaaccccttctctactgaaaaatacaaaaaattagccaggcattatggcaggcgcctgtagtcccagctaattgggaggctgaggcaggagaatggcatgcactagggaggcggaacttgcagtgagctgagatcgcgccactgcactccagcctgggtgacagagcaagactccatctcaaaaattagccaggcgtggtggcaggtgcctgtgatcccagctacttgggagcctgaggcagagagttgcttgaacccgggaggcagaagttgcggtgagctgtgatcacgccactgcactccagcctgggcgacagagcgagactccgtctcaagataaaaggagaaaaaagacatgcttattgtaaaatatttatttaaatgttacaaatagatgtaacagaaagttaagatgccctatgatctccttattccaagaatccctatgggcagggggatatgccatgctccagatttcttttttttttttttttttttgaaatagggtctggctatgtctccaaggctgtgctccacatttcttatctgtgttcttgtattttaaaaagtatcggctgggcgctgtggctcacacctgtaatcccagtactttgggaggctgaagcaggtggatcatgaggtcaggggttcaagaccagcgtggccaagatggtgaaaccccacctctactaaaaataccaaaattagctgggtggcaggtgcctgtaatcccagctactcaggaggctgaggcaggagaatcgcttgaaactgggcaacagaggttgcagtgagctgagatcacatcactgcactccagcctgggcgacagagtgagacaccgcctcaaaaaataaaataataaaggtatttagggctgggcgtggtggctcatgcctgtaatcccaggactctgggaggcccaggtgggtggcttgcctgagctcaggagtttgaaaccatcctgggcaacacggtgaaaccccatctctactaaaatacaaaaaaattagccgggtgtggctgcgtgtgcctgtagtcccaggtactcagtaggctgaggcaggagaattgcttgaacccgggaggtggaggttgcagtgagccgagttcacaccactgtgctccagcctgggcgacagagtcaaaaaaaaaaaaaaaagtatttgagtgtgtacttttgttcttgataaaagcagaattcctggtactgtttttctttcttttttttttttttttttgagacggagtctcgctctgttgcctaggctggagtgcagtggcgcgatctcggctcactgcaagctccgcctcctgggttcagccattctcctgccttagcctcccgagtagctgggactacaggcgcctgccactgcacccggctaattttttgtattttttttagtagagacggggtttcaccgtggtctcgatttcctgacctcgtgatctgcccgcttggcctcccaaagtgctgggattacaggcatgagccaccgcgcccagcccttcctggtactgtttttgttttgagacagtcccactccatcacccaggctggagtgctgtggcatgatctcactgcagcctccactcccaggttcatgcgattctcctgtctaagcctcccaggttgctgggattacaggcgcccactacaacacccagctgatttttttgtatttttagtagggacgaagttttgccatgttggccaggctagtctcgaactcctgatctcaagtgatctgcctgcctcagcctcccaacatgctgggattacaggcgtgagccactgtgcctggcccctggtactgttttatgactggcttcctttacttgataccatatcaggcagtcttgatgtgcttcatgccacataggcacatttggacttccttcattcttttttgtcttttttcctttttttaatttggacttccttcattctttttaatgtttgcatatcacatcctagaatggatgcatcctgatttatttgcgctactttctgtctttcactattacaagcagtgctgcagtgaacattattatccctaccaccctgtaaacatttgtttacagttccaaagatttatgtaggtataaatgaacatgatattttttattagatatttccaaattaccttccaaaaaacattgtaacagtttatacttataacaccaagtattctatcgttgctgcaaggtcttcatcattgtttagtctttgccaatctaataagcaaaaaaatgtttcacttttcagtttgtatttatttaaccatgagggaagttgagcatttctttatactgattactgtctttcctgtgaatttgcgggcatctcatgcttgtttgtggtgatgtcccttttagcccagagctgtagtctggatgcttccctttctgccaattttctgggagctcttcagtgcccttctgtgggagcccattgaggtttttgtggaagcagagctctaagcctgtgtgttccggtctccaccaggtggccccaatgtcagtgtatgcttgtctgggca

SEQ ID NO: 13087 - DNA, 534 bp, Homo sapiens
ttgtaccctgtgtaatgtttgtgctgaaggagatgcttcccagctaccataagtggcgctacaactctcatggagtgagggaacagattggttgcctgatcttggagctgattcatgcgatactgaacctgtgccacgagacagacctgcacagcagtcatactcccagcctgcagtttctctgcatctgcagcctggcatacacagaagcaggacagacagttatcaatatcatgggcattggcgtggacaccattgacatggtgatggctgctcagcctcgaagtgatggggcagagggccaggggcagggccagctgctgatcaagacagtgaaactggcattctccgtcaccaacaatgttattcggctgaaacctccttctaatgtggtgtcccccctggaacaggctctctcacaacatgccaaatacatctaccacaaacatgaccctgctttgccacgtcttgccattcagctgctgaaacgtctggccacggtggccccaatgtcagtgtatgcttgtctgggca

SEQ ID NO: 13088 - DNA, 10348 bp, Homo sapiens
cgggcgcgcgaagatggcggcggccgccggcgggccgtgtgtgaggtgcggagcgggtcgaatggaccggggtggctgtgaagcgcggtgtcaaagccgagcggaagcggggcgggaattggaggcgggatgtggcgacagtggcagggccaaccccggctggatggacgggcaccgagacgggaggcggttacgtccaaacggtccccgcgcgcggggatctgaagagtcttcttcaggaggggggccggctcttcaccccttccctccgcgctcggcctcccatctcctcacccagggccctttgccttcctcctctctcacctccgacgcgtctcttggcgccccacccgcgcttccttctccggccgtgacgctccctcgagccacggggagctttgcggtctcctggggtaccccccacccacgtccctgctgcaggctcccagtgtcctgccccggcgtcgagtgcgccctgctggctccccgacctctcccgcgatctgttcttgttaggattttgtttcgcgttgagcggagccacgcttgcggcttctgtcctctccgcgcctcgtatcgttcttttcttgcactgaatcaagtcagccagcatgtccaaatcctccaagagatttcagggattgaactaggctttagggacaagaagatgaaatattatatacgaaaactacaattctgacaaagtgctttctagcgtcagaccctggtggagcgcttcccaggagttatctcattcaattctcgcaactccgagaggcgccttctatttcacagatgactcagaagtccggctcagagctagccaagtgataaagagagccttcaagctgaagtctgcgtacctccagtgctataaccagaccaccacgcctccttctgtcttccacattgcagctcgaaggtcttcgttcttcccaccaccctccctcaaagttaaacatccccgtctcttatccttccctgtgccagcagtgttttccccacttttttttttttttttttttttttttttttttgagacggagtctcgctctgtcgcccaggctggagtgcaatggcacgatctcggctcactgcaagctctgtctcccgggttcatgccattctcctgcctcagcctcccaagtagctggggatacaggcacccgccacaacgcctggctaattttttgtattttcagtagagacagggtttcactgtgttagccaggatggtctcgatcttctgacctcatgatccgcccgcctcgacctcccaaagtgctgggattacaggcatgagccaccgtgcccggccctaacaatattattatataacaagattactttccaaaaatttaacaaatcgttttgtatattgagattttttgcttttagagagcagacaaaatggctatgaggcagtgtacaagtttgtatgatcagaaagagcaaaattacctctgttctctcattttgcaggagcagtagagaactgtggactattctgcttggaaggtcagctctgagagagctggtaagtggtggtgttcttgagtgggttctctgggttctttgtgtagcttttgttaccaaaaaaaacctttttttaaatgtaggaagtaaacacatttatttatttagagacagagtttcgctcttgtttcccaggctggagtgcaatggcgtgatctcggctcaccgcaacctccgcctcccaggttcaagcgattctcctgcctcagcttctcgagtagctgggattacaggcatgcaccaccacgcccgactaattttgtatttttagtagagatggggtttttccattttggtcaggctggtctccaactcccgaccttaggtgatctgccctccttggcctcccaaattgctgtgattataggcgtgagccaccacacctggcctatttatttattttgagatggagtttcactcttgttacccaggctggagtgtaacagcatgatcccagctcactgcaacctccgcctcccgagttcaagcgattttcctgccacagcctcccgagtagctgagattacaggtgcatgccaccacacctggctaatttttgtatttttagtggagacagggtttcaccatgttggccaggctggtgttgaactcctgacctcaggtgatctacttgccttggcatctcaaagtcctgggataacaggcgtgacggccactttttttttttttttttttttttttgaggggggtgtcttgctcccaggctggagtgtaagtagctcgatcttggctcacttcaacctctgccacctgggttcaagtgattctcctgcctcagcctccccagtagctgggattagaggtgcccaccaccacgccctgctgatttttatatttttagtagagacagggttttgccatgttggccaggtcggtcttgaactcccgacctcaggtgatctgcctgcctcagcctcccaaagtgctgggattacaggcatgagccaccacacccggctacgtttttttgttgttgttgagacagagtctggctctcgcccaggttggagtgcagtggcacgatcttggctcactgcaacctctgtctcctgggttcaagtgattcctgccttagcctctcaaggagctggggattacagatgcatgccaccacgcccggctaatttttgtatttttagtagagatggggtttcaccatgttggccaggctggtcttgaattcctggcctcaggtgatctgcccacctcagtctcccaaagtgcttggattgcaggcatgagccactgtgcctggtataaacactttttttttgttcctaaaactttataaacgtggtcagatgcagtggctcatgcctgtaaccccagcactttggaaggccaaggcagaaggatcaattgagtgcacaagctcaaggccaaccctggcaagatagcaagaccccgtctctacaaaaaattttttaaaaaattagccaggcatggtggtgcatgtctgtagtcccagctacttaggagtccaaggtgggaggattgcttgatcctgggaggttgaggctgcagtgaactctagcctgggagacacatcgagaccccagctcaaaaaagcaaaaagctttataaacattacgcattccctacttctttgctgaaatgagactacctagcctagctgctgaagtcttttaaatctacctttgtatttcattgattccttttatgaaaagatacctgtgttcattgcttggctgctgagagtaggggtgcaaataccattcttctacctcaacctaagaaagattcttggccaggcatggtggctcacgcctgtaatcccagcactttgggaggccgaggcgggcggatcacctgaggtcaggagttcgtgaccagcctcaacatggagaaaccccgtctctactaaaaatacaaaattagcccggtgtggtggtgcatgcctgtaatcccagctactcgggaggctgaggcaggagattcgcttgaacccggaagtggaggttgcagtgagtcgagatcgcgcaactgtactccagcctgggtgacaaagcgagactccatctcaaaaaaaaaaaaaaaaaaaagtcaggcttggtggcatatgcttgtattagtagttccagctactcaggaggctgtggtggaaagatcgcttaagctcaggatatcaagcctgcagtgagccatgattgcatcactgcactccagcctgggtgacagaacaggaccctgtctcaaaaaacaacaaagaaaacttcaccacaacatcatttatattattaaataattacagtcagcttaagtatatcaaacattagaggaatggtaaatgaattatgatctaccaacttgatacaagtattatgcagcaacttgaaagtatgtttatcaagactttcataataaggttaagtcattatgttataatgttaagcaaagaaaagaaggttacagaattctgtattcaaaatgatttcaactctggggaaaaatgcatattaaaaacactcaaaggaatgtgtaatacttagtgtgattctggaatctgattttttttttttttttttgagacggagtttcgtgcttgttgtcctggctagagtgcattggtgcaatctcggctcaccacaacctctgcctcccaggttcaagtgattctcctgcctcagcctcccgagtagctgggattacaggcatacaccaccacgcccagctaattttgtattttttagtagagacagggtttctccatgttggtcaggctggtctccaactcccaaccctaggggatccgcccgcttcggcctcccaaagtgctaggattacaggcctgagccaccatgcctggccgagtctgattattaataaaactgcatttgggccgggcgcagtggctcacacctgtaatccctgcactttgctgacatgggcagatcacgagttcaggagttcaagaccagcttggacaatatggtgaaaccccatctctactaaaaatacaaaaaaaactgactggcatggtggcgtgcgcctgtagtcccatctgctcaggaggctgaggtaggagaattgcttgaacccaggaggcggaggttgcagtgagccaagattgcgccactgcactccatcctgggtaacagagtgagactccgtctcaaaaaaaaaaaaaaaaaagaaagcacaaaaaactgcatttgcggtcgggtgccttggctcacgcctgtaatcccagcactttgggaggccaaggcaggcagatcacttgaggtggggagttcgagatcagcctagccaacatggtgaaactccatctctactaaaaatacaataattagctgggtgtggtggctggcacctgtaattccagctactcgggaggctgaggctcgagaatcacttgaacctgggaggcggaggttgcagtcagccaagttggtgccactgcactccagcctgggtgatagagtgagactctgtctcaaaaaaaaaaaaaaatactgcatttgtataattaccttgttcttttccagagtcagattgaggcagaactgaataaacattggcggcgattgttagaggggctttcttactacaaacctcccaggtatggcagttccgggtgtctggttaaagtaattgtcctaaggaagctgacatggataaaaccatccttctatgtgctttgatgatattgtagggttatgtataccagagataatacaatttagtttaccagtggaaaacagtagggtacatttgtttttttgttgaccgaaagaaaaggaaattccttctagaaatacagtattgtagaatataattatgacctatgtgtggggatgagaatttattaaacattcaacgaattttctaatatttattcagagtccacagtgtctgtgtgagtactaattggtgggagatagcagtgaaggatgatgctaacaactgacacttgtgtagtgttaactatgtaacaattaatactctaagcacctgacttatcaaaagttatttaatccccacaacacccctttgagatagttactacttttattctttgggtgaatatatagatctttttattgggtagtggaaaacatagtaataaaatataaagtagttgcaaataaagagaatgcagcttgtagggctgggcttatttgatcttgattcctagtccagatctcattctattatgcgttatagtctaagtcaccctcatttcccttctacttttgtactgcttttgaatgtattacatctttaccttccattttcattctcttaggttaacgatgaacttttccttgttattcatctgtctgttaattcttcccctgtaattaccttaaagtaaatcccagataccttgttattttatctgcaaatacttgactatgtatctaaaatacatggactttttaaaaagataatctctatattatcacatttaggtacccttatcattgtttccattttaccagtggggaaactgaggcacaaagaggttaagcaacttgtcatggtcacacagctactaagtgatagaaccaggatttgaccctggtggtctcattccagtgtctgttctttttttttttttgagatggggttttgctctgtcgcccagactggagtgcagtgtcacatctcagcttactgcaacctccacctcccgggttcaagtgattcgcttgccttggcctcccgagtggctgggattacaggtgcccgccaccacgcccagctaatttttgtatttttagtagagatggggtttcaccatgttggccaggctggccttgaactcctgatctcaagtgatctgctcacctcggcctcccaaagtgctgagattacaggcgtgagccgtcatacccagcctattgttttctttactatcttttttctgttccaggatccaacctagttgtcaagtgcctgtagtctcctcttagctgtgacaatgtcttagtcttttttttttgagatggagtctcgctttgtggcccaggctggagtgcagtggcacgatctcggctcactgcaagctctgcctcccgggttcacgccattctcctgcctcagcctcccgagtagctgggactacaggcgcccgctgtgacaatgtcttagtctttttttttttttttttttgagatggagtctcgctctgtggcccaggctggagtgcagtggcacgatctcggctcactgcaagctctgcctcccgggttcacgccattctcctgcctcagcctcccgagtagcagggactacaggcgcccgccaccacgcctggctaattttttgtatttttagtagagacagggtttcactgtgttcgccaggatggtctcaatctcctgacctcatgatccgcccgcctcggcctcccaaagtgctgggattacaggcgtgagccaccgcggccggtgacaatgtcgacaatgtcttagtcttaccttgattttcatgaccttgaacaagtttgaggactggtcagttattttgtagtatgcccccaatttgggtttgtctgatgttttccttattattagactggggttgtgagtttttgggaaaaatacacagaggtgaggtgctcttcttttttttttttttgagatggagtttcgctcttgttgcccatgctcgcgtgcaatggtgcgatttcagctcactgcaacctttgcctcctgggttcaagcaattctgtctcagcctcccgagtagctgggactacaggtgcatgccaccatgcctggctaatttttgtatttttagtagagacagggtttcaccatattggtcaggctggtcttgaactcctgacctcaggtgatccgcccgcctcagcctcccaaagtgctgggattacaggcgtgagccaccacgcctggccaagctacccttcttaccacatcatagcagagagtacatgctgtccacatgaaatcactggtaatgttaatcttggtcactcagttaaggaggcatttgccaagtttctcctctgtaaagttacttttttctcttttcctattttattttttggaagtgagtactaaatatagccatgtccagctaatttttttcacttttggtggagatgagggtctcactttgttgtctaggctggtctcaaactcctggcctcaagctacactcctgccttggcctcccaaagtgctgggattacaggcatgagccattgttctggcccctccctatcctatttatttattcattagtttatatcagtatagactcaaatatatttattttatttatcttatactttgtttataccttgtttcagctttggctattgggcattcttttaggttggcctctgtcctttgggcgtgtccttccttttttctttttttcttttcttttttttctattatgtcatctcctaccgaaaggactttggtttcttaagcccttttgtacttcttttcactataagatgcttcaagattttcttgtattttccttgccctgactctagaatcaaccaattctccaaggaatcctgttattagagaatggtattataaagcaggatctgggtgctgcatgtacctcctgctgttggagtattataaattctaggccttctcggtggacagagctattacagataatatattaatatatgtatgtatgccacagacctggttttaaattttagcaactgtttatgagctgtgggatttttggtaagttatttaccctaagtgctggcaattccatttgtaaaaggagaatagtaatatttgccttttagggcagtagtaaggatcaaaaataatgtaacttaatgtgtttacaaataacattgttataactgtaatttaaccactttttttttgttttgttttgttaggcataaccagttctgcgttatgaagtttgtagaggtgaatgggtgtgtgtgtgtgtgtgtgtgtgtgtgtgcgtgtgtgtgtttgtgtgtgtgtttataggcatctgaagggcagaaaatagtctgtaggaaaaatattttaaaatatttttattttaaactcagtgggctattgagaatgaagaaatgattcactgttctttttgtagtccaagttcagctgaaaaagtgaaagctaataaagatgtagcttcaccattgaaggaactgggtttaagaatcagcaagtttttggtgagtaaaaattagcactcgctcaatttattacttgcagtgtggatgtgcgtggttatattgctagtgatagtgaaaattcagtttctttttgttttggggattaaattgttttataaatacccaggttgcaactcttctccctaaaagttacaagtcaaagttgcctgatccattcactgcatatcatagggttttcttcaccagacatgtggtggtctttaaggtgactaagtttgtcattttggaagctcacatcatgcctactgctgtattaatgtgcttagtgaataagcatcgttgtttctggcatgtacatttaattgtaataaaaattgtatgtcagtgactggctcttgtcttctattagagtcagaattgttatgttttatgaatctttgagaagcatttttgtttattcaagtcctgtgttcattgtagaagacaaatctttaaattctctgcatcctgtgtgcgatttctgagctgttccttacttaaaatctctgtgtttcagggtcttgatgaagaacagagtgtgcagttactccagtgttacctgcaagaggactacaggggtactcgggactcagtaaaggtttgtggtttatgtcagctcctttcttctgcctttatcctttttccctgttggttttagataatgtaggattttggcaccaattcttttatcggtggtaggtgatcaggtaccgtcatcttcagggaagacctactaaaggctttaaaaaaaacatgacctgggtgcaatggcttgtgcctgtactcccagcttcttgggaggctgaggcaggaggatcacttgagtccaggagtttgaggctgcagtgaactgtgatcgcactactgcactccagcctaggcaaaagagtgagaccctatctctttaaaaagtaaagaatatatatgcatataagctgagatctgtcttcatacttggaggagtggagaggtcaaagactgacatgttaatcatagaatcttgggctattagaggtgataaggatttggtagagtttcttttttttttgagatggagtttcgctctgtctcccaggctggagtgcaatggcgtgatcttggctcactggaagctctgtctcccgggttcacgccattctcctgcctcagcctcccaagtagctgggactataggcgcctgccaccacgcccggctaattttttgtgtttttagtagagacaggatttcaccgtgttagccaggatggtctcaatctcctgacctcgtgatccccccgcctcagcctcccaaagtacttggattacaggcgtgagccaccgcacccggccaggatttggtagaatttctagcctgcccagcccctcattttacataagaggattgaggccagaggagaaggggagggatttgagcacaggtttgggtacatttgggtaaaaagtaaggtggaaagtatatgtagaaacaaatgtgcaattataatcttgaaggatgaagtgaaggtatctatctttttttattacttgagttttgcctaaaagatggcctcttaactgctctgtttttcttttcagacagtactgcaagatgagaggcagagccaggccttaatcctgaag

SEQ ID NO: 13089 - DNA, 381 bp, Homo sapiens
cgggcgcgcgaagatggcggcggccgccggcgggccgtgtgtgaggagcagtagagaactgtggactattctgcttggaaggtcagctctgagagagctgagtcagattgaggcagaactgaataaacattggcggcgattgttagaggggctttcttactacaaacctcccagtccaagttcagctgaaaaagtgaaagctaataaagatgtagcttcaccattgaaggaactgggtttaagaatcagcaagtttttgggtcttgatgaagaacagagtgtgcagttactccagtgttacctgcaagaggactacaggggtactcgggactcagtaaagtactgcaagatgagaggcagagccaggccttaatcctgaag

SEQ ID NO: 13090 - DNA, 3461 bp, Homo sapiens
tgggattttatggaggaggaatcctggaaaggcctcagcctaacccacacgttggaggtgtcctggagccgtctgcctttaagcccatgcaaggtcgttttctctgcctcaacaagggtctgtacccattatattcccatctgctttcaaaatctaactggaggttttttcttgacactgtaggggttcattagaccagtcattaaaggatacactgaagaaattttccatcgagaaacgctttgcctactggtcagggtatgtcaagtcattggcagttcacgtggccgaaacagaaggcagcagctgcacctccttgttagagtaccagatgctggtgtccgcctggaggatgcttctcatcattgccaccactcatgtaagacccttttggggagagttttcactttggtaccttagcaatgatgtgttgacatgagcctagcagatacagctccttgtgcggaagaattaatcagggtttatccctgagagctaaactgtaataggttctatgctgagagattgggactgtggggtatttgagggtgttgggtccaggagaccattaagaggaatgcagagaagtgatttgaaatcctttcagagttcctaaagcctcctgtacctcccttaggccttggctgggtcttagctgctccctggctgcatctgcctcttgtgcaaaggcataactgtcttctcgtgctgtgtaccttgtagatgctaggtcaataaatacttgttgactagtcagcagggagctgtgacagctgcagcagcaccctctctaaaaagcagtttgtcattggttctagaaactgcatttcctggtcttagaaaaagaacagaggccattgtctctgtactctgtctactgggagttggttttgagagagagagataacatctggaagaaatgcattgttcttggcttttttgtggtttgactccgtcacgctgtatcataaggacttggtattgaagtgttctttcttggggtatccagattaatttttttttttttttcttgagacggagtcttgctccgtcacccaggctggaatgcagtggtgcgatcttggcttactgcaacctccgccttccgggttcaaggaattctcctgtctcagcctcccaggtagctgggattataggtgcctgccaccacgcccagctaatttttgtatttttcgtagagatggggtttcaccttgttggtcaggctggtctcgaactcctgacctcaggtgatccacccacctcggcctcccaaagtgctgggattacaggtgtgagccaccacgcttggcccagattaatcttttgacttcatgaacaacttcagcttgatagatgcctcctttttccaagcacctcctacatctgtgaaatttgttgcctagtgccagactgcccacatgcttggagctttgagcctaggaggggcaggtttgtggctactcttgctgtggcatggtggttttggacccctaaggctccaaacacacttaaaggctcacctgtctttgagaatggttgattccccagggtataacctttatgtcacctgccttttaggccctagttaggcagcagttcttgaattgtagctctgaaaatcccaccatcctctttccccaaaggaaacctatctggctctctgtctcacctgtctacctatacaaaagaaaagaaaaaaaaagagaaagaaacctaagtccaggatgttggtcacccattcattctcttaatggcattagtggaacgcttccaggcattgagatgcagcagtgaataaggcagataagatctttgatcgcatagagagtgccctatgatggaggaggtaaattataaacaaatttagcaataaaaaatatggtttcagatagtgataatttgctgtgaaggaaataattaaagtgctgtggtaatgaacacatgagatagaagtagtcagggtggccttctctgagtggtgatgtcccagctgagagctgaatgtgtgaagaagccttccaggtggagcccgtggaggagagaagtctaggcagatggacttgcaagtgcaaagttccagcagtggaaaagagcttgatatgttcatgaaagaggcaagcagggttggactagagtgagcacagatgggactgatactacatcagttggaccagatcctgtggggtctttggaccatgttgaagagcttggtttgcgtttcccgggcactgggaagcctttcaaggattctaagcagagggaggacagagtctcaaagaggaggtgaacctgggcttgattctgaccatatctaagggttgacagaagaacagcagggccttcaagccctattttactttattttttagggaacaggatctcactatgttgatcaggttggagtgcagtggtgcaatcatggctcactgcagcctcaacctccagggctcacgtgatcttcccacctcagcctcccaagtaactaggactacaggcatgcaccaccatacccagctaattaaacattttttgttgttgttgagatagggtctcatcatgttgcccagactataagccctattttattttatttatttatttaagacggagtctctctctgtcgccaggctggagtgcagtggtgcgatctcggctcactgcagcctccgcttcctgggttcaagcaattctcctgcctcagcctcccgagtagctgggactacaggtgcgcgccaccatgcctggctaatttttgtatttttagtagagacagggttccaccgtgttggccaggatggtcttgatctcctgacctcgtgatccgcccacctcagcctcccaaagtgttaggattacaggcatgagccaccacgcccggcctatataagccctattttaaatcagggagactgttttaccaatgactaattgcctagcagaggaccccatgtttcttggcctctaaaatctggaaaattttcccagctgaaacctttttctgttcctttgcaggcagatataatgcacctgactgactctgtggtgcgtcgccagctctttcttgacgtgcttgatggaaccaaagcattagtaagtgtgtctgggagattttacatttctcccagggaggttgtctttgaagtcaaatagcagaggtcatgagtctgccagccagccgcacaaatagtcaggtcacagggctcacgttggcctgggaggcctgagactgtagtgggtcagcagagctctgctgctgccatgccaaccctggcttctccccctccactccactcctgtgagctcactgctggggaagaaaggcaatgaggccggaggtgccctgtggatggcatgcgaatctttccactgacttctgactggtgtgctgtctcctttcagctcctagttccagcctcagtgaactgccttcgccttggctccatgaagtgcactctgct

SEQ ID NO: 13091 - DNA, 516 bp, Homo sapiens
tgggattttatggaggaggaatcctggaaaggcctcagcctaacccacacgttggaggtgtcctggagccgtctgcctttaagcccatgcaaggtcgttttctctgcctcaacaagggtctgtacccattatattcccatctgctttcaaaatctaactggaggttttttcttgacactgtaggggttcattagaccagtcattaaaggatacactgaagaaattttccatcgagaaacgctttgcctactggtcagggtatgtcaagtcattggcagttcacgtggccgaaacagaaggcagcagctgcacctccttgttagagtaccagatgctggtgtccgcctggaggatgcttctcatcattgccaccactcatgcagatataatgcacctgactgactctgtggtgcgtcgccagctctttcttgacgtgcttgatggaaccaaagcattactcctagttccagcctcagtgaactgccttcgccttggctccatgaagtgcactctgct

SEQ ID NO: 13092 - DNA, 8995 bp, Homo sapiens
tcctcctctctcacctccgacgcgtctcttggcgccccacccgcgcttccttctccggccgtgacgctccctcgagccacggggagctttgcggtctcctggggtaccccccacccacgtccctgctgcaggctcccagtgtcctgccccggcgtcgagtgcgccctgctggctccccgacctctcccgcgatctgttcttgttaggattttgtttcgcgttgagcggagccacgcttgcggcttctgtcctctccgcgcctcgtatcgttcttttcttgcactgaatcaagtcagccagcatgtccaaatcctccaagagatttcagggattgaactaggctttagggacaagaagatgaaatattatatacgaaaactacaattctgacaaagtgctttctagcgtcagaccctggtggagcgcttcccaggagttatctcattcaattctcgcaactccgagaggcgccttctatttcacagatgactcagaagtccggctcagagctagccaagtgataaagagagccttcaagctgaagtctgcgtacctccagtgctataaccagaccaccacgcctccttctgtcttccacattgcagctcgaaggtcttcgttcttcccaccaccctccctcaaagttaaacatccccgtctcttatccttccctgtgccagcagtgttttccccacttttttttttttttttttttttttttttttttgagacggagtctcgctctgtcgcccaggctggagtgcaatggcacgatctcggctcactgcaagctctgtctcccgggttcatgccattctcctgcctcagcctcccaagtagctggggatacaggcacccgccacaacgcctggctaattttttgtattttcagtagagacagggtttcactgtgttagccaggatggtctcgatcttctgacctcatgatccgcccgcctcgacctcccaaagtgctgggattacaggcatgagccaccgtgcccggccctaacaatattattatataacaagattactttccaaaaatttaacaaatcgttttgtatattgagattttttgcttttagagagcagacaaaatggctatgaggcagtgtacaagtttgtatgatcagaaagagcaaaattacctctgttctctcattttgcaggagcagtagagaactgtggactattctgcttggaaggtcagctctgagagagctggtaagtggtggtgttcttgagtgggttctctgggttctttgtgtagcttttgttaccaaaaaaaacctttttttaaatgtaggaagtaaacacatttatttatttagagacagagtttcgctcttgtttcccaggctggagtgcaatggcgtgatctcggctcaccgcaacctccgcctcccaggttcaagcgattctcctgcctcagcttctcgagtagctgggattacaggcatgcaccaccacgcccgactaattttgtatttttagtagagatggggtttttccattttggtcaggctggtctccaactcccgaccttaggtgatctgccctccttggcctcccaaattgctgtgattataggcgtgagccaccacacctggcctatttatttattttgagatggagtttcactcttgttacccaggctggagtgtaacagcatgatcccagctcactgcaacctccgcctcccgagttcaagcgattttcctgccacagcctcccgagtagctgagattacaggtgcatgccaccacacctggctaatttttgtatttttagtggagacagggtttcaccatgttggccaggctggtgttgaactcctgacctcaggtgatctacttgccttggcatctcaaagtcctgggataacaggcgtgacggccactttttttttttttttttttttttttgaggggggtgtcttgctcccaggctggagtgtaagtagctcgatcttggctcacttcaacctctgccacctgggttcaagtgattctcctgcctcagcctccccagtagctgggattagaggtgcccaccaccacgccctgctgatttttatatttttagtagagacagggttttgccatgttggccaggtcggtcttgaactcccgacctcaggtgatctgcctgcctcagcctcccaaagtgctgggattacaggcatgagccaccacacccggctacgtttttttgttgttgttgagacagagtctggctctcgcccaggttggagtgcagtggcacgatcttggctcactgcaacctctgtctcctgggttcaagtgattcctgccttagcctctcaaggagctggggattacagatgcatgccaccacgcccggctaatttttgtatttttagtagagatggggtttcaccatgttggccaggctggtcttgaattcctggcctcaggtgatctgcccacctcagtctcccaaagtgcttggattgcaggcatgagccactgtgcctggtataaacactttttttttgttcctaaaactttataaacgtggtcagatgcagtggctcatgcctgtaaccccagcactttggaaggccaaggcagaaggatcaattgagtgcacaagctcaaggccaaccctggcaagatagcaagaccccgtctctacaaaaaattttttaaaaaattagccaggcatggtggtgcatgtctgtagtcccagctacttaggagtccaaggtgggaggattgcttgatcctgggaggttgaggctgcagtgaactctagcctgggagacacatcgagaccccagctcaaaaaagcaaaaagctttataaacattacgcattccctacttctttgctgaaatgagactacctagcctagctgctgaagtcttttaaatctacctttgtatttcattgattccttttatgaaaagatacctgtgttcattgcttggctgctgagagtaggggtgcaaataccattcttctacctcaacctaagaaagattcttggccaggcatggtggctcacgcctgtaatcccagcactttgggaggccgaggcgggcggatcacctgaggtcaggagttcgtgaccagcctcaacatggagaaaccccgtctctactaaaaatacaaaattagcccggtgtggtggtgcatgcctgtaatcccagctactcgggaggctgaggcaggagattcgcttgaacccggaagtggaggttgcagtgagtcgagatcgcgcaactgtactccagcctgggtgacaaagcgagactccatctcaaaaaaaaaaaaaaaaaaaagtcaggcttggtggcatatgcttgtattagtagttccagctactcaggaggctgtggtggaaagatcgcttaagctcaggatatcaagcctgcagtgagccatgattgcatcactgcactccagcctgggtgacagaacaggaccctgtctcaaaaaacaacaaagaaaacttcaccacaacatcatttatattattaaataattacagtcagcttaagtatatcaaacattagaggaatggtaaatgaattatgatctaccaacttgatacaagtattatgcagcaacttgaaagtatgtttatcaagactttcataataaggttaagtcattatgttataatgttaagcaaagaaaagaaggttacagaattctgtattcaaaatgatttcaactctggggaaaaatgcatattaaaaacactcaaaggaatgtgtaatacttagtgtgattctggaatctgattttttttttttttttttgagacggagtttcgtgcttgttgtcctggctagagtgcattggtgcaatctcggctcaccacaacctctgcctcccaggttcaagtgattctcctgcctcagcctcccgagtagctgggattacaggcatacaccaccacgcccagctaattttgtattttttagtagagacagggtttctccatgttggtcaggctggtctccaactcccaaccctaggggatccgcccgcttcggcctcccaaagtgctaggattacaggcctgagccaccatgcctggccgagtctgattattaataaaactgcatttgggccgggcgcagtggctcacacctgtaatccctgcactttgctgacatgggcagatcacgagttcaggagttcaagaccagcttggacaatatggtgaaaccccatctctactaaaaatacaaaaaaaactgactggcatggtggcgtgcgcctgtagtcccatctgctcaggaggctgaggtaggagaattgcttgaacccaggaggcggaggttgcagtgagccaagattgcgccactgcactccatcctgggtaacagagtgagactccgtctcaaaaaaaaaaaaaaaaaagaaagcacaaaaaactgcatttgcggtcgggtgccttggctcacgcctgtaatcccagcactttgggaggccaaggcaggcagatcacttgaggtggggagttcgagatcagcctagccaacatggtgaaactccatctctactaaaaatacaataattagctgggtgtggtggctggcacctgtaattccagctactcgggaggctgaggctcgagaatcacttgaacctgggaggcggaggttgcagtcagccaagttggtgccactgcactccagcctgggtgatagagtgagactctgtctcaaaaaaaaaaaaaaatactgcatttgtataattaccttgttcttttccagagtcagattgaggcagaactgaataaacattggcggcgattgttagaggggctttcttactacaaacctcccaggtatggcagttccgggtgtctggttaaagtaattgtcctaaggaagctgacatggataaaaccatccttctatgtgctttgatgatattgtagggttatgtataccagagataatacaatttagtttaccagtggaaaacagtagggtacatttgtttttttgttgaccgaaagaaaaggaaattccttctagaaatacagtattgtagaatataattatgacctatgtgtggggatgagaatttattaaacattcaacgaattttctaatatttattcagagtccacagtgtctgtgtgagtactaattggtgggagatagcagtgaaggatgatgctaacaactgacacttgtgtagtgttaactatgtaacaattaatactctaagcacctgacttatcaaaagttatttaatccccacaacacccctttgagatagttactacttttattctttgggtgaatatatagatctttttattgggtagtggaaaacatagtaataaaatataaagtagttgcaaataaagagaatgcagcttgtagggctgggcttatttgatcttgattcctagtccagatctcattctattatgcgttatagtctaagtcaccctcatttcccttctacttttgtactgcttttgaatgtattacatctttaccttccattttcattctcttaggttaacgatgaacttttccttgttattcatctgtctgttaattcttcccctgtaattaccttaaagtaaatcccagataccttgttattttatctgcaaatacttgactatgtatctaaaatacatggactttttaaaaagataatctctatattatcacatttaggtacccttatcattgtttccattttaccagtggggaaactgaggcacaaagaggttaagcaacttgtcatggtcacacagctactaagtgatagaaccaggatttgaccctggtggtctcattccagtgtctgttctttttttttttttgagatggggttttgctctgtcgcccagactggagtgcagtgtcacatctcagcttactgcaacctccacctcccgggttcaagtgattcgcttgccttggcctcccgagtggctgggattacaggtgcccgccaccacgcccagctaatttttgtatttttagtagagatggggtttcaccatgttggccaggctggccttgaactcctgatctcaagtgatctgctcacctcggcctcccaaagtgctgagattacaggcgtgagccgtcatacccagcctattgttttctttactatcttttttctgttccaggatccaacctagttgtcaagtgcctgtagtctcctcttagctgtgacaatgtcttagtcttttttttttgagatggagtctcgctttgtggcccaggctggagtgcagtggcacgatctcggctcactgcaagctctgcctcccgggttcacgccattctcctgcctcagcctcccgagtagctgggactacaggcgcccgctgtgacaatgtcttagtctttttttttttttttttttgagatggagtctcgctctgtggcccaggctggagtgcagtggcacgatctcggctcactgcaagctctgcctcccgggttcacgccattctcctgcctcagcctcccgagtagcagggactacaggcgcccgccaccacgcctggctaattttttgtatttttagtagagacagggtttcactgtgttcgccaggatggtctcaatctcctgacctcatgatccgcccgcctcggcctcccaaagtgctgggattacaggcgtgagccaccgcggccggtgacaatgtcgacaatgtcttagtcttaccttgattttcatgaccttgaacaagtttgaggactggtcagttattttgtagtatgcccccaatttgggtttgtctgatgttttccttattattagactggggttgtgagtttttgggaaaaatacacagaggtgaggtgctcttcttttttttttttttgagatggagtttcgctcttgttgcccatgctcgcgtgcaatggtgcgatttcagctcactgcaacctttgcctcctgggttcaagcaattctgtctcagcctcccgagtagctgggactacaggtgcatgccaccatgcctggctaatttttgtatttttagtagagacagggtttcaccatattggtcaggctggtcttgaactcctgacctcaggtgatccgcccgcctcagcctcccaaagtgctgggattacaggcgtgagccaccacgcctggccaagctacccttcttaccacatcatagcagagagtacatgctgtccacatgaaatcactggtaatgttaatcttggtcactcagttaaggaggcatttgccaagtttctcctctgtaaagttacttttttctcttttcctattttattttttggaagtgagtactaaatatagccatgtccagctaatttttttcacttttggtggagatgagggtctcactttgttgtctaggctggtctcaaactcctggcctcaagctacactcctgccttggcctcccaaagtgctgggattacaggcatgagccattgttctggcccctccctatcctatttatttattcattagtttatatcagtatagactcaaatatatttattttatttatcttatactttgtttataccttgtttcagctttggctattgggcattcttttaggttggcctctgtcctttgggcgtgtccttccttttttctttttttcttttcttttttttctattatgtcatctcctaccgaaaggactttggtttcttaagcccttttgtacttcttttcactataagatgcttcaagattttcttgtattttccttgccctgactctagaatcaaccaattctccaaggaatcctgttattagagaatggtattataaagcaggatctgggtgctgcatgtacctcctgctgttggagtattataaattctaggccttctcggtggacagagctattacagataatatattaatatatgtatgtatgccacagacctggttttaaattttagcaactgtttatgagctgtgggatttttggtaagttatttaccctaagtgctggcaattccatttgtaaaaggagaatagtaatatttgccttttagggcagtagtaaggatcaaaaataatgtaacttaatgtgtttacaaataacattgttataactgtaatttaaccactttttttttgttttgttttgttaggcataaccagttctgcgttatgaagtttgtagaggtgaatgggtgtgtgtgtgtgtgtgtgtgtgtgtgtgcgtgtgtgtgtttgtgtgtgtgtttataggcatctgaagggcagaaaatagtctgtaggaaaaatattttaaaatatttttattttaaactcagtgggctattgagaatgaagaaatgattcactgttctttttgtagtccaagttcagctgaaaaagtgaaagctaataaagatgtagcttcaccattgaaggaactgggtttaagaatcagcaagtttttggtgagtaaaaattagcactcgctcaatttattacttgcagtgtggatgtgcgtggttatattgctagtgatagtgaaaattcagtttctttttgttttggggattaaattgttttataaatacccaggttgcaactcttctccctaaaagttacaagtcaaagttgcctgatccattcactgcatatcatagggttttcttcaccagacatgtggtggtctttaaggtgactaagtttgtcattttggaagctcacatcatgcctactgctgtattaatgtgcttagtgaataagcatcgttgtttctggcatgtacatttaattgtaataaaaattgtatgtcagtgactggctcttgtcttctattagagtcagaattgttatgttttatgaatctttgagaagcatttttgtttattcaagtcctgtgttcattgtagaagacaaatctttaaattctctgcatcctgtgtgcgatttctgagctgttccttacttaaaatctctgtgtttcagggtcttgatgaagaacagagtgtgcagttactccagtgttacctgcaagaggactacagg

SEQ ID NO: 13093 - DNA, 886 bp, Homo sapiens
tcctcctctctcacctccgacgcgtctcttggcgccccacccgcgcttccttctccggccgtgacgctccctcgagccacggggagctttgcggtctcctggggtaccccccacccacgtccctgctgcaggctcccagtgtcctgccccggcgtcgagtgcgccctgctggctccccgacctctcccgcgatctgttcttgttaggattttgtttcgcgttgagcggagccacgcttgcggcttctgtcctctccgcgcctcgtatcgttcttttcttgcactgaatcaagtcagccagcatgtccaaatcctccaagagatttcagggattgaactaggctttagggacaagaagatgaaatattatatacgaaaactacaattctgacaaagtgctttctagcgtcagaccctggtggagcgcttcccaggagttatctcattcaattctcgcaactccgagaggcgccttctatttcacagatgactcagaagtccggctcagagctagccaagtgataaagagagccttcaagctgaagtctgcgtacctccagtgctataaccagaccaccacgcctccttctgtcttccacattgcagctcgaaggagcagtagagaactgtggactattctgcttggaaggtcagctctgagagagctgagtcagattgaggcagaactgaataaacattggcggcgattgttagaggggctttcttactacaaacctcccagtccaagttcagctgaaaaagtgaaagctaataaagatgtagcttcaccattgaaggaactgggtttaagaatcagcaagtttttgggtcttgatgaagaacagagtgtgcagttactccagtgttacctgcaagaggactacagg

SEQ ID NO: 13094 - DNA, 8412 bp, Homo sapiens
agtgctatctgcaggctggccagcttcctctgcgctccggaaagctgcggcccagcgcggactagtgaggacctccacagctcctgacattgccaggagtcctgtcggcgttttctcccagcctccgccatgccggcggtgctgggttttgaaggcagcgccaataagattggcgtgggcgtggtgcgggatggcaaggtgctggcgaacccgcggcggacttacgtcacgcctcctggcacaggttggtgagtaggggacttaagagttttccgcgcacttccccgcacagaatcagccttccatcttcctaaatactagtgaggtgcagctttcgatccgagtctcattgaaattatgtgacattattaacgtcacaaggctgatgactagaagagttacaggcacttggacgtggatctgatgagttcatttaccttttactgagcgcattttatgtgctaagtattcagaaatagatgttatactgctgtggagtcagacatataaatagatgtttatactacagcatgataaacagtataatagagatggactcgaaatattctgtttaaaaaacgcttagcaggagtatagattccagttgccctgaatatacactccctttttaaaaaaaaattattttttgaaatattctaggatgagtagagagatgagagtggaaagactcccggcttacatgtcagacagaactggctggctttgctatattcatattaaatatttttgttttggacatttggtctttattttttattttattttatttttttgagacagagtcttgctctgtcgcccaggctggaatgcagtggcacgatctcggctcactgcaatctctgccttccaggttcaagcgattcttctaccccagcctcccaagtagctaggactataggtgtgcgccaccacatccagctaaattttgtatttttagtagagtcggggtttccaccaggccaagctggtctcgaactcctgacctcagatgatccgcccaccccagcctcccaaagtgtggaaattacaggcatgagccaccgctcgggcctggtctttgtttttaaaatgggaataatacctgtatcattaggtcttgaagattagatgaaagtaccaaacacggctgggcgtggtggctcacgcctgtaatcccagcactttgggaggccaaggcaggcagatcacctgaggtcggggttcgagaccagcctgaccaacatggagaaaccatgtttccactaaaaaatacaaaaaattaactgggcgtggtggcgcatgcctgtaaacccagctacttgggaggctgaggcaggagaattgcgtgaacccgggagacagaggttgcagtgagccgagatggtgccattgcactccagcctgggcatcaagagtgaaactctgtctcaaaaaaaaaaaaagtacaaaacacattacaacttttaattgatattttaaataagctattatatcttgctactctcccctcaaacacttgcatacataggagagggcagctgacttgcatgtatctgaaaagcctccctgaacaggtgatgttgtgacagatactcactagaaatatatatgtatgtttagcattcactcctctgggcacttgggcactgggaatacaaagataaataaaatactcaatgctttgagatattcatgattaagctgagcaaaccacagaaaattataatgctgtaattgttatgttaaataaatgacatcatcatgcatagagttctgtagggtcacagagaaagaagatcaccaaaggccaggcacggtggctcaggcctgtaatcccagcactttgggaggccgaggcagacggatcacgaggtcaggagttcgagaccagcctggccaatatggtgaaaccccgtctctactaaaaatacaaaagttagctgagcgtggtggtgtcgcctgtagtcccagctactcaggaggctgaggcagaagaatctcttgaactcaggaggtggaggttgcagtgagccgagatcgtgccactgcactccagcctgggtgacagagctgagactgtctcaaaagaaaaaaaaaaaaaaaagatcacgaaagggtatgaggtagatactacttgcattgagacctgaaggctgagtagggtaagaagaagagcatttctgaaagttgaatagcctatatagaagccggaaagagtagatgtgaaaatgtggaagataggatgcttggggaaagtgaaaggactcttactacatcactaaaactcctgttgctttctttaacttcctacctacctttgctacagaaaatccctgtgatctctgacctatgttcattttctaggattccttccaggtgatacagccaggcatcaccgagctgttatcctagacctgctgcaggaggcactaacagagtctggattaacctcccaggatatcgactgcattgcatacaccaagggtatggctgggagagtggtcaacgatggaggaatatacctgcaacctggctaggtcaaaatagccaacaccttacctctgccaccatcactacccctaccccacctcacatcccttatgtcccccactattgtttttttccaatctctaggattataacttccatttctatctccctaggccctggcatgggtgccccactggtttctgtggctgttgtggcccgtactgtggcccaactgtggaataagccattggtgggtgtgaaccactgtataggccacattgagatgggccgcctcatcactggagccaccagcccaaccgtgttgtatgtgagtggaggaaatacgcaggtatttagagggctctacccactccatctcaatttctgaggcactgaaccagtattttctttgttctatctgagtcatgggaatgtcaggaacaaagatggacttatctgaacctaaaatactgtagaccagaaaacccccaacagagtttgtaacattgcaaattttggcagcatgatcagaacattagatggcttatcattatcagactttatatctgattataaagattaggaatttctacttcaggaaaggaatgaatgggattgaaaaggattgaaatcttcaaaataatgaatatctgaaagctcttgcattattttgaagcttattttttctataaatcttagcaattgaaactaacagttgctgggtatggcaactcatgcctgtaattccagcactttgggaggtcgaggcgggtggatcatctgaggtcaggagtttgagcccagcctggccaacgtggcaaaaccccatctgtactaaaaataacaaaaattaatttgatgtggtggcaggtgcctgtaatcctagcaactccggaggctgggcaggagaatcacttgaacccaggaggcggaagttgcggtgaaccgagatcgcaccattgcattccagcctgggcaacaagagcaaaactccgtctcaaacaaacaaacaaacaaaaaacaaaaaaaaacaactaaaggacactacctgatttattattttggggcaagtacatgttttgtttttatattactgggaatgattatgtagactttgttattctaagagtttagaaatataaataactttaaaaaatactttgtaaattatagaaggtattttattttatcttatttatttatttatttatttgagatggagtttcgctcttattgtccaggttggagtgcaatgatgcaaccttggctcattgcaacctctgcctcccgggtccaaactattcttctctactcccgagtagctgggattacaggcacccgccaccatacctggctaattttttgtgtttttagtagagacgggatttcaccctgttggtcaggctggtcttgaactcctgacctcaggtgatccacctgcctcggcctccctaagtgctgggattacaggcgtgagccaccatgcccggccagaaggtattttaaatttataggtgaagctaaagttgtttgggttaccttatatgacctttttaaggttgggattggattcttttccaacagaacacttgattatcattagaaatagttcagcattgtccccagctcatgaaagggttgtgtcgagaagatgaggcacatgtttcccatgaaaatgatgcagaaacttcagcaggtagagggcaagtagttggttgaggcctgaaggatgacatacaaggtcagagacttgggttgtggaaagtataatggaggctacaagagttgatgaaaggagcagtgacggttttgtcttcctcttctcttttaatgtttgcttaggtgtaagaaacagggagggtgattaggtggagaggagtggatagcagaagcagaaaggcaggatttttccttcgcctttgttactgtctttttgacagcagattaagatctgtatcagaaagggaagaaatccctaacagcactgggaagggaaagggacttcttaaggttcgtaggaagccctcggtgttataagtctgcagaatatgtgtcagtaagggacagatattctctgtgctaaaagttggtcacatatgaagaacggccttaatacaaaaaagtggtggtgggtgcctgtaattccagctgcttgggaggctgaggcaggagaattgcttgaacctgggaggcagaggttgcagtgagctgagatcacgccattgcactccagcctaggcgacagaacaagactctgtctcagaaaaaaaaaaaaaagaaaagaaaaatggccttaagtgaattgccattgctgacttggctgggccattagtctgactccatatgagatttttgagttcttcagctctgcttcttggttctaaataccactgcccagctgcatacggtggttcacacctataatcccagcactttgagaggctgaggcaggtagattgcttgagaccaggagtttgagaccaggctgggcaacatagtgagacccccatctctacaaaaatataaaaataagccacacatggtagcccagctactcaggaagctgaggtgggaggatcctttgagcctaggaggtggaggctacagtgagctatgatcacaccactccactccagcctgggagacagagcgagaccctgtctcaaaaaaaaattaccactgccactgtgtcataatttagaaggattcatgttctctgcctccaagcagaaaagccggttacctactatcaagactgcatttaagggatatattaggaacttctaagccggaaaaccaatgtatttgaaatgacaatttatttctgcctgaacctacactgtctaggaatctgttcctggaatcctcagggtatacagatttcttctcaaatcagagctgtaaaaactacccattcaccatttgggaaacacctttcttccacttcttattggaagccctggtggtcatgttgatcctctgctatgtttttctcccaaagccaaataatcctctttacagacttggggtttcatggacttcctcatcacccttaggtgattgcatactcggaacatcgttaccgtatctttggggaaaccatcgatattgcagtgggtaattgtctggatcgttttgctcgagtgctgaaggtaagccagtggggctgcagagaacataaaatgtgggtgaatttttgggaagccatggaggtggagggaggaaatagtaaatgagcttcttatgcttcctgcatatctgatttcatcctcttccattccctccttccttatttttttcttctgctagatttctaacgacccaagtccaggatacaacattgaacagatggcaaagcggtaaggggacataaggtggaagcaggctggctgctggggcttcagggatttccccatatacggtatatattaacaaaatttgggacgggctttggagggtgagaagccagctgactgtaggcttagtgcctcgtacgcttattcccacatagaggcaagaagctagttgagctgccatacactgtaaaggggatggacgtctcattctcagggatcctgtctttcattgaggtgagtgtgagaggtgatgagacgggcactttcatgctttttaaatgaagcatatctgttttacttacgattatatttcgtatagctcagtatattcatgtagcacagtactggtccatatcatgtgctgggtaaattcatttagaaggtattcattgaatatctctgtgtgccacatgctgttctagatagtagagatgcagcatggagcaaaacaaaaatccctgtctacatggagcttagattctaaatggggggcgggggagataagaaagaggaaaataatgaagtgccagatgatgatgagtacaggtgaaaaattaagcaggataagtaaggggtgagagatgtcaggacaagtattcaaaaagtaatgattgcatcttaaatgaaagctgctcattctatgccatgatgccagtgaagggaatgtggtacaggatgtgctggtaacttgaattgtggtgaaacatgatgaccctccgaatgcattaatttttgctctcgtgtaatcccaaaaccatgatttgttgattcttttgtttttccctttaattgtaggatgtagcccatcggatgctggccacaggcgagtgtactcctgaggatctgtgtttctccctgcaggtaatgcagtaaaaaactgggacagaaagttggggctgaaggttttatattgtagagcagaactaatctgggatgcccctctaatattttctccttatctgtccctgacaggaaactgtgtttgcaatgctggtagagatcacagagcgagccatggcacattgtggctcccaggaggccctcattgtgggaggagtggggtgtatgtattattgaaaagtgttcctctttcctattcttaacactatgcgtcttcctcctggtactctaaatcattaagcgtttggagtaggcttcccaatccttgcccctaatcccctatgtcattgttctaagtgagtgcacatgacgtgttctgctggaccatgaagagatggctaaaactaagctaatcctgttccctgcctctttgtaggtaatgtgaggctacaggagatgatggcaacaatgtgccaggaacgtggagcccggctttttgctacagatgagaggtaaagacactttccctttggtttcttttttacttctcctgttatagtgattttccacccttagatcccaattttcatctctcttgcatcccagattctgtattgacaatggagcgatgatagcccaggctggctgggagatgtttcgggctggacacaggaccccactcagtgattctggggttacacagaggtgagtgattcacctcttggtgagggtagattattgggacatagacaaaaacagcagggaagagtccaggaacatgagggcagagaagaatgaaggatgttaagggctcgctctccaccatgtttcttctgtttttccacaggtatcggacagatgaagtagaggtgacctggagggactaataagatcaacagaatcagagtagatagttccttaatcggaacccaaaggaccccgtgcctcaatctctatcctgatgtcatgggagtcctagcaaagctatagactccaagcaaggcttggggtcctttatggaaccccaggatgactcagcaataaaatatttttggttttttggttttgtatgttggtgattggattgtgttgttcaggaccaatgtagatttggtgctggataaattcttgttggagcttgctgctgtggaaccaagaatgaggtatctttttttttttttttaagaaacggaatcttgctgtgtttcccaggctggtctcgaactgggctcaagcagtcttaccacctcagcctcctgagtaaggatgccattgtgcctggcaacaatagtagtatcataactattattatagcatcgggtcccgtgctaactgctttacattcattctctcatttaaattctttgaagtaggtgtgcaagacttctctcaaaatagcctggaggctcacacctgttatcccagtgctgtgggaggccaagtcaggaggatcccttgagcccaggagtttgagcccagcctgggcaaatagcaagacaccatctatttgaaaaatgtaaaaattatctgggcatggtggcgcacatctgtagtcccagctccaagggaggctgaggcgggaagatagcttgagcccaggagtttgaggttgcagtgagctgtgattgagccactgcattccagcctgagtgacagaacaaaaccttgtctcttaaaaacaaacaaacaaacagcctggagattggtctaacttgtaactctaaaa

SEQ ID NO: 13095 - DNA, 1976 bp, Homo sapiens
agtgctatctgcaggctggccagcttcctctgcgctccggaaagctgcggcccagcgcggactagtgaggacctccacagctcctgacattgccaggagtcctgtcggcgttttctcccagcctccgccatgccggcggtgctgggttttgaaggcagcgccaataagattggcgtgggcgtggtgcgggatggcaaggtgctggcgaacccgcggcggacttacgtcacgcctcctggcacaggattccttccaggtgatacagccaggcatcaccgagctgttatcctagacctgctgcaggaggcactaacagagtctggattaacctcccaggatatcgactgcattgcatacaccaagggccctggcatgggtgccccactggtttctgtggctgttgtggcccgtactgtggcccaactgtggaataagccattggtgggtgtgaaccactgtataggccacattgagatgggccgcctcatcactggagccaccagcccaaccgtgttgtatgtgagtggaggaaatacgcaggtgattgcatactcggaacatcgttaccgtatctttggggaaaccatcgatattgcagtgggtaattgtctggatcgttttgctcgagtgctgaagatttctaacgacccaagtccaggatacaacattgaacagatggcaaagcgaggcaagaagctagttgagctgccatacactgtaaaggggatggacgtctcattctcagggatcctgtctttcattgaggatgtagcccatcggatgctggccacaggcgagtgtactcctgaggatctgtgtttctccctgcaggaaactgtgtttgcaatgctggtagagatcacagagcgagccatggcacattgtggctcccaggaggccctcattgtgggaggagtggggtgtaatgtgaggctacaggagatgatggcaacaatgtgccaggaacgtggagcccggctttttgctacagatgagagattctgtattgacaatggagcgatgatagcccaggctggctgggagatgtttcgggctggacacaggaccccactcagtgattctggggttacacagaggtatcggacagatgaagtagaggtgacctggagggactaataagatcaacagaatcagagtagatagttccttaatcggaacccaaaggaccccgtgcctcaatctctatcctgatgtcatgggagtcctagcaaagctatagactccaagcaaggcttggggtcctttatggaaccccaggatgactcagcaataaaatatttttggttttttggttttgtatgttggtgattggattgtgttgttcaggaccaatgtagatttggtgctggataaattcttgttggagcttgctgctgtggaaccaagaatgaggtatctttttttttttttttaagaaacggaatcttgctgtgtttcccaggctggtctcgaactgggctcaagcagtcttaccacctcagcctcctgagtaaggatgccattgtgcctggcaacaatagtagtatcataactattattatagcatcgggtcccgtgctaactgctttacattcattctctcatttaaattctttgaagtaggtgtgcaagacttctctcaaaatagcctggaggctcacacctgttatcccagtgctgtgggaggccaagtcaggaggatcccttgagcccaggagtttgagcccagcctgggcaaatagcaagacaccatctatttgaaaaatgtaaaaattatctgggcatggtggcgcacatctgtagtcccagctccaagggaggctgaggcgggaagatagcttgagcccaggagtttgaggttgcagtgagctgtgattgagccactgcattccagcctgagtgacagaacaaaaccttgtctcttaaaaacaaacaaacaaacagcctggagattggtctaacttgtaactctaaaa

SEQ ID NO: 13096 - DNA, 624 bp, Homo sapiens
aatgtgaggctacaggagatgatggcaacaatgtgccaggaacgtggagcccggctttttgctacagatgagaggtaaagacactttccctttggtttcttttttacttctcctgttatagtgattttccacccttagatcccaattttcatctctcttgcatcccagattctgtattgacaatggagcgatgatagcccaggctggctgggagatgtttcgggctggacacaggaccccactcagtgattctggggttacacagaggtgagtgattcacctcttggtgagggtagattattgggacatagacaaaaacagcagggaagagtccaggaacatgagggcagagaagaatgaaggatgttaagggctcgctctccaccatgtttcttctgtttttccacaggtatcggacagatgaagtagaggtgacctggagggactaataagatcaacagaatcagagtagatagttccttaatcggaacccaaaggaccccgtgcctcaatctctatcctgatgtcatgggagtcctagcaaagctatagactccaagcaaggcttggggtcctttatggaaccccaggatgactcagcaataaaatatttttggttttttg

SEQ ID NO: 13097 - DNA, 530 bp, Homo sapiens
aatgtgaggctacaggagatgatggcaacaatgtgccaggaacgtggagcccggctttttgctacagatgagagattctgtattgacaatggagcgatgatagcccaggctggctgggagatgtttcgggctggacacaggaccccactcagtgattctggggttacacagaggtgagtgattcacctcttggtgagggtagattattgggacatagacaaaaacagcagggaagagtccaggaacatgagggcagagaagaatgaaggatgttaagggctcgctctccaccatgtttcttctgtttttccacaggtatcggacagatgaagtagaggtgacctggagggactaataagatcaacagaatcagagtagatagttccttaatcggaacccaaaggaccccgtgcctcaatctctatcctgatgtcatgggagtcctagcaaagctatagactccaagcaaggcttggggtcctttatggaaccccaggatgactcagcaataaaatatttttggttttttg

SEQ ID NO: 13098 - DNA, 5605 bp, Homo sapiens
agtgctatctgcaggctggccagcttcctctgcgctccggaaagctgcggcccagcgcggactagtgaggacctccacagctcctgacattgccaggagtcctgtcggcgttttctcccagcctccgccatgccggcggtgctgggttttgaaggcagcgccaataagattggcgtgggcgtggtgcgggatggcaaggtgctggcgaacccgcggcggacttacgtcacgcctcctggcacaggttggtgagtaggggacttaagagttttccgcgcacttccccgcacagaatcagccttccatcttcctaaatactagtgaggtgcagctttcgatccgagtctcattgaaattatgtgacattattaacgtcacaaggctgatgactagaagagttacaggcacttggacgtggatctgatgagttcatttaccttttactgagcgcattttatgtgctaagtattcagaaatagatgttatactgctgtggagtcagacatataaatagatgtttatactacagcatgataaacagtataatagagatggactcgaaatattctgtttaaaaaacgcttagcaggagtatagattccagttgccctgaatatacactccctttttaaaaaaaaattattttttgaaatattctaggatgagtagagagatgagagtggaaagactcccggcttacatgtcagacagaactggctggctttgctatattcatattaaatatttttgttttggacatttggtctttattttttattttattttatttttttgagacagagtcttgctctgtcgcccaggctggaatgcagtggcacgatctcggctcactgcaatctctgccttccaggttcaagcgattcttctaccccagcctcccaagtagctaggactataggtgtgcgccaccacatccagctaaattttgtatttttagtagagtcggggtttccaccaggccaagctggtctcgaactcctgacctcagatgatccgcccaccccagcctcccaaagtgtggaaattacaggcatgagccaccgctcgggcctggtctttgtttttaaaatgggaataatacctgtatcattaggtcttgaagattagatgaaagtaccaaacacggctgggcgtggtggctcacgcctgtaatcccagcactttgggaggccaaggcaggcagatcacctgaggtcggggttcgagaccagcctgaccaacatggagaaaccatgtttccactaaaaaatacaaaaaattaactgggcgtggtggcgcatgcctgtaaacccagctacttgggaggctgaggcaggagaattgcgtgaacccgggagacagaggttgcagtgagccgagatggtgccattgcactccagcctgggcatcaagagtgaaactctgtctcaaaaaaaaaaaaagtacaaaacacattacaacttttaattgatattttaaataagctattatatcttgctactctcccctcaaacacttgcatacataggagagggcagctgacttgcatgtatctgaaaagcctccctgaacaggtgatgttgtgacagatactcactagaaatatatatgtatgtttagcattcactcctctgggcacttgggcactgggaatacaaagataaataaaatactcaatgctttgagatattcatgattaagctgagcaaaccacagaaaattataatgctgtaattgttatgttaaataaatgacatcatcatgcatagagttctgtagggtcacagagaaagaagatcaccaaaggccaggcacggtggctcaggcctgtaatcccagcactttgggaggccgaggcagacggatcacgaggtcaggagttcgagaccagcctggccaatatggtgaaaccccgtctctactaaaaatacaaaagttagctgagcgtggtggtgtcgcctgtagtcccagctactcaggaggctgaggcagaagaatctcttgaactcaggaggtggaggttgcagtgagccgagatcgtgccactgcactccagcctgggtgacagagctgagactgtctcaaaagaaaaaaaaaaaaaaaagatcacgaaagggtatgaggtagatactacttgcattgagacctgaaggctgagtagggtaagaagaagagcatttctgaaagttgaatagcctatatagaagccggaaagagtagatgtgaaaatgtggaagataggatgcttggggaaagtgaaaggactcttactacatcactaaaactcctgttgctttctttaacttcctacctacctttgctacagaaaatccctgtgatctctgacctatgttcattttctaggattccttccaggtgatacagccaggcatcaccgagctgttatcctagacctgctgcaggaggcactaacagagtctggattaacctcccaggatatcgactgcattgcatacaccaagggtatggctgggagagtggtcaacgatggaggaatatacctgcaacctggctaggtcaaaatagccaacaccttacctctgccaccatcactacccctaccccacctcacatcccttatgtcccccactattgtttttttccaatctctaggattataacttccatttctatctccctaggccctggcatgggtgccccactggtttctgtggctgttgtggcccgtactgtggcccaactgtggaataagccattggtgggtgtgaaccactgtataggccacattgagatgggccgcctcatcactggagccaccagcccaaccgtgttgtatgtgagtggaggaaatacgcaggtatttagagggctctacccactccatctcaatttctgaggcactgaaccagtattttctttgttctatctgagtcatgggaatgtcaggaacaaagatggacttatctgaacctaaaatactgtagaccagaaaacccccaacagagtttgtaacattgcaaattttggcagcatgatcagaacattagatggcttatcattatcagactttatatctgattataaagattaggaatttctacttcaggaaaggaatgaatgggattgaaaaggattgaaatcttcaaaataatgaatatctgaaagctcttgcattattttgaagcttattttttctataaatcttagcaattgaaactaacagttgctgggtatggcaactcatgcctgtaattccagcactttgggaggtcgaggcgggtggatcatctgaggtcaggagtttgagcccagcctggccaacgtggcaaaaccccatctgtactaaaaataacaaaaattaatttgatgtggtggcaggtgcctgtaatcctagcaactccggaggctgggcaggagaatcacttgaacccaggaggcggaagttgcggtgaaccgagatcgcaccattgcattccagcctgggcaacaagagcaaaactccgtctcaaacaaacaaacaaacaaaaaacaaaaaaaaacaactaaaggacactacctgatttattattttggggcaagtacatgttttgtttttatattactgggaatgattatgtagactttgttattctaagagtttagaaatataaataactttaaaaaatactttgtaaattatagaaggtattttattttatcttatttatttatttatttatttgagatggagtttcgctcttattgtccaggttggagtgcaatgatgcaaccttggctcattgcaacctctgcctcccgggtccaaactattcttctctactcccgagtagctgggattacaggcacccgccaccatacctggctaattttttgtgtttttagtagagacgggatttcaccctgttggtcaggctggtcttgaactcctgacctcaggtgatccacctgcctcggcctccctaagtgctgggattacaggcgtgagccaccatgcccggccagaaggtattttaaatttataggtgaagctaaagttgtttgggttaccttatatgacctttttaaggttgggattggattcttttccaacagaacacttgattatcattagaaatagttcagcattgtccccagctcatgaaagggttgtgtcgagaagatgaggcacatgtttcccatgaaaatgatgcagaaacttcagcaggtagagggcaagtagttggttgaggcctgaaggatgacatacaaggtcagagacttgggttgtggaaagtataatggaggctacaagagttgatgaaaggagcagtgacggttttgtcttcctcttctcttttaatgtttgcttaggtgtaagaaacagggagggtgattaggtggagaggagtggatagcagaagcagaaaggcaggatttttccttcgcctttgttactgtctttttgacagcagattaagatctgtatcagaaagggaagaaatccctaacagcactgggaagggaaagggacttcttaaggttcgtaggaagccctcggtgttataagtctgcagaatatgtgtcagtaagggacagatattctctgtgctaaaagttggtcacatatgaagaacggccttaatacaaaaaagtggtggtgggtgcctgtaattccagctgcttgggaggctgaggcaggagaattgcttgaacctgggaggcagaggttgcagtgagctgagatcacgccattgcactccagcctaggcgacagaacaagactctgtctcagaaaaaaaaaaaaaagaaaagaaaaatggccttaagtgaattgccattgctgacttggctgggccattagtctgactccatatgagatttttgagttcttcagctctgcttcttggttctaaataccactgcccagctgcatacggtggttcacacctataatcccagcactttgagaggctgaggcaggtagattgcttgagaccaggagtttgagaccaggctgggcaacatagtgagacccccatctctacaaaaatataaaaataagccacacatggtagcccagctactcaggaagctgaggtgggaggatcctttgagcctaggaggtggaggctacagtgagctatgatcacaccactccactccagcctgggagacagagcgagaccctgtctcaaaaaaaaattaccactgccactgtgtcataatttagaaggattcatgttctctgcctccaagcagaaaagccggttacctactatcaagactgcatttaagggatatattaggaacttctaagccggaaaaccaatgtatttgaaatgacaatttatttctgcctgaacctacactgtctaggaatctgttcctggaatcctcagggtatacagatttcttctcaaatcagagctgtaaaaactacccattcaccatttgggaaacacctttcttccacttcttattggaagccctggtggtcatgttgatcctctgctatgtttttctcccaaagccaaataatcctctttacagacttggggtttcatggacttcctcatcacccttaggtgattgcatactcggaacatcgttaccgtatctttggggaaaccatcgatattgcagt

SEQ ID NO: 13099 - DNA, 578 bp, Homo sapiens
agtgctatctgcaggctggccagcttcctctgcgctccggaaagctgcggcccagcgcggactagtgaggacctccacagctcctgacattgccaggagtcctgtcggcgttttctcccagcctccgccatgccggcggtgctgggttttgaaggcagcgccaataagattggcgtgggcgtggtgcgggatggcaaggtgctggcgaacccgcggcggacttacgtcacgcctcctggcacaggattccttccaggtgatacagccaggcatcaccgagctgttatcctagacctgctgcaggaggcactaacagagtctggattaacctcccaggatatcgactgcattgcatacaccaagggccctggcatgggtgccccactggtttctgtggctgttgtggcccgtactgtggcccaactgtggaataagccattggtgggtgtgaaccactgtataggccacattgagatgggccgcctcatcactggagccaccagcccaaccgtgttgtatgtgattgcatactcggaacatcgttaccgtatctttggggaaaccatcgatattgcagt

SEQ ID NO: 13100 - DNA, 2260 bp, Homo sapiens
gggaaacacctttcttccacttcttattggaagccctggtggtcatgttgatcctctgctatgtttttctcccaaagccaaataatcctctttacagacttggggtttcatggacttcctcatcacccttaggtgattgcatactcggaacatcgttaccgtatctttggggaaaccatcgatattgcagtgggtaattgtctggatcgttttgctcgagtgctgaaggtaagccagtggggctgcagagaacataaaatgtgggtgaatttttgggaagccatggaggtggagggaggaaatagtaaatgagcttcttatgcttcctgcatatctgatttcatcctcttccattccctccttccttatttttttcttctgctagatttctaacgacccaagtccaggatacaacattgaacagatggcaaagcggtaaggggacataaggtggaagcaggctggctgctggggcttcagggatttccccatatacggtatatattaacaaaatttgggacgggctttggagggtgagaagccagctgactgtaggcttagtgcctcgtacgcttattcccacatagaggcaagaagctagttgagctgccatacactgtaaaggggatggacgtctcattctcagggatcctgtctttcattgaggtgagtgtgagaggtgatgagacgggcactttcatgctttttaaatgaagcatatctgttttacttacgattatatttcgtatagctcagtatattcatgtagcacagtactggtccatatcatgtgctgggtaaattcatttagaaggtattcattgaatatctctgtgtgccacatgctgttctagatagtagagatgcagcatggagcaaaacaaaaatccctgtctacatggagcttagattctaaatggggggcgggggagataagaaagaggaaaataatgaagtgccagatgatgatgagtacaggtgaaaaattaagcaggataagtaaggggtgagagatgtcaggacaagtattcaaaaagtaatgattgcatcttaaatgaaagctgctcattctatgccatgatgccagtgaagggaatgtggtacaggatgtgctggtaacttgaattgtggtgaaacatgatgaccctccgaatgcattaatttttgctctcgtgtaatcccaaaaccatgatttgttgattcttttgtttttccctttaattgtaggatgtagcccatcggatgctggccacaggcgagtgtactcctgaggatctgtgtttctccctgcaggtaatgcagtaaaaaactgggacagaaagttggggctgaaggttttatattgtagagcagaactaatctgggatgcccctctaatattttctccttatctgtccctgacaggaaactgtgtttgcaatgctggtagagatcacagagcgagccatggcacattgtggctcccaggaggccctcattgtgggaggagtggggtgtatgtattattgaaaagtgttcctctttcctattcttaacactatgcgtcttcctcctggtactctaaatcattaagcgtttggagtaggcttcccaatccttgcccctaatcccctatgtcattgttctaagtgagtgcacatgacgtgttctgctggaccatgaagagatggctaaaactaagctaatcctgttccctgcctctttgtaggtaatgtgaggctacaggagatgatggcaacaatgtgccaggaacgtggagcccggctttttgctacagatgagaggtaaagacactttccctttggtttcttttttacttctcctgttatagtgattttccacccttagatcccaattttcatctctcttgcatcccagattctgtattgacaatggagcgatgatagcccaggctggctgggagatgtttcgggctggacacaggaccccactcagtgattctggggttacacagaggtgagtgattcacctcttggtgagggtagattattgggacatagacaaaaacagcagggaagagtccaggaacatgagggcagagaagaatgaaggatgttaagggctcgctctccaccatgtttcttctgtttttccacaggtatcggacagatgaagtagaggtgacctggagggactaataagatcaacagaatcagagtagatagttccttaatcggaacccaaaggaccccgtgcctcaatctctatcctgatgtcatgggagtcctagcaaagctat

SEQ ID NO: 13101 - DNA, 987 bp, Homo sapiens
gggaaacacctttcttccacttcttattggaagccctggtggtcatgttgatcctctgctatgtttttctcccaaagccaaataatcctctttacagacttggggtttcatggacttcctcatcacccttaggtgattgcatactcggaacatcgttaccgtatctttggggaaaccatcgatattgcagtgggtaattgtctggatcgttttgctcgagtgctgaaggtaagccagtggggctgcagagaacataaaatgtgggtgaatttttgggaagccatggaggtggagggaggaaatagtaaatgagcttcttatgcttcctgcatatctgatttcatcctcttccattccctccttccttatttttttcttctgctagatttctaacgacccaagtccaggatacaacattgaacagatggcaaagcgaggcaagaagctagttgagctgccatacactgtaaaggggatggacgtctcattctcagggatcctgtctttcattgaggatgtagcccatcggatgctggccacaggcgagtgtactcctgaggatctgtgtttctccctgcaggaaactgtgtttgcaatgctggtagagatcacagagcgagccatggcacattgtggctcccaggaggccctcattgtgggaggagtggggtgtaatgtgaggctacaggagatgatggcaacaatgtgccaggaacgtggagcccggctttttgctacagatgagagattctgtattgacaatggagcgatgatagcccaggctggctgggagatgtttcgggctggacacaggaccccactcagtgattctggggttacacagaggtatcggacagatgaagtagaggtgacctggagggactaataagatcaacagaatcagagtagatagttccttaatcggaacccaaaggaccccgtgcctcaatctctatcctgatgtcatgggagtcctagcaaagctat

SEQ ID NO: 13102 - DNA, 5572 bp, Homo sapiens
ccagcttcctctgcgctccggaaagctgcggcccagcgcggactagtgaggacctccacagctcctgacattgccaggagtcctgtcggcgttttctcccagcctccgccatgccggcggtgctgggttttgaaggcagcgccaataagattggcgtgggcgtggtgcgggatggcaaggtgctggcgaacccgcggcggacttacgtcacgcctcctggcacaggttggtgagtaggggacttaagagttttccgcgcacttccccgcacagaatcagccttccatcttcctaaatactagtgaggtgcagctttcgatccgagtctcattgaaattatgtgacattattaacgtcacaaggctgatgactagaagagttacaggcacttggacgtggatctgatgagttcatttaccttttactgagcgcattttatgtgctaagtattcagaaatagatgttatactgctgtggagtcagacatataaatagatgtttatactacagcatgataaacagtataatagagatggactcgaaatattctgtttaaaaaacgcttagcaggagtatagattccagttgccctgaatatacactccctttttaaaaaaaaattattttttgaaatattctaggatgagtagagagatgagagtggaaagactcccggcttacatgtcagacagaactggctggctttgctatattcatattaaatatttttgttttggacatttggtctttattttttattttattttatttttttgagacagagtcttgctctgtcgcccaggctggaatgcagtggcacgatctcggctcactgcaatctctgccttccaggttcaagcgattcttctaccccagcctcccaagtagctaggactataggtgtgcgccaccacatccagctaaattttgtatttttagtagagtcggggtttccaccaggccaagctggtctcgaactcctgacctcagatgatccgcccaccccagcctcccaaagtgtggaaattacaggcatgagccaccgctcgggcctggtctttgtttttaaaatgggaataatacctgtatcattaggtcttgaagattagatgaaagtaccaaacacggctgggcgtggtggctcacgcctgtaatcccagcactttgggaggccaaggcaggcagatcacctgaggtcggggttcgagaccagcctgaccaacatggagaaaccatgtttccactaaaaaatacaaaaaattaactgggcgtggtggcgcatgcctgtaaacccagctacttgggaggctgaggcaggagaattgcgtgaacccgggagacagaggttgcagtgagccgagatggtgccattgcactccagcctgggcatcaagagtgaaactctgtctcaaaaaaaaaaaaagtacaaaacacattacaacttttaattgatattttaaataagctattatatcttgctactctcccctcaaacacttgcatacataggagagggcagctgacttgcatgtatctgaaaagcctccctgaacaggtgatgttgtgacagatactcactagaaatatatatgtatgtttagcattcactcctctgggcacttgggcactgggaatacaaagataaataaaatactcaatgctttgagatattcatgattaagctgagcaaaccacagaaaattataatgctgtaattgttatgttaaataaatgacatcatcatgcatagagttctgtagggtcacagagaaagaagatcaccaaaggccaggcacggtggctcaggcctgtaatcccagcactttgggaggccgaggcagacggatcacgaggtcaggagttcgagaccagcctggccaatatggtgaaaccccgtctctactaaaaatacaaaagttagctgagcgtggtggtgtcgcctgtagtcccagctactcaggaggctgaggcagaagaatctcttgaactcaggaggtggaggttgcagtgagccgagatcgtgccactgcactccagcctgggtgacagagctgagactgtctcaaaagaaaaaaaaaaaaaaaagatcacgaaagggtatgaggtagatactacttgcattgagacctgaaggctgagtagggtaagaagaagagcatttctgaaagttgaatagcctatatagaagccggaaagagtagatgtgaaaatgtggaagataggatgcttggggaaagtgaaaggactcttactacatcactaaaactcctgttgctttctttaacttcctacctacctttgctacagaaaatccctgtgatctctgacctatgttcattttctaggattccttccaggtgatacagccaggcatcaccgagctgttatcctagacctgctgcaggaggcactaacagagtctggattaacctcccaggatatcgactgcattgcatacaccaagggtatggctgggagagtggtcaacgatggaggaatatacctgcaacctggctaggtcaaaatagccaacaccttacctctgccaccatcactacccctaccccacctcacatcccttatgtcccccactattgtttttttccaatctctaggattataacttccatttctatctccctaggccctggcatgggtgccccactggtttctgtggctgttgtggcccgtactgtggcccaactgtggaataagccattggtgggtgtgaaccactgtataggccacattgagatgggccgcctcatcactggagccaccagcccaaccgtgttgtatgtgagtggaggaaatacgcaggtatttagagggctctacccactccatctcaatttctgaggcactgaaccagtattttctttgttctatctgagtcatgggaatgtcaggaacaaagatggacttatctgaacctaaaatactgtagaccagaaaacccccaacagagtttgtaacattgcaaattttggcagcatgatcagaacattagatggcttatcattatcagactttatatctgattataaagattaggaatttctacttcaggaaaggaatgaatgggattgaaaaggattgaaatcttcaaaataatgaatatctgaaagctcttgcattattttgaagcttattttttctataaatcttagcaattgaaactaacagttgctgggtatggcaactcatgcctgtaattccagcactttgggaggtcgaggcgggtggatcatctgaggtcaggagtttgagcccagcctggccaacgtggcaaaaccccatctgtactaaaaataacaaaaattaatttgatgtggtggcaggtgcctgtaatcctagcaactccggaggctgggcaggagaatcacttgaacccaggaggcggaagttgcggtgaaccgagatcgcaccattgcattccagcctgggcaacaagagcaaaactccgtctcaaacaaacaaacaaacaaaaaacaaaaaaaaacaactaaaggacactacctgatttattattttggggcaagtacatgttttgtttttatattactgggaatgattatgtagactttgttattctaagagtttagaaatataaataactttaaaaaatactttgtaaattatagaaggtattttattttatcttatttatttatttatttatttgagatggagtttcgctcttattgtccaggttggagtgcaatgatgcaaccttggctcattgcaacctctgcctcccgggtccaaactattcttctctactcccgagtagctgggattacaggcacccgccaccatacctggctaattttttgtgtttttagtagagacgggatttcaccctgttggtcaggctggtcttgaactcctgacctcaggtgatccacctgcctcggcctccctaagtgctgggattacaggcgtgagccaccatgcccggccagaaggtattttaaatttataggtgaagctaaagttgtttgggttaccttatatgacctttttaaggttgggattggattcttttccaacagaacacttgattatcattagaaatagttcagcattgtccccagctcatgaaagggttgtgtcgagaagatgaggcacatgtttcccatgaaaatgatgcagaaacttcagcaggtagagggcaagtagttggttgaggcctgaaggatgacatacaaggtcagagacttgggttgtggaaagtataatggaggctacaagagttgatgaaaggagcagtgacggttttgtcttcctcttctcttttaatgtttgcttaggtgtaagaaacagggagggtgattaggtggagaggagtggatagcagaagcagaaaggcaggatttttccttcgcctttgttactgtctttttgacagcagattaagatctgtatcagaaagggaagaaatccctaacagcactgggaagggaaagggacttcttaaggttcgtaggaagccctcggtgttataagtctgcagaatatgtgtcagtaagggacagatattctctgtgctaaaagttggtcacatatgaagaacggccttaatacaaaaaagtggtggtgggtgcctgtaattccagctgcttgggaggctgaggcaggagaattgcttgaacctgggaggcagaggttgcagtgagctgagatcacgccattgcactccagcctaggcgacagaacaagactctgtctcagaaaaaaaaaaaaaagaaaagaaaaatggccttaagtgaattgccattgctgacttggctgggccattagtctgactccatatgagatttttgagttcttcagctctgcttcttggttctaaataccactgcccagctgcatacggtggttcacacctataatcccagcactttgagaggctgaggcaggtagattgcttgagaccaggagtttgagaccaggctgggcaacatagtgagacccccatctctacaaaaatataaaaataagccacacatggtagcccagctactcaggaagctgaggtgggaggatcctttgagcctaggaggtggaggctacagtgagctatgatcacaccactccactccagcctgggagacagagcgagaccctgtctcaaaaaaaaattaccactgccactgtgtcataatttagaaggattcatgttctctgcctccaagcagaaaagccggttacctactatcaagactgcatttaagggatatattaggaacttctaagccggaaaaccaatgtatttgaaatgacaatttatttctgcctgaacctacactgtctaggaatctgttcctggaatcctcagggtatacagatttcttctcaaatcagagctgtaaaaactacccattcaccatttgggaaacacctttcttccacttcttattggaagccctggtggtcatgttgatcctctgctatgtttttctcccaaagccaaataatcctctttacagacttggggtttcatggacttcctcatcacccttaggtgattgcatactcggaacatcgttaccgtatctttggggaaacc

SEQ ID NO: 13103 - DNA, 762 bp, Homo sapiens
ccagcttcctctgcgctccggaaagctgcggcccagcgcggactagtgaggacctccacagctcctgacattgccaggagtcctgtcggcgttttctcccagcctccgccatgccggcggtgctgggttttgaaggcagcgccaataagattggcgtgggcgtggtgcgggatggcaaggtgctggcgaacccgcggcggacttacgtcacgcctcctggcacaggattccttccaggtgatacagccaggcatcaccgagctgttatcctagacctgctgcaggaggcactaacagagtctggattaacctcccaggatatcgactgcattgcatacaccaagggccctggcatgggtgccccactggtttctgtggctgttgtggcccgtactgtggcccaactgtggaataagccattggtgggtgtgaaccactgtataggccacattgagatgggccgcctcatcactggagccaccagcccaaccgtgttgtatgtgagtggaggaaatacgcaggtgcctgtaatcctagcaactccggaggctgggcaggagaatcacttgaacccaggaggcggaagttgcggtgaaccgagatcgcaccattgcattccagcctgggcaacaagagcaaaactccgtctcaaacaaacaaacaaacaaaaaacaaaaaaaaacaactaaaggacactacctgatttattattttggggtgattgcatactcggaacatcgttaccgtatctttggggaaacc

SEQ ID NO: 13104 - DNA, 1147 bp, Homo sapiens
gtaagccagtggggctgcagagaacataaaatgtgggtgaatttttgggaagccatggaggtggagggaggaaatagtaaatgagcttcttatgcttcctgcatatctgatttcatcctcttccattccctccttccttatttttttcttctgctagatttctaacgacccaagtccaggatacaacattgaacagatggcaaagcggtaaggggacataaggtggaagcaggctggctgctggggcttcagggatttccccatatacggtatatattaacaaaatttgggacgggctttggagggtgagaagccagctgactgtaggcttagtgcctcgtacgcttattcccacatagaggcaagaagctagttgagctgccatacactgtaaaggggatggacgtctcattctcagggatcctgtctttcattgaggtgagtgtgagaggtgatgagacgggcactttcatgctttttaaatgaagcatatctgttttacttacgattatatttcgtatagctcagtatattcatgtagcacagtactggtccatatcatgtgctgggtaaattcatttagaaggtattcattgaatatctctgtgtgccacatgctgttctagatagtagagatgcagcatggagcaaaacaaaaatccctgtctacatggagcttagattctaaatggggggcgggggagataagaaagaggaaaataatgaagtgccagatgatgatgagtacaggtgaaaaattaagcaggataagtaaggggtgagagatgtcaggacaagtattcaaaaagtaatgattgcatcttaaatgaaagctgctcattctatgccatgatgccagtgaagggaatgtggtacaggatgtgctggtaacttgaattgtggtgaaacatgatgaccctccgaatgcattaatttttgctctcgtgtaatcccaaaaccatgatttgttgattcttttgtttttccctttaattgtaggatgtagcccatcggatgctggccacaggcgagtgtactcctgaggatctgtgtttctccctgcaggtaatgcagtaaaaaactgggacagaaagttggggctgaaggttttatattgtagagcagaactaatctgggatgcccctct

SEQ ID NO: 13105 - DNA, 586 bp, Homo sapiens
gtaagccagtggggctgcagagaacataaaatgtgggtgaatttttgggaagccatggaggtggagggaggaaatagtaaatgagcttcttatgcttcctgcatatctgatttcatcctcttccattccctccttccttatttttttcttctgctagatttctaacgacccaagtccaggatacaacattgaacagatggcaaagcggtaaggggacataaggtggaagcaggctggctgctggggcttcagggatttccccatatacggtatatattaacaaaatttgggacgggctttggagggtgagaagccagctgactgtaggcttagtgcctcgtacgcttattcccacatagaggcaagaagctagttgagctgccatacactgtaaaggggatggacgtctcattctcagggatcctgtctttcattgaggatgtagcccatcggatgctggccacaggcgagtgtactcctgaggatctgtgtttctccctgcaggtaatgcagtaaaaaactgggacagaaagttggggctgaaggttttatattgtagagcagaactaatctgggatgcccctct

SEQ ID NO: 13106 - DNA, 4818 bp, Homo sapiens
gattccttccaggtgatacagccaggcatcaccgagctgttatcctagacctgctgcaggaggcactaacagagtctggattaacctcccaggatatcgactgcattgcatacaccaagggtatggctgggagagtggtcaacgatggaggaatatacctgcaacctggctaggtcaaaatagccaacaccttacctctgccaccatcactacccctaccccacctcacatcccttatgtcccccactattgtttttttccaatctctaggattataacttccatttctatctccctaggccctggcatgggtgccccactggtttctgtggctgttgtggcccgtactgtggcccaactgtggaataagccattggtgggtgtgaaccactgtataggccacattgagatgggccgcctcatcactggagccaccagcccaaccgtgttgtatgtgagtggaggaaatacgcaggtatttagagggctctacccactccatctcaatttctgaggcactgaaccagtattttctttgttctatctgagtcatgggaatgtcaggaacaaagatggacttatctgaacctaaaatactgtagaccagaaaacccccaacagagtttgtaacattgcaaattttggcagcatgatcagaacattagatggcttatcattatcagactttatatctgattataaagattaggaatttctacttcaggaaaggaatgaatgggattgaaaaggattgaaatcttcaaaataatgaatatctgaaagctcttgcattattttgaagcttattttttctataaatcttagcaattgaaactaacagttgctgggtatggcaactcatgcctgtaattccagcactttgggaggtcgaggcgggtggatcatctgaggtcaggagtttgagcccagcctggccaacgtggcaaaaccccatctgtactaaaaataacaaaaattaatttgatgtggtggcaggtgcctgtaatcctagcaactccggaggctgggcaggagaatcacttgaacccaggaggcggaagttgcggtgaaccgagatcgcaccattgcattccagcctgggcaacaagagcaaaactccgtctcaaacaaacaaacaaacaaaaaacaaaaaaaaacaactaaaggacactacctgatttattattttggggcaagtacatgttttgtttttatattactgggaatgattatgtagactttgttattctaagagtttagaaatataaataactttaaaaaatactttgtaaattatagaaggtattttattttatcttatttatttatttatttatttgagatggagtttcgctcttattgtccaggttggagtgcaatgatgcaaccttggctcattgcaacctctgcctcccgggtccaaactattcttctctactcccgagtagctgggattacaggcacccgccaccatacctggctaattttttgtgtttttagtagagacgggatttcaccctgttggtcaggctggtcttgaactcctgacctcaggtgatccacctgcctcggcctccctaagtgctgggattacaggcgtgagccaccatgcccggccagaaggtattttaaatttataggtgaagctaaagttgtttgggttaccttatatgacctttttaaggttgggattggattcttttccaacagaacacttgattatcattagaaatagttcagcattgtccccagctcatgaaagggttgtgtcgagaagatgaggcacatgtttcccatgaaaatgatgcagaaacttcagcaggtagagggcaagtagttggttgaggcctgaaggatgacatacaaggtcagagacttgggttgtggaaagtataatggaggctacaagagttgatgaaaggagcagtgacggttttgtcttcctcttctcttttaatgtttgcttaggtgtaagaaacagggagggtgattaggtggagaggagtggatagcagaagcagaaaggcaggatttttccttcgcctttgttactgtctttttgacagcagattaagatctgtatcagaaagggaagaaatccctaacagcactgggaagggaaagggacttcttaaggttcgtaggaagccctcggtgttataagtctgcagaatatgtgtcagtaagggacagatattctctgtgctaaaagttggtcacatatgaagaacggccttaatacaaaaaagtggtggtgggtgcctgtaattccagctgcttgggaggctgaggcaggagaattgcttgaacctgggaggcagaggttgcagtgagctgagatcacgccattgcactccagcctaggcgacagaacaagactctgtctcagaaaaaaaaaaaaaagaaaagaaaaatggccttaagtgaattgccattgctgacttggctgggccattagtctgactccatatgagatttttgagttcttcagctctgcttcttggttctaaataccactgcccagctgcatacggtggttcacacctataatcccagcactttgagaggctgaggcaggtagattgcttgagaccaggagtttgagaccaggctgggcaacatagtgagacccccatctctacaaaaatataaaaataagccacacatggtagcccagctactcaggaagctgaggtgggaggatcctttgagcctaggaggtggaggctacagtgagctatgatcacaccactccactccagcctgggagacagagcgagaccctgtctcaaaaaaaaattaccactgccactgtgtcataatttagaaggattcatgttctctgcctccaagcagaaaagccggttacctactatcaagactgcatttaagggatatattaggaacttctaagccggaaaaccaatgtatttgaaatgacaatttatttctgcctgaacctacactgtctaggaatctgttcctggaatcctcagggtatacagatttcttctcaaatcagagctgtaaaaactacccattcaccatttgggaaacacctttcttccacttcttattggaagccctggtggtcatgttgatcctctgctatgtttttctcccaaagccaaataatcctctttacagacttggggtttcatggacttcctcatcacccttaggtgattgcatactcggaacatcgttaccgtatctttggggaaaccatcgatattgcagtgggtaattgtctggatcgttttgctcgagtgctgaaggtaagccagtggggctgcagagaacataaaatgtgggtgaatttttgggaagccatggaggtggagggaggaaatagtaaatgagcttcttatgcttcctgcatatctgatttcatcctcttccattccctccttccttatttttttcttctgctagatttctaacgacccaagtccaggatacaacattgaacagatggcaaagcggtaaggggacataaggtggaagcaggctggctgctggggcttcagggatttccccatatacggtatatattaacaaaatttgggacgggctttggagggtgagaagccagctgactgtaggcttagtgcctcgtacgcttattcccacatagaggcaagaagctagttgagctgccatacactgtaaaggggatggacgtctcattctcagggatcctgtctttcattgaggtgagtgtgagaggtgatgagacgggcactttcatgctttttaaatgaagcatatctgttttacttacgattatatttcgtatagctcagtatattcatgtagcacagtactggtccatatcatgtgctgggtaaattcatttagaaggtattcattgaatatctctgtgtgccacatgctgttctagatagtagagatgcagcatggagcaaaacaaaaatccctgtctacatggagcttagattctaaatggggggcgggggagataagaaagaggaaaataatgaagtgccagatgatgatgagtacaggtgaaaaattaagcaggataagtaaggggtgagagatgtcaggacaagtattcaaaaagtaatgattgcatcttaaatgaaagctgctcattctatgccatgatgccagtgaagggaatgtggtacaggatgtgctggtaacttgaattgtggtgaaacatgatgaccctccgaatgcattaatttttgctctcgtgtaatcccaaaaccatgatttgttgattcttttgtttttccctttaattgtaggatgtagcccatcggatgctggccacaggcgagtgtactcctgaggatctgtgtttctccctgcaggtaatgcagtaaaaaactgggacagaaagttggggctgaaggttttatattgtagagcagaactaatctgggatgcccctctaatattttctccttatctgtccctgacaggaaactgtgtttgcaatgctggtagagatcacagagcgagccatggcacattgtggctcccaggaggccctcattgtgggaggagtggggtgtatgtattattgaaaagtgttcctctttcctattcttaacactatgcgtcttcctcctggtactctaaatcattaagcgtttggagtaggcttcccaatccttgcccctaatcccctatgtcattgttctaagtgagtgcacatgacgtgttctgctggaccatgaagagatggctaaaactaagctaatcctgttccctgcctctttgtaggtaatgtgaggctacaggagatgatggcaacaatgtgccaggaacgtggagcccggcttt

SEQ ID NO: 13107 - DNA, 773 bp, Homo sapiens
gattccttccaggtgatacagccaggcatcaccgagctgttatcctagacctgctgcaggaggcactaacagagtctggattaacctcccaggatatcgactgcattgcatacaccaagggccctggcatgggtgccccactggtttctgtggctgttgtggcccgtactgtggcccaactgtggaataagccattggtgggtgtgaaccactgtataggccacattgagatgggccgcctcatcactggagccaccagcccaaccgtgttgtatgtgagtggaggaaatacgcagacttggggtttcatggacttcctcatcacccttaggtgattgcatactcggaacatcgttaccgtatctttggggaaaccatcgatattgcagtgggtaattgtctggatcgttttgctcgagtgctgaagatttctaacgacccaagtccaggatacaacattgaacagatggcaaagcgaggcaagaagctagttgagctgccatacactgtaaaggggatggacgtctcattctcagggatcctgtctttcattgaggatgtagcccatcggatgctggccacaggcgagtgtactcctgaggatctgtgtttctccctgcaggaaactgtgtttgcaatgctggtagagatcacagagcgagccatggcacattgtggctcccaggaggccctcattgtgggaggagtggggtgtaatgtgaggctacaggagatgatggcaacaatgtgccaggaacgtggagcccggcttt

SEQ ID NO: 13108 - DNA, 4469 bp, Homo sapiens
cggcctccctaagtgctgggattacaggcgtgagccaccatgcccggccagaaggtattttaaatttataggtgaagctaaagttgtttgggttaccttatatgacctttttaaggttgggattggattcttttccaacagaacacttgattatcattagaaatagttcagcattgtccccagctcatgaaagggttgtgtcgagaagatgaggcacatgtttcccatgaaaatgatgcagaaacttcagcaggtagagggcaagtagttggttgaggcctgaaggatgacatacaaggtcagagacttgggttgtggaaagtataatggaggctacaagagttgatgaaaggagcagtgacggttttgtcttcctcttctcttttaatgtttgcttaggtgtaagaaacagggagggtgattaggtggagaggagtggatagcagaagcagaaaggcaggatttttccttcgcctttgttactgtctttttgacagcagattaagatctgtatcagaaagggaagaaatccctaacagcactgggaagggaaagggacttcttaaggttcgtaggaagccctcggtgttataagtctgcagaatatgtgtcagtaagggacagatattctctgtgctaaaagttggtcacatatgaagaacggccttaatacaaaaaagtggtggtgggtgcctgtaattccagctgcttgggaggctgaggcaggagaattgcttgaacctgggaggcagaggttgcagtgagctgagatcacgccattgcactccagcctaggcgacagaacaagactctgtctcagaaaaaaaaaaaaaagaaaagaaaaatggccttaagtgaattgccattgctgacttggctgggccattagtctgactccatatgagatttttgagttcttcagctctgcttcttggttctaaataccactgcccagctgcatacggtggttcacacctataatcccagcactttgagaggctgaggcaggtagattgcttgagaccaggagtttgagaccaggctgggcaacatagtgagacccccatctctacaaaaatataaaaataagccacacatggtagcccagctactcaggaagctgaggtgggaggatcctttgagcctaggaggtggaggctacagtgagctatgatcacaccactccactccagcctgggagacagagcgagaccctgtctcaaaaaaaaattaccactgccactgtgtcataatttagaaggattcatgttctctgcctccaagcagaaaagccggttacctactatcaagactgcatttaagggatatattaggaacttctaagccggaaaaccaatgtatttgaaatgacaatttatttctgcctgaacctacactgtctaggaatctgttcctggaatcctcagggtatacagatttcttctcaaatcagagctgtaaaaactacccattcaccatttgggaaacacctttcttccacttcttattggaagccctggtggtcatgttgatcctctgctatgtttttctcccaaagccaaataatcctctttacagacttggggtttcatggacttcctcatcacccttaggtgattgcatactcggaacatcgttaccgtatctttggggaaaccatcgatattgcagtgggtaattgtctggatcgttttgctcgagtgctgaaggtaagccagtggggctgcagagaacataaaatgtgggtgaatttttgggaagccatggaggtggagggaggaaatagtaaatgagcttcttatgcttcctgcatatctgatttcatcctcttccattccctccttccttatttttttcttctgctagatttctaacgacccaagtccaggatacaacattgaacagatggcaaagcggtaaggggacataaggtggaagcaggctggctgctggggcttcagggatttccccatatacggtatatattaacaaaatttgggacgggctttggagggtgagaagccagctgactgtaggcttagtgcctcgtacgcttattcccacatagaggcaagaagctagttgagctgccatacactgtaaaggggatggacgtctcattctcagggatcctgtctttcattgaggtgagtgtgagaggtgatgagacgggcactttcatgctttttaaatgaagcatatctgttttacttacgattatatttcgtatagctcagtatattcatgtagcacagtactggtccatatcatgtgctgggtaaattcatttagaaggtattcattgaatatctctgtgtgccacatgctgttctagatagtagagatgcagcatggagcaaaacaaaaatccctgtctacatggagcttagattctaaatggggggcgggggagataagaaagaggaaaataatgaagtgccagatgatgatgagtacaggtgaaaaattaagcaggataagtaaggggtgagagatgtcaggacaagtattcaaaaagtaatgattgcatcttaaatgaaagctgctcattctatgccatgatgccagtgaagggaatgtggtacaggatgtgctggtaacttgaattgtggtgaaacatgatgaccctccgaatgcattaatttttgctctcgtgtaatcccaaaaccatgatttgttgattcttttgtttttccctttaattgtaggatgtagcccatcggatgctggccacaggcgagtgtactcctgaggatctgtgtttctccctgcaggtaatgcagtaaaaaactgggacagaaagttggggctgaaggttttatattgtagagcagaactaatctgggatgcccctctaatattttctccttatctgtccctgacaggaaactgtgtttgcaatgctggtagagatcacagagcgagccatggcacattgtggctcccaggaggccctcattgtgggaggagtggggtgtatgtattattgaaaagtgttcctctttcctattcttaacactatgcgtcttcctcctggtactctaaatcattaagcgtttggagtaggcttcccaatccttgcccctaatcccctatgtcattgttctaagtgagtgcacatgacgtgttctgctggaccatgaagagatggctaaaactaagctaatcctgttccctgcctctttgtaggtaatgtgaggctacaggagatgatggcaacaatgtgccaggaacgtggagcccggctttttgctacagatgagaggtaaagacactttccctttggtttcttttttacttctcctgttatagtgattttccacccttagatcccaattttcatctctcttgcatcccagattctgtattgacaatggagcgatgatagcccaggctggctgggagatgtttcgggctggacacaggaccccactcagtgattctggggttacacagaggtgagtgattcacctcttggtgagggtagattattgggacatagacaaaaacagcagggaagagtccaggaacatgagggcagagaagaatgaaggatgttaagggctcgctctccaccatgtttcttctgtttttccacaggtatcggacagatgaagtagaggtgacctggagggactaataagatcaacagaatcagagtagatagttccttaatcggaacccaaaggaccccgtgcctcaatctctatcctgatgtcatgggagtcctagcaaagctatagactccaagcaaggcttggggtcctttatggaaccccaggatgactcagcaataaaatatttttggttttttggttttgtatgttggtgattggattgtgttgttcaggaccaatgtagatttggtgctggataaattcttgttggagcttgctgctgtggaaccaagaatgaggtatctttttttttttttttaagaaacggaatcttgctgtgtttcccaggctggtctcgaactgggctcaagcagtcttaccacctcagcctcctgagtaaggatgccattgtgcctggcaacaatagtagtatcataactattattatagcatcgggtcccgtgctaactgctttacattcattctctcatttaaattctttgaagtaggtgtgcaagacttctctcaaaatagcctggaggctcacacctgttatcccagtgctgtgggaggccaagtcaggaggatcccttgagcccaggagtttgagcccagcctgggcaaatagcaagacaccatctatttgaaaaatgtaaaaattatctgggcatggtggcgcacatctgtagtcccagctccaagggaggctgaggcgggaagatagcttgagcccaggagtttgaggttgcagtgagctgtgattgagccactgcattccagcctgagtgacagaacaaaaccttgtctcttaaaaacaaacaaacaaacagcctggagattggtctaacttgt

SEQ ID NO: 13109 - DNA, 3258 bp, Homo sapiens
cggcctccctaagtgctgggattacaggcgtgagccaccatgcccggccagaaggtattttaaatttataggtgaagctaaagttgtttgggttaccttatatgacctttttaaggttgggattggattcttttccaacagaacacttgattatcattagaaatagttcagcattgtccccagctcatgaaagggttgtgtcgagaagatgaggcacatgtttcccatgaaaatgatgcagaaacttcagcaggtagagggcaagtagttggttgaggcctgaaggatgacatacaaggtcagagacttgggttgtggaaagtataatggaggctacaagagttgatgaaaggagcagtgacggttttgtcttcctcttctcttttaatgtttgcttaggtgtaagaaacagggagggtgattaggtggagaggagtggatagcagaagcagaaaggcaggatttttccttcgcctttgttactgtctttttgacagcagattaagatctgtatcagaaagggaagaaatccctaacagcactgggaagggaaagggacttcttaaggttcgtaggaagccctcggtgttataagtctgcagaatatgtgtcagtaagggacagatattctctgtgctaaaagttggtcacatatgaagaacggccttaatacaaaaaagtggtggtgggtgcctgtaattccagctgcttgggaggctgaggcaggagaattgcttgaacctgggaggcagaggttgcagtgagctgagatcacgccattgcactccagcctaggcgacagaacaagactctgtctcagaaaaaaaaaaaaaagaaaagaaaaatggccttaagtgaattgccattgctgacttggctgggccattagtctgactccatatgagatttttgagttcttcagctctgcttcttggttctaaataccactgcccagctgcatacggtggttcacacctataatcccagcactttgagaggctgaggcaggtagattgcttgagaccaggagtttgagaccaggctgggcaacatagtgagacccccatctctacaaaaatataaaaataagccacacatggtagcccagctactcaggaagctgaggtgggaggatcctttgagcctaggaggtggaggctacagtgagctatgatcacaccactccactccagcctgggagacagagcgagaccctgtctcaaaaaaaaattaccactgccactgtgtcataatttagaaggattcatgttctctgcctccaagcagaaaagccggttacctactatcaagactgcatttaagggatatattaggaacttctaagccggaaaaccaatgtatttgaaatgacaatttatttctgcctgaacctacactgtctaggaatctgttcctggaatcctcagggtatacagatttcttctcaaatcagagctgtaaaaactacccattcaccatttgggaaacacctttcttccacttcttattggaagccctggtggtcatgttgatcctctgctatgtttttctcccaaagccaaataatcctctttacagacttggggtttcatggacttcctcatcacccttaggtgattgcatactcggaacatcgttaccgtatctttggggaaaccatcgatattgcagtgggtaattgtctggatcgttttgctcgagtgctgaaggtaagccagtggggctgcagagaacataaaatgtgggtgaatttttgggaagccatggaggtggagggaggaaatagtaaatgagcttcttatgcttcctgcatatctgatttcatcctcttccattccctccttccttatttttttcttctgctagatttctaacgacccaagtccaggatacaacattgaacagatggcaaagcggtaaggggacataaggtggaagcaggctggctgctggggcttcagggatttccccatatacgaggcaagaagctagttgagctgccatacactgtaaaggggatggacgtctcattctcagggatcctgtctttcattgaggatgtagcccatcggatgctggccacaggcgagtgtactcctgaggatctgtgtttctccctgcaggaaactgtgtttgcaatgctggtagagatcacagagcgagccatggcacattgtggctcccaggaggccctcattgtgggaggagtggggtgtaatgtgaggctacaggagatgatggcaacaatgtgccaggaacgtggagcccggctttttgctacagatgagagattctgtattgacaatggagcgatgatagcccaggctggctgggagatgtttcgggctggacacaggaccccactcagtgattctggggttacacagaggtatcggacagatgaagtagaggtgacctggagggactaataagatcaacagaatcagagtagatagttccttaatcggaacccaaaggaccccgtgcctcaatctctatcctgatgtcatgggagtcctagcaaagctatagactccaagcaaggcttggggtcctttatggaaccccaggatgactcagcaataaaatatttttggttttttggttttgtatgttggtgattggattgtgttgttcaggaccaatgtagatttggtgctggataaattcttgttggagcttgctgctgtggaaccaagaatgaggtatctttttttttttttttaagaaacggaatcttgctgtgtttcccaggctggtctcgaactgggctcaagcagtcttaccacctcagcctcctgagtaaggatgccattgtgcctggcaacaatagtagtatcataactattattatagcatcgggtcccgtgctaactgctttacattcattctctcatttaaattctttgaagtaggtgtgcaagacttctctcaaaatagcctggaggctcacacctgttatcccagtgctgtgggaggccaagtcaggaggatcccttgagcccaggagtttgagcccagcctgggcaaatagcaagacaccatctatttgaaaaatgtaaaaattatctgggcatggtggcgcacatctgtagtcccagctccaagggaggctgaggcgggaagatagcttgagcccaggagtttgaggttgcagtgagctgtgattgagccactgcattccagcctgagtgacagaacaaaaccttgtctcttaaaaacaaacaaacaaacagcctggagattggtctaacttgt

SEQ ID NO: 13110 - DNA, 1596 bp, Homo sapiens
cccttaggtgattgcatactcggaacatcgttaccgtatctttggggaaaccatcgatattgcagtgggtaattgtctggatcgttttgctcgagtgctgaaggtaagccagtggggctgcagagaacataaaatgtgggtgaatttttgggaagccatggaggtggagggaggaaatagtaaatgagcttcttatgcttcctgcatatctgatttcatcctcttccattccctccttccttatttttttcttctgctagatttctaacgacccaagtccaggatacaacattgaacagatggcaaagcggtaaggggacataaggtggaagcaggctggctgctggggcttcagggatttccccatatacggtatatattaacaaaatttgggacgggctttggagggtgagaagccagctgactgtaggcttagtgcctcgtacgcttattcccacatagaggcaagaagctagttgagctgccatacactgtaaaggggatggacgtctcattctcagggatcctgtctttcattgaggtgagtgtgagaggtgatgagacgggcactttcatgctttttaaatgaagcatatctgttttacttacgattatatttcgtatagctcagtatattcatgtagcacagtactggtccatatcatgtgctgggtaaattcatttagaaggtattcattgaatatctctgtgtgccacatgctgttctagatagtagagatgcagcatggagcaaaacaaaaatccctgtctacatggagcttagattctaaatggggggcgggggagataagaaagaggaaaataatgaagtgccagatgatgatgagtacaggtgaaaaattaagcaggataagtaaggggtgagagatgtcaggacaagtattcaaaaagtaatgattgcatcttaaatgaaagctgctcattctatgccatgatgccagtgaagggaatgtggtacaggatgtgctggtaacttgaattgtggtgaaacatgatgaccctccgaatgcattaatttttgctctcgtgtaatcccaaaaccatgatttgttgattcttttgtttttccctttaattgtaggatgtagcccatcggatgctggccacaggcgagtgtactcctgaggatctgtgtttctccctgcaggtaatgcagtaaaaaactgggacagaaagttggggctgaaggttttatattgtagagcagaactaatctgggatgcccctctaatattttctccttatctgtccctgacaggaaactgtgtttgcaatgctggtagagatcacagagcgagccatggcacattgtggctcccaggaggccctcattgtgggaggagtggggtgtatgtattattgaaaagtgttcctctttcctattcttaacactatgcgtcttcctcctggtactctaaatcattaagcgtttggagtaggcttcccaatccttgcccctaatcccctatgtcattgttctaagtgagtgcacatgacgtgttctgctggaccatgaagagatggctaaaactaagctaatcctgttccctgcctctttgtaggtaatgtgaggct

SEQ ID NO: 13111 - DNA, 464 bp, Homo sapiens
cccttaggtgattgcatactcggaacatcgttaccgtatctttggggaaaccatcgatattgcagtgggtaattgtctggatcgttttgctcgagtgctgaagatttctaacgacccaagtccaggatacaacattgaacagatggcaaagcggtaaggggacataaggtggaagcaggctggctgctggggcttcagggatttccccatatacgaggcaagaagctagttgagctgccatacactgtaaaggggatggacgtctcattctcagggatcctgtctttcattgaggatgtagcccatcggatgctggccacaggcgagtgtactcctgaggatctgtgtttctccctgcaggaaactgtgtttgcaatgctggtagagatcacagagcgagccatggcacattgtggctcccaggaggccctcattgtgggaggagtggggtgtaatgtgaggct

SEQ ID NO: 13112 - DNA, 2495 bp, Homo sapiens
gggatatattaggaacttctaagccggaaaaccaatgtatttgaaatgacaatttatttctgcctgaacctacactgtctaggaatctgttcctggaatcctcagggtatacagatttcttctcaaatcagagctgtaaaaactacccattcaccatttgggaaacacctttcttccacttcttattggaagccctggtggtcatgttgatcctctgctatgtttttctcccaaagccaaataatcctctttacagacttggggtttcatggacttcctcatcacccttaggtgattgcatactcggaacatcgttaccgtatctttggggaaaccatcgatattgcagtgggtaattgtctggatcgttttgctcgagtgctgaaggtaagccagtggggctgcagagaacataaaatgtgggtgaatttttgggaagccatggaggtggagggaggaaatagtaaatgagcttcttatgcttcctgcatatctgatttcatcctcttccattccctccttccttatttttttcttctgctagatttctaacgacccaagtccaggatacaacattgaacagatggcaaagcggtaaggggacataaggtggaagcaggctggctgctggggcttcagggatttccccatatacggtatatattaacaaaatttgggacgggctttggagggtgagaagccagctgactgtaggcttagtgcctcgtacgcttattcccacatagaggcaagaagctagttgagctgccatacactgtaaaggggatggacgtctcattctcagggatcctgtctttcattgaggtgagtgtgagaggtgatgagacgggcactttcatgctttttaaatgaagcatatctgttttacttacgattatatttcgtatagctcagtatattcatgtagcacagtactggtccatatcatgtgctgggtaaattcatttagaaggtattcattgaatatctctgtgtgccacatgctgttctagatagtagagatgcagcatggagcaaaacaaaaatccctgtctacatggagcttagattctaaatggggggcgggggagataagaaagaggaaaataatgaagtgccagatgatgatgagtacaggtgaaaaattaagcaggataagtaaggggtgagagatgtcaggacaagtattcaaaaagtaatgattgcatcttaaatgaaagctgctcattctatgccatgatgccagtgaagggaatgtggtacaggatgtgctggtaacttgaattgtggtgaaacatgatgaccctccgaatgcattaatttttgctctcgtgtaatcccaaaaccatgatttgttgattcttttgtttttccctttaattgtaggatgtagcccatcggatgctggccacaggcgagtgtactcctgaggatctgtgtttctccctgcaggtaatgcagtaaaaaactgggacagaaagttggggctgaaggttttatattgtagagcagaactaatctgggatgcccctctaatattttctccttatctgtccctgacaggaaactgtgtttgcaatgctggtagagatcacagagcgagccatggcacattgtggctcccaggaggccctcattgtgggaggagtggggtgtatgtattattgaaaagtgttcctctttcctattcttaacactatgcgtcttcctcctggtactctaaatcattaagcgtttggagtaggcttcccaatccttgcccctaatcccctatgtcattgttctaagtgagtgcacatgacgtgttctgctggaccatgaagagatggctaaaactaagctaatcctgttccctgcctctttgtaggtaatgtgaggctacaggagatgatggcaacaatgtgccaggaacgtggagcccggctttttgctacagatgagaggtaaagacactttccctttggtttcttttttacttctcctgttatagtgattttccacccttagatcccaattttcatctctcttgcatcccagattctgtattgacaatggagcgatgatagcccaggctggctgggagatgtttcgggctggacacaggaccccactcagtgattctggggttacacagaggtgagtgattcacctcttggtgagggtagattattgggacatagacaaaaacagcagggaagagtccaggaacatgagggcagagaagaatgaaggatgttaagggctcgctctccaccatgtttcttctgtttttccacaggtatcggacagatgaagtagaggtgacctggagggactaataagatcaacagaatcagagtagatagttccttaatcggaacccaaaggaccccgtgcctcaatctctatcctgatgtcatgggagtcctagcaaagctatagactccaagcaaggcttggggtcctttatggaaccccaggatgactcagcaataaaatatttttggttttttggt

SEQ ID NO: 13113 - DNA, 1546 bp, Homo sapiens
gggatatattaggaacttctaagccggaaaaccaatgtatttgaaatgacaatttatttctgcctgaacctacactgtctaggaatctgttcctggaatcctcagggtatacagatttcttctcaaatcagagctgtaaaaactacccattcaccatttgggaaacacctttcttccacttcttattggaagccctggtggtcatgttgatcctctgctatgtttttctcccaaagccaaataatcctctttacagacttggggtttcatggacttcctcatcacccttaggtgattgcatactcggaacatcgttaccgtatctttggggaaaccatcgatattgcagtgggtaattgtctggatcgttttgctcgagtgctgaaggtaagccagtggggctgcagagaacataaaatgtgggtgaatttttgggaagccatggaggtggagggaggaaatagtaaatgagcttcttatgcttcctgcatatctgatttcatcctcttccattccctccttccttatttttttcttctgctagatttctaacgacccaagtccaggatacaacattgaacagatggcaaagcgaggcaagaagctagttgagctgccatacactgtaaaggggatggacgtctcattctcagggatcctgtctttcattgaggatgtagcccatcggatgctggccacaggcgagtgtactcctgaggatctgtgtttctccctgcaggtaatgcagtaaaaaactgggacagaaagttggggctgaaggttttatattgtagagcagaactaatctgggatgcccctctaatattttctccttatctgtccctgacaggaaactgtgtttgcaatgctggtagagatcacagagcgagccatggcacattgtggctcccaggaggccctcattgtgggaggagtggggtgtatgtattattgaaaagtgttcctctttcctattcttaacactatgcgtcttcctcctggtactctaaatcattaagcgtttggagtaggcttcccaatccttgcccctaatcccctatgtcattgttctaagtgagtgcacatgacgtgttctgctggaccatgaagagatggctaaaactaagctaatcctgttccctgcctctttgtaggtaatgtgaggctacaggagatgatggcaacaatgtgccaggaacgtggagcccggctttttgctacagatgagagattctgtattgacaatggagcgatgatagcccaggctggctgggagatgtttcgggctggacacaggaccccactcagtgattctggggttacacagaggtatcggacagatgaagtagaggtgacctggagggactaataagatcaacagaatcagagtagatagttccttaatcggaacccaaaggaccccgtgcctcaatctctatcctgatgtcatgggagtcctagcaaagctatagactccaagcaaggcttggggtcctttatggaaccccaggatgactcagcaataaaatatttttggttttttggt

SEQ ID NO: 13114 - DNA, 3076 bp, Homo sapiens
gggctgtttatcgttgtgccagatgcacagcacattgtgtgacactgacttaagattctaactatgtgcaagagggaaaaaaacagtggagaaggctgggctggaccacgggaaagagataggaaaacggatacgaatgtaaggcacagagttggctcggcgtccctggcagttaggaagacaggtccctggaggggccttggcgggtctccgctcgcgggagttccgcggtgtctttcccagtgctatctgcaggctggccagcttcctctgcgctccggaaagctgcggcccagcgcggactagtgaggacctccacagctcctgacattgccaggagtcctgtcggcgttttctcccagcctccgccatgccggcggtgctgggttttgaaggcagcgccaataagattggcgtgggcgtggtgcgggatggcaaggtgctggcgaacccgcggcggacttacgtcacgcctcctggcacaggttggtgagtaggggacttaagagttttccgcgcacttccccgcacagaatcagccttccatcttcctaaatactagtgaggtgcagctttcgatccgagtctcattgaaattatgtgacattattaacgtcacaaggctgatgactagaagagttacaggcacttggacgtggatctgatgagttcatttaccttttactgagcgcattttatgtgctaagtattcagaaatagatgttatactgctgtggagtcagacatataaatagatgtttatactacagcatgataaacagtataatagagatggactcgaaatattctgtttaaaaaacgcttagcaggagtatagattccagttgccctgaatatacactccctttttaaaaaaaaattattttttgaaatattctaggatgagtagagagatgagagtggaaagactcccggcttacatgtcagacagaactggctggctttgctatattcatattaaatatttttgttttggacatttggtctttattttttattttattttatttttttgagacagagtcttgctctgtcgcccaggctggaatgcagtggcacgatctcggctcactgcaatctctgccttccaggttcaagcgattcttctaccccagcctcccaagtagctaggactataggtgtgcgccaccacatccagctaaattttgtatttttagtagagtcggggtttccaccaggccaagctggtctcgaactcctgacctcagatgatccgcccaccccagcctcccaaagtgtggaaattacaggcatgagccaccgctcgggcctggtctttgtttttaaaatgggaataatacctgtatcattaggtcttgaagattagatgaaagtaccaaacacggctgggcgtggtggctcacgcctgtaatcccagcactttgggaggccaaggcaggcagatcacctgaggtcggggttcgagaccagcctgaccaacatggagaaaccatgtttccactaaaaaatacaaaaaattaactgggcgtggtggcgcatgcctgtaaacccagctacttgggaggctgaggcaggagaattgcgtgaacccgggagacagaggttgcagtgagccgagatggtgccattgcactccagcctgggcatcaagagtgaaactctgtctcaaaaaaaaaaaaagtacaaaacacattacaacttttaattgatattttaaataagctattatatcttgctactctcccctcaaacacttgcatacataggagagggcagctgacttgcatgtatctgaaaagcctccctgaacaggtgatgttgtgacagatactcactagaaatatatatgtatgtttagcattcactcctctgggcacttgggcactgggaatacaaagataaataaaatactcaatgctttgagatattcatgattaagctgagcaaaccacagaaaattataatgctgtaattgttatgttaaataaatgacatcatcatgcatagagttctgtagggtcacagagaaagaagatcaccaaaggccaggcacggtggctcaggcctgtaatcccagcactttgggaggccgaggcagacggatcacgaggtcaggagttcgagaccagcctggccaatatggtgaaaccccgtctctactaaaaatacaaaagttagctgagcgtggtggtgtcgcctgtagtcccagctactcaggaggctgaggcagaagaatctcttgaactcaggaggtggaggttgcagtgagccgagatcgtgccactgcactccagcctgggtgacagagctgagactgtctcaaaagaaaaaaaaaaaaaaaagatcacgaaagggtatgaggtagatactacttgcattgagacctgaaggctgagtagggtaagaagaagagcatttctgaaagttgaatagcctatatagaagccggaaagagtagatgtgaaaatgtggaagataggatgcttggggaaagtgaaaggactcttactacatcactaaaactcctgttgctttctttaacttcctacctacctttgctacagaaaatccctgtgatctctgacctatgttcattttctaggattccttccaggtgatacagccaggcatcaccgagctgttatcctagacctgctgcaggaggcactaacagagtctggattaacctcccaggatatcgactgcattgcatacaccaagggtatggctgggagagtggtcaacgatggaggaatatacctgcaacctggctaggtcaaaatagccaacaccttacctctgccaccatcactacccctaccccacctcacatcccttatgtcccccactattgtttttttccaatctctaggattataacttccatttctatctccctaggccctggcatgggtgccccactggtttctgtggctgttgtggcccgtactgtggcccaactgtggaataagccattggtgggtgtgaaccactgtataggccacattgagatgggccgcctcatcactggagccaccagcccaaccgtgttgtatgtgagtggaggaaatac

SEQ ID NO: 13115 - DNA, 830 bp, Homo sapiens
gggctgtttatcgttgtgccagatgcacagcacattgtgtgacactgacttaagattctaactatgtgcaagagggaaaaaaacagtggagaaggctgggctggaccacgggaaagagataggaaaacggatacgaatgtaaggcacagagttggctcggcgtccctggcagttaggaagacaggtccctggaggggccttggcgggtctccgctcgcgggagttccgcggtgtctttcccagtgctatctgcaggctggccagcttcctctgcgctccggaaagctgcggcccagcgcggactagtgaggacctccacagctcctgacattgccaggagtcctgtcggcgttttctcccagcctccgccatgccggcggtgctgggttttgaaggcagcgccaataagattggcgtgggcgtggtgcgggatggcaaggtgctggcgaacccgcggcggacttacgtcacgcctcctggcacaggattccttccaggtgatacagccaggcatcaccgagctgttatcctagacctgctgcaggaggcactaacagagtctggattaacctcccaggatatcgactgcattgcatacaccaagggtatggctgggagagtggtcaacgatggaggaatatacctgcaacctggctaggccctggcatgggtgccccactggtttctgtggctgttgtggcccgtactgtggcccaactgtggaataagccattggtgggtgtgaaccactgtataggccacattgagatgggccgcctcatcactggagccaccagcccaaccgtgttgtatgtgagtggaggaaatac

SEQ ID NO: 13116 - DNA, 3131 bp, Homo sapiens
aattctctaggacacttaggtccccaaccctccctcgggctgtttatcgttgtgccagatgcacagcacattgtgtgacactgacttaagattctaactatgtgcaagagggaaaaaaacagtggagaaggctgggctggaccacgggaaagagataggaaaacggatacgaatgtaaggcacagagttggctcggcgtccctggcagttaggaagacaggtccctggaggggccttggcgggtctccgctcgcgggagttccgcggtgtctttcccagtgctatctgcaggctggccagcttcctctgcgctccggaaagctgcggcccagcgcggactagtgaggacctccacagctcctgacattgccaggagtcctgtcggcgttttctcccagcctccgccatgccggcggtgctgggttttgaaggcagcgccaataagattggcgtgggcgtggtgcgggatggcaaggtgctggcgaacccgcggcggacttacgtcacgcctcctggcacaggttggtgagtaggggacttaagagttttccgcgcacttccccgcacagaatcagccttccatcttcctaaatactagtgaggtgcagctttcgatccgagtctcattgaaattatgtgacattattaacgtcacaaggctgatgactagaagagttacaggcacttggacgtggatctgatgagttcatttaccttttactgagcgcattttatgtgctaagtattcagaaatagatgttatactgctgtggagtcagacatataaatagatgtttatactacagcatgataaacagtataatagagatggactcgaaatattctgtttaaaaaacgcttagcaggagtatagattccagttgccctgaatatacactccctttttaaaaaaaaattattttttgaaatattctaggatgagtagagagatgagagtggaaagactcccggcttacatgtcagacagaactggctggctttgctatattcatattaaatatttttgttttggacatttggtctttattttttattttattttatttttttgagacagagtcttgctctgtcgcccaggctggaatgcagtggcacgatctcggctcactgcaatctctgccttccaggttcaagcgattcttctaccccagcctcccaagtagctaggactataggtgtgcgccaccacatccagctaaattttgtatttttagtagagtcggggtttccaccaggccaagctggtctcgaactcctgacctcagatgatccgcccaccccagcctcccaaagtgtggaaattacaggcatgagccaccgctcgggcctggtctttgtttttaaaatgggaataatacctgtatcattaggtcttgaagattagatgaaagtaccaaacacggctgggcgtggtggctcacgcctgtaatcccagcactttgggaggccaaggcaggcagatcacctgaggtcggggttcgagaccagcctgaccaacatggagaaaccatgtttccactaaaaaatacaaaaaattaactgggcgtggtggcgcatgcctgtaaacccagctacttgggaggctgaggcaggagaattgcgtgaacccgggagacagaggttgcagtgagccgagatggtgccattgcactccagcctgggcatcaagagtgaaactctgtctcaaaaaaaaaaaaagtacaaaacacattacaacttttaattgatattttaaataagctattatatcttgctactctcccctcaaacacttgcatacataggagagggcagctgacttgcatgtatctgaaaagcctccctgaacaggtgatgttgtgacagatactcactagaaatatatatgtatgtttagcattcactcctctgggcacttgggcactgggaatacaaagataaataaaatactcaatgctttgagatattcatgattaagctgagcaaaccacagaaaattataatgctgtaattgttatgttaaataaatgacatcatcatgcatagagttctgtagggtcacagagaaagaagatcaccaaaggccaggcacggtggctcaggcctgtaatcccagcactttgggaggccgaggcagacggatcacgaggtcaggagttcgagaccagcctggccaatatggtgaaaccccgtctctactaaaaatacaaaagttagctgagcgtggtggtgtcgcctgtagtcccagctactcaggaggctgaggcagaagaatctcttgaactcaggaggtggaggttgcagtgagccgagatcgtgccactgcactccagcctgggtgacagagctgagactgtctcaaaagaaaaaaaaaaaaaaaagatcacgaaagggtatgaggtagatactacttgcattgagacctgaaggctgagtagggtaagaagaagagcatttctgaaagttgaatagcctatatagaagccggaaagagtagatgtgaaaatgtggaagataggatgcttggggaaagtgaaaggactcttactacatcactaaaactcctgttgctttctttaacttcctacctacctttgctacagaaaatccctgtgatctctgacctatgttcattttctaggattccttccaggtgatacagccaggcatcaccgagctgttatcctagacctgctgcaggaggcactaacagagtctggattaacctcccaggatatcgactgcattgcatacaccaagggtatggctgggagagtggtcaacgatggaggaatatacctgcaacctggctaggtcaaaatagccaacaccttacctctgccaccatcactacccctaccccacctcacatcccttatgtcccccactattgtttttttccaatctctaggattataacttccatttctatctccctaggccctggcatgggtgccccactggtttctgtggctgttgtggcccgtactgtggcccaactgtggaataagccattggtgggtgtgaaccactgtataggccacattgagatgggccgcctcatcactggagccaccagcccaaccgtgttgtatgtgagtggaggaaatacgcaggtatttagagggctc

SEQ ID NO: 13117 - DNA, 1011 bp, Homo sapiens
aattctctaggacacttaggtccccaaccctccctcgggctgtttatcgttgtgccagatgcacagcacattgtgtgacactgacttaagattctaactatgtgcaagagggaaaaaaacagtggagaaggctgggctggaccacgggaaagagataggaaaacggatacgaatgtaaggcacagagttggctcggcgtccctggcagttaggaagacaggtccctggaggggccttggcgggtctccgctcgcgggagttccgcggtgtctttcccagtgctatctgcaggctggccagcttcctctgcgctccggaaagctgcggcccagcgcggactagtgaggacctccacagctcctgacattgccaggagtcctgtcggcgttttctcccagcctccgccatgccggcggtgctgggttttgaaggcagcgccaataagattggcgtgggcgtggtgcgggatggcaaggtgctggcgaacccgcggcggacttacgtcacgcctcctggcacaggattccttccaggtgatacagccaggcatcaccgagctgttatcctagacctgctgcaggaggcactaacagagtctggattaacctcccaggatatcgactgcattgcatacaccaagggtatggctgggagagtggtcaacgatggaggaatatacctgcaacctggctaggtcaaaatagccaacaccttacctctgccaccatcactacccctaccccacctcacatcccttatgtcccccactattgtttttttccaatctctaggattataacttccatttctatctccctaggccctggcatgggtgccccactggtttctgtggctgttgtggcccgtactgtggcccaactgtggaataagccattggtgggtgtgaaccactgtataggccacattgagatgggccgcctcatcactggagccaccagcccaaccgtgttgtatgtgagtggaggaaatacgcaggtatttagagggctc

SEQ ID NO: 13118 - DNA, 15936 bp, Homo sapiens
gggcttcgcagcctgaggaaaaaaagagaaaaagataaaaaaaatctgaaaacgcttcaaaatcctgaaaaaaaaaaaggaaaagaaaaaacgaatcctcggagaacccgcggggaagtcactttcgtacgcttccggcctgccccgcgcccgccgccgcagcgcttggcgtccgtcggtctccgtccgtcggtccgggggtgagccgcccgcccggcccgccgtgccctccccccgctcgggccccgagccccgcgccccgcgcctgccccggcgcaccacgtgtccgtgctgcccttcgccgcccgcccggggctcgccgagtcggcgcccacaaagatttggtttccctctgccccggcggttgtaatcttaaaccgccggagcccgaggcctatatttatagagaaacgcgtgtccccgaggccgccgtgggcagcgtccggtcgcctcttaaaggatttttacccttcggaaggggattccccgtttaatttttttcctactttgattttttgaaatttggagcttcgcaccaggaccgcggagaagtgcaaagtcgcggggagggccgtattgtgcggagagccttttgtctgcggtgctgcggccgtgggagccggcccccgcctcccgtttccgtcccgtctccaagcccgccgactccagctcgtcctcgccgcgccggtgccacctgtgagccgcggcgcgggcccgggctccgaaggcgcccctttgtcctgcggcgggcccgataagaagtcctcctggcggggctcggggtggtggggggcggggagatgaacgctgcggccagcagctaccccatggcctccctgtacgtgggcgacctgcattcggacgtcaccgaggccatgctgtacgaaaagttcagccccgcggggcctgtgctgtccatccgggtctgccgcgatatgatcacccgccgctccctgggctatgcctacgtcaacttccagcagccggccgacggtgagtagaagctgtgcccacacgtgcgtgggagcccggaggaccccgggagtcgtcttctggcagggccctcctgccgaggagggcggcatcacgacagcatgttgccaccgaagctgggagcagggtgcggagattgagaacgcggacctggcatcagatgactcgagtttcaatcttgtttctaccacttgctaactgggtgaccttgggctacttattagtgttgctggtagtggggttggaaaccaaggagactgtaaaacaggattagagtgaagccactggcattccactgcgtgtggtccttgtcagtggggctgggctgttagagatccttgcttgtgcccctcacaggctggccaaaaaggcgggacgtttgaaacacaattccccgcgaaagttttacattgtaaagctcctgcccgctccgccacctttactaaccttgactacctgatgttgtgctgataaaggatcagtcagggcaggcaggaagcagggggaaggtttctgtgcgttaaactttcgcagagacttaggttagtgccacaaaagctgcgtgtgccaggccacctccttggtctgtgtgtttgccactggagtggagaagtgctttactctggacaaatggtatccaggctctgtgctgtagagtgtcgtggaggtagtttagggaagcgtcacttgaaaatctggtgtcatttgtcacctcagctgtaacagtgctttgcactagtcagagcccttttatttcatctaatctgaagaaaatgggactcctgagaaggagaacgaatgcaaaaagttggaagccaagttaggactcccagcacagtgctctgccacctcagattgtggccttagcgtggagcatggagagaggtatgctgcaggcgtggcaggagggaggccagaggaaacctgatcagaggctgcacgtgactccagattaaaagggaacaactgcagagatcattactgggagaaacaagccattctatggcaaagcatctccaggtccctagttttggggtcccccctttgttttctgtctgaggcccagagttactacctgcccaggttgcggctgagaccagagaattggacatgttgagagggactaggtattgctactgtcaatccagtgtgctccaagctgagttctgtccatggccataggagcgcaaaggtagctgagtgtggtctttttaagggataatgtaccacattagctgttgtctgccttactgacttttgaacaaaagtcgtgtcacttagagatagcagaagctattggtcagtgtgtctgccaacacatacttctgcaggacttctccctgctataaataagtgcagccagatttgtcagactaagccggcttgccttgtgcagtgctgtctggaaatagacgaggagctgttgttgaagtgggctcctttactgctaattaatgaaatagtttgcgatcccagctatctatctctgatagccatcacaagcaaagtcctctttccctggactgttcctgacttggatcggtcttgtcatctccccttttcccaactaccccccacacagatgaggcccaccttctgaagggggtggggaaagttgttggaaataatgagtgaaaataaattctcccggctaatgaaacagttgagcttgtggagcggcagagttggggaattttgtcccccctttaagtgagatgttgtcctgaggcaaggagcaggttccactgctctgaccctgtctaaatcccctcatggaggaggttctgggtgatgtcaccgttaggagatgccatcatagccttaaggaaaagtggccaccagatctgggcatccttgttgcgattagtgatgagaagtgttttggctggcaggtggtgttattttttagcttttggttctttttgttgttgtttgttttgagacactgtttcactcttgctgcccaggctggagtgcaatggcgcgatctcagctcactgcaacctctgactcctgggtccaaacaattttcctgcctcagtctcctgagtagctgggattacaggcacccgccaccatgcccagctaattgtgtatttttagtagagatggggttttcaccatgttggtcaggctggtctcgaactcctgacctcaggtaatccacccgccttggcctcccaaagtgctgggattacaggagtgagccaccatacccagcccagcctttggttctttaaattgtctctggtgtacacacggacttggttgggaagctaaggaagcattccaaggtgttggatggggaagttggttgagcacccagggtagctgaagtcctagaattctacagaacttccattaaggcttcaaaaggtgggtgcagggcctgccatctgcgcactgtctacttaggcagaaggtatggtggttttatccttgtgatagtacagagaacttttccatgtgtgatcagttgtgtccattttgatgactgatgcttttttgtttaagtcaatttctgttctcagaaattgaaaataaactggactgaattctgaattcagggatagcacctttttttttttttccagatcatttgctttacaggttttgtcacttgtctccataggtggattgcagactaaatgacttgataactttgatgcaatacctcactgaaaaataaatcagataatctagtattagtttcgtaattactagctagctgcacagcttagttaccctaaacataagtttgttcattttgtaaaatgtataatttcagctgtcccacctgagtcatggtgggtggtagtctgcaaagtctcttctaagtggtaaagcttagtcaaatgtgaggtattatcactggatcttggtgtcattaaggccatttagattatctttacttgtggcccctttatccaacaagggcacagacccagaagggtgtttagacttctgtcatgaagtagagtcattagctggaacttatgcttcccttactaacagtgcaggctggaggaatctgatgcccttttattttaatagagttgccttttatcaagagtgattaccttgaaaagtcctggagtaatctgttcttaggctgttggcctgtgggagctgacgttttctctccttattgaaatgtgtttctctcttacagctgagcgggctttggacaccatgaactttgatgtgattaagggaaagccaatccgcatcatgtggtctcagagggatccctctttgagaaaatctggtgtgggaaacgtcttcatcaagaacctggacaaatctatagataacaaggcactttatgatactttttctgcttttggaaacatactgtcctgcaaggtaaacattgattaaatgattttagcagaataattaattgattcttgaaaacaagataaataccaaacagagaactatcttggaattggggaacaagatatgggaattttcaaaatgctggacatggaatcctaaaagttcccataggtaatctcagggccatacccagcgtaaccagcacacgctttcatacccttgttctttactcagcctgaaatatccttcctattctttagctttggaaagcccacgtttttcttttgggatgggggaaagtagaggaccagagaagtgtctctagtcttgaggaaacttaatcactttagaagcataaattcactctattccttctacgtatctgttctatgctgagcactttaaaacttaaacggtggtggtgtatatgtttaatgccatactacactgaaaatctgttgtggccttggaaaatgttttgttttctgcatcaccgtggtttgcacccagatctcttaaaatgtgttgttgtgttttaaagagacagagtcttgctctgtctgtcacccagggtggagtgcagtggtctagtaatagctcattgtagcttcgacctcctgggctcaagccatcctcccacctcagcctcccaagtagctggaactacaggcacgtgccaccacactcatttaatttttttcttttttgtagagacagggtctccattgtccaacgatctggctccaacgatcctcctgctttggcctcccaaagcattgggattacaggcatgagccacagcacccaattttaagtattttttgtttgtttgtttttgataaaaataaaacatttggaatagaagcatcttagtagggctacctttgtaaatggaacacttactaggcacctggtgctgtgctaggtgttagaaaaattatactggtgtacttgaccaccattggccatggatgggctagagtctcctcaggcacaagataccctgaggttctcatgtctcaggagctggccagttctgctaaagtggtccgccttgtctttgacaggtggtgtgtgatgagaacggctctaagggttatgcctttgtccacttcgagacccaagaggctgccgacaaggccatcgagaagatgaatggcatgctcctcaatgaccgcaaagtgtgagtgtcccagtccggagcaacaaccatcgcatgagccagccgtggccccacctcgctattaactggcacacacaaggcggctactggttctcggcccaagtgtggcctgctcctacctctccactccagggctggtgagtctccctgcctgagccgtggcagcccttttgactcgccaaggtgggcttcctgcccaagccatggcctgcctgccgcctctcccttaaaggcatctgtctgtgggttttgtgagcatcaacaactggggctggctggaaagcagctctaagctcactctgagtcggggtcttggccagcggcagagtggagagggccctggactgaccaggagctgtatactagcagtgtgaccttggctttcctgtgattcaggtctgtccatgggtccctcgctagtggttgatgccaaattgtccccgcggttctccattttctaacttatgactcagtgacctaatacaaggctggctccacagtaatacttggtgacaatgaaaaaatcccatccctttgcagaaaaacttcataacagaccttgttgctttgatgtggttgttactgtagaatgcagagagggggaacttaccaaagccatatggggagaagaagagacaataagtcttggctattacaagccaaaataatttttgtcctttgtgtcattcagtatgccagaggatgggttatctttataatgtctgtgtgtgcagtggttgatctacagatatcactaaaaagaaatacaaaaatgtcagtgcatggataaattttcttttaagtataacagaccaaaataaataaatttaaaaagcaaagggtgccccttcactccaacaatctcatatctaggattaaccactgttaacagtttggtttgtatccttccagaccttttctatgcatttacatagttgcacagaaatgaacattttaaaaacatggccatcaggtttcttcatgaaggcagtgtgatgtggtaggaatagccctggtctaagccaggagccctggggctggtcctcacaggatagtcctgcctttttctctttctgctggggacttggggtatctctgagcctccttggtggtggatggggatctcgtgttttaacctctcctgtcagtctttaacctgtattcctttgggtccctggacatcatgttttattcctctgggtaattactgttcttcatggtttcattttagatttgtgggcagattcaagtctcgcaaagagcgggaagctgagcttggagccaaagccaaggaattcaccaatgtttatatcaaaaactttggggaagaggtggatgatgagagtctgaaagagctattcagtcagtttggtaagttggggttccttgtctcctttcacagtctaccagacccatctgttttttcttaagagatgagggcactgctccagagatttgcttcaagtgagtttccagagggaagccttctgttcctgagctgtgctcaagatggtgttactaatagttctgtcctttggtaataggtaagaccctaagtgtcaaggtgatgagagatcccaatgggaaatccaaaggctttggctttgtgagttacgaaaaacacgaggatgccaataaggtgagtataccacaaagattgggaaaagcttttaagaggttgccccagagtatgggtagggtcttgctagcacctacctagagctgggacggtctgagtatctggtagtagatgtaccattactatactctgggatcatcttcctgggttccgcatgttaacttcatgtaggtgtttacaaagcacttggcacatacctgtcacctcagctatcagttgttgaaagaataggacagacgtttgttatgctgcaaaggtgagagaactaaagcccagtgagtgctgatttgataacagcacggcagctacttgtgggcaaagcattgtgccagaccctcaatatttatcacttaaatacccacaaaagcacctgcagaatttactggcagccggaatattatatcgccctaggctcatgtcagcacacttgtgtttatacacctgtactatttctatattatctggatcaataacccatttaaatattaacctcactttacagatgaggaagtttggatttgtgtgacagacttcagaggtggagtgaatttagtttttagtcctatagtagaaagaatattttttgggacttagacctccagaataagaccccatcgctgcaactttattttaaagacatatttttcctctctaggctgtggaagagatgaatggaaaagaaataagtggtaaaatcatatttgtaggccgtgcacaaaagaaagtagaacggcaggcagagttaaaacggaaatttgaacagttgaaacaggagagaattagtcgatatcaggtaaggtggtcttggcccagcctagcaatgggatttgctgtgaaatatttgcagaacacccctatgtttagcgggctttctttttgaggacttggagtgtgttcttcttcccattttacctaaaaagatgaggtttaaaaggatatatacctactacatatgactgattattatagaaccagaaacaagagatgggtttattcatcaagaagctctctattttggaagcctcagcctgttgcttttagccatgtaggttccttttacttaaatgagactcctttgtttggcatggcttcaagaagacccctgctggggtgggtgagtggtcaccagaacagctgtggggagaggtgacaaaaggtgagtgcactgatgatcctgtcagtttcagggcagtagtttcacaactttggacttgcatcagattcatcagcagagcttgttaaaacagatagctgggctccagccccagagtttttcttattcattgggtttggggtctggcctaagaatttcatttctttcttttttttttttttttcttgagacagtctcgctctgtcgcccaggttggagtgcagtggcacaatctcggctcactgcaaactccgcctcccgggttcgcaccattctcctgccttagcctcctgagtagctgggactacaggcacccgccaccatgcctggctaattttttgtatttttagtagagacggggtttcactgtgttagccaggatggtctcgatctcctgaccttgtgattcgcccgcctcggcctcccaaagtgctgggattacaggcgtgagccaccgcgtccggccgagaatttcatttctaacaagttcccaaagatgctggtgctcctggtctggggccacccttggggaaccactttcttagggaatatttgtgatatagaagtgtagttaacagtgatctttttccttcagggggtgaatctctacattaagaacttggatgacactattgatgatgagaaattaaggaaagaattttctccttttggatcaattaccagtgctaaggtattatactgcgatctggggattgaaagcagtggtattccattataggcttattggcatttgtcccattgaaggaatagcatttaaattatgttcatttctgaaagtagctactacgtttttctagcaaaatttctggatgcattctggagaatgacatttcattaggttaacattacactgtttcccaagcactggagtctggagaggaatttgacccagcccctccttgccaactcagagcacctgaatctttcccattccttgctgcctcgtgccggtgtggggacagatggtgctacagaatgagcagaggaaatccagacaggttgttttccatttgtcttggggcctgtctctacagctctgccacattttctccttgagaatgaaggtattttgaagattttggaggtgggcttgggaacttctaccctggtcttaaaaagagaggaaaggggagtggaaggtttttctatgtttcgtagtgtgcatcatttgcttgattttctttgataatcatatcaactaagttagcagggtaagtaggaacctcattttaaagataaggaattttagtccttgaacaagagaatgctgactacatggggatggtgtactgcttgtccttggcactttgggagcaggatggaaactggtgccatctgaacattttgagttatggccggatgcagacgccggtcttgctaaacaggtgtaccagatgccacaaaatcctttagttgatgagaagggaagccacgtgggctggtaagggcttagtggccctgccctggctcttagtggactttgctcccaacctgggaatgtggaaagcaatgttatcagttgtagtagggagttggccagaggccaactgtgggtttgcccagttcttaccctttcgtttttgctatgaccccccccttgactggccctcatcagtgtaaggagtgatcttctatccttgcttatctgcctagtagtcaagttggcatttgttaagagagcagaagagccataccttgaattgtccccattttcattatgatggtgtggcatttttattcacataccttactggcccatctcattggtagagagttatggagtgatgcacttctttacttccctatcctccacttcaggaggctctctgggccattaactaagacataaaacaatgacagtcacaccagagaagacagtgaataaccttgtctattaggaagaatgccatttgtgaatgatgaacttaatgtgggaaaagactgcctgaaccagtagacctgtggttttgtagctgtttggagtatttcttggaaattgagcctcaggaaggcaagtgagactagaatctaggctgcctatctctgagctggtcatctcattgaattaatggtggcagtcattggttacctgaacattttaggactcctgtccacacgtggtattccaaaagtgttatcctgacgttggtaagagcttgttagagtttgtccaccgaggtcttgaagcatatgagatatgaaaataaattgctcagtactactctcaagatgttttgtggttacccggagtagctatccaccaggtatcaggaaacatctttgagttcctggttttattattagccatatcatagtgtttcagaactttagcatcacctggggactcaaagaaaacacctagataccttagaggttgtgacttagttggtctggggtaaatcctgtgccagaaccctgacctagactcagtgactgcagcagaacccaggctttctggttcttctgaatagttccctccccacccagggacatccttttttttcctatttgtaggtttgttttgttttttttgttggtttggttggttggtgtttttgttttgttttgttttgttttgttttgttttgttttggagatggagtctcgctctgtcgcccaggctggagtgcagtggcgcgatctcggctcactgcaatctctgtctcccgggttgaagcggttctcctgcctcagcctcctgagtagctaggattacaggtgtgtgccaccacgcccagctgatttttgtatttttagtagagacggggttgcaccatgttggtcaggatggtcttgaattcctgacctcgtgatccacccacctcggcctcccaaagtgctgggattacaggcatgagccactgcgcctggccctttgtttttttgagatgaggtctcactacattgctcaagctggtctcaacctcctgagctcaagcagccctcccacctcagccttccaaagtgctgggattacaggcacaagccatcacacccagccagggacaccttatttcttaagtagctggtctcattttgtaggtaatgctggaggatggaagaagcaaagggtttggcttcgtctgcttctcatctcctgaagaagcaaccaaagcagtcactgagatgaatggacgcattgtgggctccaagccactatatgttgccctggcccagaggaaggaagagagaaaggctcacctgaccaaccagtatatgcaacgagtggctggaatgagagcacttcctgccaatgccatcttaaatcagttccagcctgcagcgggtggctactttgtgccagcagtcccacaggtgggtgtgctgtttggtcacagctcttgggaacctgccggctggcagtattctgcagtggttggggagagggatttttcgttattagagttctagaatgtcacaataaggacccttcaagtaaaaatgaaggacttacccatggtcacaaacacacacccacagtggcagtggtagcataaaacagtccccattagctgacccctcagctcttgaatagaaagaacatttaaataattagcttaggtcctggttagtgagatgagatgagatacttctctaggatgggttcagtccttaagggggtgtttgggtattcttctgtcttacaggctcagggaaggcctccatattatacacctaaccagttagcacagatgaggcctaatccacgctggcagcaaggtgggagacctcaaggtaggtggtggggaacagtaattgacagcccaggatatacctgtcctggtctcccctgcctttccttcttccccactctgaggcacagcctaggttctggtccacatcacttctcaatgatgtgcaatttttctcttcaccaggcttccaaggaatgccaagtgctatacgccagtctgggcctcgtccaactcttcgccatctggctccaactggtaatgctccggcctctcgtggcctccctactaccactcagagagtcggtgagcaaactggcctttagaagtgtggcctggggaggagggagtcaggatgactaggctctgtcctgggttggtcagtttgttgggctcgaatttatcgagtcctggttctgtaatcttagctgtgtgcttaggtggccacttcaggagcagagaaacagtatgagttctaggtgtgtcagttgcttttaacattctttgctcatcggtgacctatgtgaaaaaggttagttgtagaagtttgctagctggatgaccacagaggcagcttgttcttttgggtggggtgaggaatacaaggaaacagtgtatacagaatatgtcttgtattccaagatgtggaaagagttgtatgttatcctttggctcatcctcgaaagtagtagtggccccctgtgcaatgtgttgcgtaaacgtgctttgaaatttctccttccgtgggacgtggccagttggacatctgccgccaacactgatgtgcatttgctggtctgttgtagggtctgagtgcccggaccgcttggctatggactttggtggggctggtgccgcccagcaagggctgactgacagctgccagtctggaggtggtattggatgcacacagaagggggaaagatgggatttgacgggtctttgcccagactgatgggctttaattgtatttgttctttccctaaggcgttcccacagctgtgcagaacttagcgccacgcgctgctgttgctgctgctgctccccgggctgttgccccctacaaatacgcctccagtgtccgcagccctcatcctgccatacagcctctgcaggtgaggttcaccagacagaatgcttaaaaggatttcccccatttccacttgatgtaaaagaagctgtgcttttgattccttcaacaggtattaaatgcctgctctgtgttatgacgctatgttctgattcactgtccctgcccttcaggggctcactagtgggaaagaaggggcttaaaagtgctctgcctgatgccagttcactcagaaatgcctcagagcgggcagccagtgcttcctcttctgtttgtacgaaataatgtgctcattcagctgtttgagcctccaggtcacttccgcatccaatgacctattggatccttggctgctctgcaagatgattggtacattaatgcaggaaataacttcaacttacagatcggatgttcagcttcaaagatgtaaagtgtgtgtaggaggtgaaggggttgaacctagagcttagattttctaagctgtaacttgctgtctctagacctgtgctctagatgcaactagtttgtttcagagcctaatagcaatttgctgtggaggtgtcaccctaagccttcaggcccataagctgcttaggagattactctttaactgtcctgtctcatactctctaagttggggatttcctagaacttgatgctatgtaaaataccttttctttgcaaggctttgactagcattgacgttgcatgttgaccgtttttaagcatttgatacaaaaacatttggtagaattaaggtgatgtggaatgtaattataaatgtgttgatatttactccctttgatccaatctgcactgagatttaccctaaaggaaaactaattttcaggaaaaggttatatacaagtgtttacccttatttatatcaaggcttttcattcttgagtaactttgggtgtattaaggaaatgtcagaaaatgcttgcctagcactataggtttgttttattatttacgtttcacttcgctttctgatagcatgccattttcattgtaattggttgtgtttatgtccataccactctgttcctcaacacacccctcaatccttcaaggactgaaattagttcctttagagcaaggacagccacctcctctcctctttcacatagtcagatgttcagatattgaacaggcactcaaccaccatcaggtgttgtcctttcctcagtgctaacccactgcctttcctggttcccaggcaccccagcctgcggtccatgtgcaggggcaggagccactgactgcctccatgctggctgcagcacccccccaggaacagaagcagatgctgggtgagtgacccacttgcttgcagaagaagagggtcccagagcctgatgccagctaggacaccagtgtccattgtttactgggatttgatttgtttttttattaactatcctccccataggagaacgcttgttcccactcatccaaacaatgcattcaaatctggctgggaagatcacgggaatgctgctggagatagacaactctgagctgctgcacatgttagagtcccccgagtctctccgctccaaggtgagctggggctcagaccctgcagcttcagttctcagcttgggaagactgggggcaaacttggatgcccaggtgcagcagaaagtgggatctgctgcccccaggacccctctcgtcatgccttgactgtgactggaggctgcagtgggtatttgggaaagtagttagcaccagaagcctagggatcatctgtacagttggctttggtccaccactaggtctgggcactggggaggggtggagtagctctcctagattcactgaccacctgaagatttctcgcaggtggatgaagctgtagcagttctacaggctcatcatgccaagaaagaagctgcccagaaggtgggcgctgttgctgctgctacctcttagacaaggaaaaaccgtatgtgtggctattttcatttttgttcctatgagcattgttcctatgagcattgtctttgtggtttgacctgaggttgtatatatgctcactgcttagctctgggaatacaataagtacagttagttacacggagtgtgttgcaggtgacttcttatcatgaggactgtggactttgtctgcaggagcttgagtgaataataaaactagtactggttgatggttgtaggtgtctccagatagggaaagaagagacagtaaaataagctaaggaaaaagcacatggtaaggaccagagctggtgtgttgggagggttgacttggcatagtcatgaccctcttgtcaagggcctcaggagccttgtcatctagtggtaaagaccagagatgctgctaaatgttgtacagtacacaggaggacagacccaacagaatgtccaaagtgtcaatagcactgaggttgagaaactctcttctagaataccttcctttatccactatatgttaatgaatctaaattatttgattatgcatttatttgtgttggtgcttttctttacaggattcaaaagccaaataaccccttatggaattcaactcaaggtttgaagacttcctagcttgtcctatggacctcaacaccaaggattacaaattgcaaatttaataggtcattttgtatcaaaaggtcaattatgaagcacctagaatttttcaattatacgaatatgttctttgggttctgctgtggcccagacagtgttaactttttttttattgtgggttttgattttttcccccagaaattggttttatttgatgtacccaagtcttacgtttcccaataaagaaaaaaaatctccataaaa

SEQ ID NO: 13119 - DNA, 3016 bp, Homo sapiens
gggcttcgcagcctgaggaaaaaaagagaaaaagataaaaaaaatctgaaaacgcttcaaaatcctgaaaaaaaaaaaggaaaagaaaaaacgaatcctcggagaacccgcggggaagtcactttcgtacgcttccggcctgccccgcgcccgccgccgcagcgcttggcgtccgtcggtctccgtccgtcggtccgggggtgagccgcccgcccggcccgccgtgccctccccccgctcgggccccgagccccgcgccccgcgcctgccccggcgcaccacgtgtccgtgctgcccttcgccgcccgcccggggctcgccgagtcggcgcccacaaagatttggtttccctctgccccggcggttgtaatcttaaaccgccggagcccgaggcctatatttatagagaaacgcgtgtccccgaggccgccgtgggcagcgtccggtcgcctcttaaaggatttttacccttcggaaggggattccccgtttaatttttttcctactttgattttttgaaatttggagcttcgcaccaggaccgcggagaagtgcaaagtcgcggggagggccgtattgtgcggagagccttttgtctgcggtgctgcggccgtgggagccggcccccgcctcccgtttccgtcccgtctccaagcccgccgactccagctcgtcctcgccgcgccggtgccacctgtgagccgcggcgcgggcccgggctccgaaggcgcccctttgtcctgcggcgggcccgataagaagtcctcctggcggggctcggggtggtggggggcggggagatgaacgctgcggccagcagctaccccatggcctccctgtacgtgggcgacctgcattcggacgtcaccgaggccatgctgtacgaaaagttcagccccgcggggcctgtgctgtccatccgggtctgccgcgatatgatcacccgccgctccctgggctatgcctacgtcaacttccagcagccggccgacgctgagcgggctttggacaccatgaactttgatgtgattaagggaaagccaatccgcatcatgtggtctcagagggatccctctttgagaaaatctggtgtgggaaacgtcttcatcaagaacctggacaaatctatagataacaaggcactttatgatactttttctgcttttggaaacatactgtcctgcaaggtggtgtgtgatgagaacggctctaagggttatgcctttgtccacttcgagacccaagaggctgccgacaaggccatcgagaagatgaatggcatgctcctcaatgaccgcaaagtatttgtgggcagattcaagtctcgcaaagagcgggaagctgagcttggagccaaagccaaggaattcaccaatgtttatatcaaaaactttggggaagaggtggatgatgagagtctgaaagagctattcagtcagtttggtaagaccctaagtgtcaaggtgatgagagatcccaatgggaaatccaaaggctttggctttgtgagttacgaaaaacacgaggatgccaataaggctgtggaagagatgaatggaaaagaaataagtggtaaaatcatatttgtaggccgtgcacaaaagaaagtagaacggcaggcagagttaaaacggaaatttgaacagttgaaacaggagagaattagtcgatatcagggggtgaatctctacattaagaacttggatgacactattgatgatgagaaattaaggaaagaattttctccttttggatcaattaccagtgctaaggtaatgctggaggatggaagaagcaaagggtttggcttcgtctgcttctcatctcctgaagaagcaaccaaagcagtcactgagatgaatggacgcattgtgggctccaagccactatatgttgccctggcccagaggaaggaagagagaaaggctcacctgaccaaccagtatatgcaacgagtggctggaatgagagcacttcctgccaatgccatcttaaatcagttccagcctgcagcgggtggctactttgtgccagcagtcccacaggctcagggaaggcctccatattatacacctaaccagttagcacagatgaggcctaatccacgctggcagcaaggtgggagacctcaaggcttccaaggaatgccaagtgctatacgccagtctgggcctcgtccaactcttcgccatctggctccaactggtaatgctccggcctctcgtggcctccctactaccactcagagagtcggcgttcccacagctgtgcagaacttagcgccacgcgctgctgttgctgctgctgctccccgggctgttgccccctacaaatacgcctccagtgtccgcagccctcatcctgccatacagcctctgcaggcaccccagcctgcggtccatgtgcaggggcaggagccactgactgcctccatgctggctgcagcacccccccaggaacagaagcagatgctgggagaacgcttgttcccactcatccaaacaatgcattcaaatctggctgggaagatcacgggaatgctgctggagatagacaactctgagctgctgcacatgttagagtcccccgagtctctccgctccaaggtggatgaagctgtagcagttctacaggctcatcatgccaagaaagaagctgcccagaaggtgggcgctgttgctgctgctacctcttagacaaggaaaaaccgattcaaaagccaaataaccccttatggaattcaactcaaggtttgaagacttcctagcttgtcctatggacctcaacaccaaggattacaaattgcaaatttaataggtcattttgtatcaaaaggtcaattatgaagcacctagaatttttcaattatacgaatatgttctttgggttctgctgtggcccagacagtgttaactttttttttattgtgggttttgattttttcccccagaaattggttttatttgatgtacccaagtcttacgtttcccaataaagaaaaaaaatctccataaaa

SEQ ID NO: 13120 - DNA, 15929 bp, Homo sapiens
gcagcctgaggaaaaaaagagaaaaagataaaaaaaatctgaaaacgcttcaaaatcctgaaaaaaaaaaaggaaaagaaaaaacgaatcctcggagaacccgcggggaagtcactttcgtacgcttccggcctgccccgcgcccgccgccgcagcgcttggcgtccgtcggtctccgtccgtcggtccgggggtgagccgcccgcccggcccgccgtgccctccccccgctcgggccccgagccccgcgccccgcgcctgccccggcgcaccacgtgtccgtgctgcccttcgccgcccgcccggggctcgccgagtcggcgcccacaaagatttggtttccctctgccccggcggttgtaatcttaaaccgccggagcccgaggcctatatttatagagaaacgcgtgtccccgaggccgccgtgggcagcgtccggtcgcctcttaaaggatttttacccttcggaaggggattccccgtttaatttttttcctactttgattttttgaaatttggagcttcgcaccaggaccgcggagaagtgcaaagtcgcggggagggccgtattgtgcggagagccttttgtctgcggtgctgcggccgtgggagccggcccccgcctcccgtttccgtcccgtctccaagcccgccgactccagctcgtcctcgccgcgccggtgccacctgtgagccgcggcgcgggcccgggctccgaaggcgcccctttgtcctgcggcgggcccgataagaagtcctcctggcggggctcggggtggtggggggcggggagatgaacgctgcggccagcagctaccccatggcctccctgtacgtgggcgacctgcattcggacgtcaccgaggccatgctgtacgaaaagttcagccccgcggggcctgtgctgtccatccgggtctgccgcgatatgatcacccgccgctccctgggctatgcctacgtcaacttccagcagccggccgacggtgagtagaagctgtgcccacacgtgcgtgggagcccggaggaccccgggagtcgtcttctggcagggccctcctgccgaggagggcggcatcacgacagcatgttgccaccgaagctgggagcagggtgcggagattgagaacgcggacctggcatcagatgactcgagtttcaatcttgtttctaccacttgctaactgggtgaccttgggctacttattagtgttgctggtagtggggttggaaaccaaggagactgtaaaacaggattagagtgaagccactggcattccactgcgtgtggtccttgtcagtggggctgggctgttagagatccttgcttgtgcccctcacaggctggccaaaaaggcgggacgtttgaaacacaattccccgcgaaagttttacattgtaaagctcctgcccgctccgccacctttactaaccttgactacctgatgttgtgctgataaaggatcagtcagggcaggcaggaagcagggggaaggtttctgtgcgttaaactttcgcagagacttaggttagtgccacaaaagctgcgtgtgccaggccacctccttggtctgtgtgtttgccactggagtggagaagtgctttactctggacaaatggtatccaggctctgtgctgtagagtgtcgtggaggtagtttagggaagcgtcacttgaaaatctggtgtcatttgtcacctcagctgtaacagtgctttgcactagtcagagcccttttatttcatctaatctgaagaaaatgggactcctgagaaggagaacgaatgcaaaaagttggaagccaagttaggactcccagcacagtgctctgccacctcagattgtggccttagcgtggagcatggagagaggtatgctgcaggcgtggcaggagggaggccagaggaaacctgatcagaggctgcacgtgactccagattaaaagggaacaactgcagagatcattactgggagaaacaagccattctatggcaaagcatctccaggtccctagttttggggtcccccctttgttttctgtctgaggcccagagttactacctgcccaggttgcggctgagaccagagaattggacatgttgagagggactaggtattgctactgtcaatccagtgtgctccaagctgagttctgtccatggccataggagcgcaaaggtagctgagtgtggtctttttaagggataatgtaccacattagctgttgtctgccttactgacttttgaacaaaagtcgtgtcacttagagatagcagaagctattggtcagtgtgtctgccaacacatacttctgcaggacttctccctgctataaataagtgcagccagatttgtcagactaagccggcttgccttgtgcagtgctgtctggaaatagacgaggagctgttgttgaagtgggctcctttactgctaattaatgaaatagtttgcgatcccagctatctatctctgatagccatcacaagcaaagtcctctttccctggactgttcctgacttggatcggtcttgtcatctccccttttcccaactaccccccacacagatgaggcccaccttctgaagggggtggggaaagttgttggaaataatgagtgaaaataaattctcccggctaatgaaacagttgagcttgtggagcggcagagttggggaattttgtcccccctttaagtgagatgttgtcctgaggcaaggagcaggttccactgctctgaccctgtctaaatcccctcatggaggaggttctgggtgatgtcaccgttaggagatgccatcatagccttaaggaaaagtggccaccagatctgggcatccttgttgcgattagtgatgagaagtgttttggctggcaggtggtgttattttttagcttttggttctttttgttgttgtttgttttgagacactgtttcactcttgctgcccaggctggagtgcaatggcgcgatctcagctcactgcaacctctgactcctgggtccaaacaattttcctgcctcagtctcctgagtagctgggattacaggcacccgccaccatgcccagctaattgtgtatttttagtagagatggggttttcaccatgttggtcaggctggtctcgaactcctgacctcaggtaatccacccgccttggcctcccaaagtgctgggattacaggagtgagccaccatacccagcccagcctttggttctttaaattgtctctggtgtacacacggacttggttgggaagctaaggaagcattccaaggtgttggatggggaagttggttgagcacccagggtagctgaagtcctagaattctacagaacttccattaaggcttcaaaaggtgggtgcagggcctgccatctgcgcactgtctacttaggcagaaggtatggtggttttatccttgtgatagtacagagaacttttccatgtgtgatcagttgtgtccattttgatgactgatgcttttttgtttaagtcaatttctgttctcagaaattgaaaataaactggactgaattctgaattcagggatagcacctttttttttttttccagatcatttgctttacaggttttgtcacttgtctccataggtggattgcagactaaatgacttgataactttgatgcaatacctcactgaaaaataaatcagataatctagtattagtttcgtaattactagctagctgcacagcttagttaccctaaacataagtttgttcattttgtaaaatgtataatttcagctgtcccacctgagtcatggtgggtggtagtctgcaaagtctcttctaagtggtaaagcttagtcaaatgtgaggtattatcactggatcttggtgtcattaaggccatttagattatctttacttgtggcccctttatccaacaagggcacagacccagaagggtgtttagacttctgtcatgaagtagagtcattagctggaacttatgcttcccttactaacagtgcaggctggaggaatctgatgcccttttattttaatagagttgccttttatcaagagtgattaccttgaaaagtcctggagtaatctgttcttaggctgttggcctgtgggagctgacgttttctctccttattgaaatgtgtttctctcttacagctgagcgggctttggacaccatgaactttgatgtgattaagggaaagccaatccgcatcatgtggtctcagagggatccctctttgagaaaatctggtgtgggaaacgtcttcatcaagaacctggacaaatctatagataacaaggcactttatgatactttttctgcttttggaaacatactgtcctgcaaggtaaacattgattaaatgattttagcagaataattaattgattcttgaaaacaagataaataccaaacagagaactatcttggaattggggaacaagatatgggaattttcaaaatgctggacatggaatcctaaaagttcccataggtaatctcagggccatacccagcgtaaccagcacacgctttcatacccttgttctttactcagcctgaaatatccttcctattctttagctttggaaagcccacgtttttcttttgggatgggggaaagtagaggaccagagaagtgtctctagtcttgaggaaacttaatcactttagaagcataaattcactctattccttctacgtatctgttctatgctgagcactttaaaacttaaacggtggtggtgtatatgtttaatgccatactacactgaaaatctgttgtggccttggaaaatgttttgttttctgcatcaccgtggtttgcacccagatctcttaaaatgtgttgttgtgttttaaagagacagagtcttgctctgtctgtcacccagggtggagtgcagtggtctagtaatagctcattgtagcttcgacctcctgggctcaagccatcctcccacctcagcctcccaagtagctggaactacaggcacgtgccaccacactcatttaatttttttcttttttgtagagacagggtctccattgtccaacgatctggctccaacgatcctcctgctttggcctcccaaagcattgggattacaggcatgagccacagcacccaattttaagtattttttgtttgtttgtttttgataaaaataaaacatttggaatagaagcatcttagtagggctacctttgtaaatggaacacttactaggcacctggtgctgtgctaggtgttagaaaaattatactggtgtacttgaccaccattggccatggatgggctagagtctcctcaggcacaagataccctgaggttctcatgtctcaggagctggccagttctgctaaagtggtccgccttgtctttgacaggtggtgtgtgatgagaacggctctaagggttatgcctttgtccacttcgagacccaagaggctgccgacaaggccatcgagaagatgaatggcatgctcctcaatgaccgcaaagtgtgagtgtcccagtccggagcaacaaccatcgcatgagccagccgtggccccacctcgctattaactggcacacacaaggcggctactggttctcggcccaagtgtggcctgctcctacctctccactccagggctggtgagtctccctgcctgagccgtggcagcccttttgactcgccaaggtgggcttcctgcccaagccatggcctgcctgccgcctctcccttaaaggcatctgtctgtgggttttgtgagcatcaacaactggggctggctggaaagcagctctaagctcactctgagtcggggtcttggccagcggcagagtggagagggccctggactgaccaggagctgtatactagcagtgtgaccttggctttcctgtgattcaggtctgtccatgggtccctcgctagtggttgatgccaaattgtccccgcggttctccattttctaacttatgactcagtgacctaatacaaggctggctccacagtaatacttggtgacaatgaaaaaatcccatccctttgcagaaaaacttcataacagaccttgttgctttgatgtggttgttactgtagaatgcagagagggggaacttaccaaagccatatggggagaagaagagacaataagtcttggctattacaagccaaaataatttttgtcctttgtgtcattcagtatgccagaggatgggttatctttataatgtctgtgtgtgcagtggttgatctacagatatcactaaaaagaaatacaaaaatgtcagtgcatggataaattttcttttaagtataacagaccaaaataaataaatttaaaaagcaaagggtgccccttcactccaacaatctcatatctaggattaaccactgttaacagtttggtttgtatccttccagaccttttctatgcatttacatagttgcacagaaatgaacattttaaaaacatggccatcaggtttcttcatgaaggcagtgtgatgtggtaggaatagccctggtctaagccaggagccctggggctggtcctcacaggatagtcctgcctttttctctttctgctggggacttggggtatctctgagcctccttggtggtggatggggatctcgtgttttaacctctcctgtcagtctttaacctgtattcctttgggtccctggacatcatgttttattcctctgggtaattactgttcttcatggtttcattttagatttgtgggcagattcaagtctcgcaaagagcgggaagctgagcttggagccaaagccaaggaattcaccaatgtttatatcaaaaactttggggaagaggtggatgatgagagtctgaaagagctattcagtcagtttggtaagttggggttccttgtctcctttcacagtctaccagacccatctgttttttcttaagagatgagggcactgctccagagatttgcttcaagtgagtttccagagggaagccttctgttcctgagctgtgctcaagatggtgttactaatagttctgtcctttggtaataggtaagaccctaagtgtcaaggtgatgagagatcccaatgggaaatccaaaggctttggctttgtgagttacgaaaaacacgaggatgccaataaggtgagtataccacaaagattgggaaaagcttttaagaggttgccccagagtatgggtagggtcttgctagcacctacctagagctgggacggtctgagtatctggtagtagatgtaccattactatactctgggatcatcttcctgggttccgcatgttaacttcatgtaggtgtttacaaagcacttggcacatacctgtcacctcagctatcagttgttgaaagaataggacagacgtttgttatgctgcaaaggtgagagaactaaagcccagtgagtgctgatttgataacagcacggcagctacttgtgggcaaagcattgtgccagaccctcaatatttatcacttaaatacccacaaaagcacctgcagaatttactggcagccggaatattatatcgccctaggctcatgtcagcacacttgtgtttatacacctgtactatttctatattatctggatcaataacccatttaaatattaacctcactttacagatgaggaagtttggatttgtgtgacagacttcagaggtggagtgaatttagtttttagtcctatagtagaaagaatattttttgggacttagacctccagaataagaccccatcgctgcaactttattttaaagacatatttttcctctctaggctgtggaagagatgaatggaaaagaaataagtggtaaaatcatatttgtaggccgtgcacaaaagaaagtagaacggcaggcagagttaaaacggaaatttgaacagttgaaacaggagagaattagtcgatatcaggtaaggtggtcttggcccagcctagcaatgggatttgctgtgaaatatttgcagaacacccctatgtttagcgggctttctttttgaggacttggagtgtgttcttcttcccattttacctaaaaagatgaggtttaaaaggatatatacctactacatatgactgattattatagaaccagaaacaagagatgggtttattcatcaagaagctctctattttggaagcctcagcctgttgcttttagccatgtaggttccttttacttaaatgagactcctttgtttggcatggcttcaagaagacccctgctggggtgggtgagtggtcaccagaacagctgtggggagaggtgacaaaaggtgagtgcactgatgatcctgtcagtttcagggcagtagtttcacaactttggacttgcatcagattcatcagcagagcttgttaaaacagatagctgggctccagccccagagtttttcttattcattgggtttggggtctggcctaagaatttcatttctttcttttttttttttttttcttgagacagtctcgctctgtcgcccaggttggagtgcagtggcacaatctcggctcactgcaaactccgcctcccgggttcgcaccattctcctgccttagcctcctgagtagctgggactacaggcacccgccaccatgcctggctaattttttgtatttttagtagagacggggtttcactgtgttagccaggatggtctcgatctcctgaccttgtgattcgcccgcctcggcctcccaaagtgctgggattacaggcgtgagccaccgcgtccggccgagaatttcatttctaacaagttcccaaagatgctggtgctcctggtctggggccacccttggggaaccactttcttagggaatatttgtgatatagaagtgtagttaacagtgatctttttccttcagggggtgaatctctacattaagaacttggatgacactattgatgatgagaaattaaggaaagaattttctccttttggatcaattaccagtgctaaggtattatactgcgatctggggattgaaagcagtggtattccattataggcttattggcatttgtcccattgaaggaatagcatttaaattatgttcatttctgaaagtagctactacgtttttctagcaaaatttctggatgcattctggagaatgacatttcattaggttaacattacactgtttcccaagcactggagtctggagaggaatttgacccagcccctccttgccaactcagagcacctgaatctttcccattccttgctgcctcgtgccggtgtggggacagatggtgctacagaatgagcagaggaaatccagacaggttgttttccatttgtcttggggcctgtctctacagctctgccacattttctccttgagaatgaaggtattttgaagattttggaggtgggcttgggaacttctaccctggtcttaaaaagagaggaaaggggagtggaaggtttttctatgtttcgtagtgtgcatcatttgcttgattttctttgataatcatatcaactaagttagcagggtaagtaggaacctcattttaaagataaggaattttagtccttgaacaagagaatgctgactacatggggatggtgtactgcttgtccttggcactttgggagcaggatggaaactggtgccatctgaacattttgagttatggccggatgcagacgccggtcttgctaaacaggtgtaccagatgccacaaaatcctttagttgatgagaagggaagccacgtgggctggtaagggcttagtggccctgccctggctcttagtggactttgctcccaacctgggaatgtggaaagcaatgttatcagttgtagtagggagttggccagaggccaactgtgggtttgcccagttcttaccctttcgtttttgctatgaccccccccttgactggccctcatcagtgtaaggagtgatcttctatccttgcttatctgcctagtagtcaagttggcatttgttaagagagcagaagagccataccttgaattgtccccattttcattatgatggtgtggcatttttattcacataccttactggcccatctcattggtagagagttatggagtgatgcacttctttacttccctatcctccacttcaggaggctctctgggccattaactaagacataaaacaatgacagtcacaccagagaagacagtgaataaccttgtctattaggaagaatgccatttgtgaatgatgaacttaatgtgggaaaagactgcctgaaccagtagacctgtggttttgtagctgtttggagtatttcttggaaattgagcctcaggaaggcaagtgagactagaatctaggctgcctatctctgagctggtcatctcattgaattaatggtggcagtcattggttacctgaacattttaggactcctgtccacacgtggtattccaaaagtgttatcctgacgttggtaagagcttgttagagtttgtccaccgaggtcttgaagcatatgagatatgaaaataaattgctcagtactactctcaagatgttttgtggttacccggagtagctatccaccaggtatcaggaaacatctttgagttcctggttttattattagccatatcatagtgtttcagaactttagcatcacctggggactcaaagaaaacacctagataccttagaggttgtgacttagttggtctggggtaaatcctgtgccagaaccctgacctagactcagtgactgcagcagaacccaggctttctggttcttctgaatagttccctccccacccagggacatccttttttttcctatttgtaggtttgttttgttttttttgttggtttggttggttggtgtttttgttttgttttgttttgttttgttttgttttgttttggagatggagtctcgctctgtcgcccaggctggagtgcagtggcgcgatctcggctcactgcaatctctgtctcccgggttgaagcggttctcctgcctcagcctcctgagtagctaggattacaggtgtgtgccaccacgcccagctgatttttgtatttttagtagagacggggttgcaccatgttggtcaggatggtcttgaattcctgacctcgtgatccacccacctcggcctcccaaagtgctgggattacaggcatgagccactgcgcctggccctttgtttttttgagatgaggtctcactacattgctcaagctggtctcaacctcctgagctcaagcagccctcccacctcagccttccaaagtgctgggattacaggcacaagccatcacacccagccagggacaccttatttcttaagtagctggtctcattttgtaggtaatgctggaggatggaagaagcaaagggtttggcttcgtctgcttctcatctcctgaagaagcaaccaaagcagtcactgagatgaatggacgcattgtgggctccaagccactatatgttgccctggcccagaggaaggaagagagaaaggctcacctgaccaaccagtatatgcaacgagtggctggaatgagagcacttcctgccaatgccatcttaaatcagttccagcctgcagcgggtggctactttgtgccagcagtcccacaggtgggtgtgctgtttggtcacagctcttgggaacctgccggctggcagtattctgcagtggttggggagagggatttttcgttattagagttctagaatgtcacaataaggacccttcaagtaaaaatgaaggacttacccatggtcacaaacacacacccacagtggcagtggtagcataaaacagtccccattagctgacccctcagctcttgaatagaaagaacatttaaataattagcttaggtcctggttagtgagatgagatgagatacttctctaggatgggttcagtccttaagggggtgtttgggtattcttctgtcttacaggctcagggaaggcctccatattatacacctaaccagttagcacagatgaggcctaatccacgctggcagcaaggtgggagacctcaaggtaggtggtggggaacagtaattgacagcccaggatatacctgtcctggtctcccctgcctttccttcttccccactctgaggcacagcctaggttctggtccacatcacttctcaatgatgtgcaatttttctcttcaccaggcttccaaggaatgccaagtgctatacgccagtctgggcctcgtccaactcttcgccatctggctccaactggtaatgctccggcctctcgtggcctccctactaccactcagagagtcggtgagcaaactggcctttagaagtgtggcctggggaggagggagtcaggatgactaggctctgtcctgggttggtcagtttgttgggctcgaatttatcgagtcctggttctgtaatcttagctgtgtgcttaggtggccacttcaggagcagagaaacagtatgagttctaggtgtgtcagttgcttttaacattctttgctcatcggtgacctatgtgaaaaaggttagttgtagaagtttgctagctggatgaccacagaggcagcttgttcttttgggtggggtgaggaatacaaggaaacagtgtatacagaatatgtcttgtattccaagatgtggaaagagttgtatgttatcctttggctcatcctcgaaagtagtagtggccccctgtgcaatgtgttgcgtaaacgtgctttgaaatttctccttccgtgggacgtggccagttggacatctgccgccaacactgatgtgcatttgctggtctgttgtagggtctgagtgcccggaccgcttggctatggactttggtggggctggtgccgcccagcaagggctgactgacagctgccagtctggaggtggtattggatgcacacagaagggggaaagatgggatttgacgggtctttgcccagactgatgggctttaattgtatttgttctttccctaaggcgttcccacagctgtgcagaacttagcgccacgcgctgctgttgctgctgctgctccccgggctgttgccccctacaaatacgcctccagtgtccgcagccctcatcctgccatacagcctctgcaggtgaggttcaccagacagaatgcttaaaaggatttcccccatttccacttgatgtaaaagaagctgtgcttttgattccttcaacaggtattaaatgcctgctctgtgttatgacgctatgttctgattcactgtccctgcccttcaggggctcactagtgggaaagaaggggcttaaaagtgctctgcctgatgccagttcactcagaaatgcctcagagcgggcagccagtgcttcctcttctgtttgtacgaaataatgtgctcattcagctgtttgagcctccaggtcacttccgcatccaatgacctattggatccttggctgctctgcaagatgattggtacattaatgcaggaaataacttcaacttacagatcggatgttcagcttcaaagatgtaaagtgtgtgtaggaggtgaaggggttgaacctagagcttagattttctaagctgtaacttgctgtctctagacctgtgctctagatgcaactagtttgtttcagagcctaatagcaatttgctgtggaggtgtcaccctaagccttcaggcccataagctgcttaggagattactctttaactgtcctgtctcatactctctaagttggggatttcctagaacttgatgctatgtaaaataccttttctttgcaaggctttgactagcattgacgttgcatgttgaccgtttttaagcatttgatacaaaaacatttggtagaattaaggtgatgtggaatgtaattataaatgtgttgatatttactccctttgatccaatctgcactgagatttaccctaaaggaaaactaattttcaggaaaaggttatatacaagtgtttacccttatttatatcaaggcttttcattcttgagtaactttgggtgtattaaggaaatgtcagaaaatgcttgcctagcactataggtttgttttattatttacgtttcacttcgctttctgatagcatgccattttcattgtaattggttgtgtttatgtccataccactctgttcctcaacacacccctcaatccttcaaggactgaaattagttcctttagagcaaggacagccacctcctctcctctttcacatagtcagatgttcagatattgaacaggcactcaaccaccatcaggtgttgtcctttcctcagtgctaacccactgcctttcctggttcccaggcaccccagcctgcggtccatgtgcaggggcaggagccactgactgcctccatgctggctgcagcacccccccaggaacagaagcagatgctgggtgagtgacccacttgcttgcagaagaagagggtcccagagcctgatgccagctaggacaccagtgtccattgtttactgggatttgatttgtttttttattaactatcctccccataggagaacgcttgttcccactcatccaaacaatgcattcaaatctggctgggaagatcacgggaatgctgctggagatagacaactctgagctgctgcacatgttagagtcccccgagtctctccgctccaaggtgagctggggctcagaccctgcagcttcagttctcagcttgggaagactgggggcaaacttggatgcccaggtgcagcagaaagtgggatctgctgcccccaggacccctctcgtcatgccttgactgtgactggaggctgcagtgggtatttgggaaagtagttagcaccagaagcctagggatcatctgtacagttggctttggtccaccactaggtctgggcactggggaggggtggagtagctctcctagattcactgaccacctgaagatttctcgcaggtggatgaagctgtagcagttctacaggctcatcatgccaagaaagaagctgcccagaaggtgggcgctgttgctgctgctacctcttagacaaggaaaaaccgtatgtgtggctattttcatttttgttcctatgagcattgttcctatgagcattgtctttgtggtttgacctgaggttgtatatatgctcactgcttagctctgggaatacaataagtacagttagttacacggagtgtgttgcaggtgacttcttatcatgaggactgtggactttgtctgcaggagcttgagtgaataataaaactagtactggttgatggttgtaggtgtctccagatagggaaagaagagacagtaaaataagctaaggaaaaagcacatggtaaggaccagagctggtgtgttgggagggttgacttggcatagtcatgaccctcttgtcaagggcctcaggagccttgtcatctagtggtaaagaccagagatgctgctaaatgttgtacagtacacaggaggacagacccaacagaatgtccaaagtgtcaatagcactgaggttgagaaactctcttctagaataccttcctttatccactatatgttaatgaatctaaattatttgattatgcatttatttgtgttggtgcttttctttacaggattcaaaagccaaataaccccttatggaattcaactcaaggtttgaagacttcctagcttgtcctatggacctcaacaccaaggattacaaattgcaaatttaataggtcattttgtatcaaaaggtcaattatgaagcacctagaatttttcaattatacgaatatgttctttgggttctgctgtggcccagacagtgttaactttttttttattgtgggttttgattttttcccccagaaattggttttatttgatgtacccaagtcttacgtttcccaataaagaaaaaaaatctccataaaa

SEQ ID NO: 13121 - DNA, 3048 bp, Homo sapiens
gcagcctgaggaaaaaaagagaaaaagataaaaaaaatctgaaaacgcttcaaaatcctgaaaaaaaaaaaggaaaagaaaaaacgaatcctcggagaacccgcggggaagtcactttcgtacgcttccggcctgccccgcgcccgccgccgcagcgcttggcgtccgtcggtctccgtccgtcggtccgggggtgagccgcccgcccggcccgccgtgccctccccccgctcgggccccgagccccgcgccccgcgcctgccccggcgcaccacgtgtccgtgctgcccttcgccgcccgcccggggctcgccgagtcggcgcccacaaagatttggtttccctctgccccggcggttgtaatcttaaaccgccggagcccgaggcctatatttatagagaaacgcgtgtccccgaggccgccgtgggcagcgtccggtcgcctcttaaaggatttttacccttcggaaggggattccccgtttaatttttttcctactttgattttttgaaatttggagcttcgcaccaggaccgcggagaagtgcaaagtcgcggggagggccgtattgtgcggagagccttttgtctgcggtgctgcggccgtgggagccggcccccgcctcccgtttccgtcccgtctccaagcccgccgactccagctcgtcctcgccgcgccggtgccacctgtgagccgcggcgcgggcccgggctccgaaggcgcccctttgtcctgcggcgggcccgataagaagtcctcctggcggggctcggggtggtggggggcggggagatgaacgctgcggccagcagctaccccatggcctccctgtacgtgggcgacctgcattcggacgtcaccgaggccatgctgtacgaaaagttcagccccgcggggcctgtgctgtccatccgggtctgccgcgatatgatcacccgccgctccctgggctatgcctacgtcaacttccagcagccggccgacgctgagcgggctttggacaccatgaactttgatgtgattaagggaaagccaatccgcatcatgtggtctcagagggatccctctttgagaaaatctggtgtgggaaacgtcttcatcaagaacctggacaaatctatagataacaaggcactttatgatactttttctgcttttggaaacatactgtcctgcaaggtggtgtgtgatgagaacggctctaagggttatgcctttgtccacttcgagacccaagaggctgccgacaaggccatcgagaagatgaatggcatgctcctcaatgaccgcaaagtatttgtgggcagattcaagtctcgcaaagagcgggaagctgagcttggagccaaagccaaggaattcaccaatgtttatatcaaaaactttggggaagaggtggatgatgagagtctgaaagagctattcagtcagtttggtaagaccctaagtgtcaaggtgatgagagatcccaatgggaaatccaaaggctttggctttgtgagttacgaaaaacacgaggatgccaataaggctgtggaagagatgaatggaaaagaaataagtggtaaaatcatatttgtaggccgtgcacaaaagaaagtagaacggcaggcagagttaaaacggaaatttgaacagttgaaacaggagagaattagtcgatatcagggggtgaatctctacattaagaacttggatgacactattgatgatgagaaattaaggaaagaattttctccttttggatcaattaccagtgctaaggtaatgctggaggatggaagaagcaaagggtttggcttcgtctgcttctcatctcctgaagaagcaaccaaagcagtcactgagatgaatggacgcattgtgggctccaagccactatatgttgccctggcccagaggaaggaagagagaaaggctcacctgaccaaccagtatatgcaacgagtggctggaatgagagcacttcctgccaatgccatcttaaatcagttccagcctgcagcgggtggctactttgtgccagcagtcccacaggctcagggaaggcctccatattatacacctaaccagttagcacagatgaggcctaatccacgctggcagcaaggtgggagacctcaaggcttccaaggaatgccaagtgctatacgccagtctgggcctcgtccaactcttcgccatctggctccaactgggtctgagtgcccggaccgcttggctatggactttggtggggctggtgccgcccagcaagggctgactgacagctgccagtctggaggcgttcccacagctgtgcagaacttagcgccacgcgctgctgttgctgctgctgctccccgggctgttgccccctacaaatacgcctccagtgtccgcagccctcatcctgccatacagcctctgcaggcaccccagcctgcggtccatgtgcaggggcaggagccactgactgcctccatgctggctgcagcacccccccaggaacagaagcagatgctgggagaacgcttgttcccactcatccaaacaatgcattcaaatctggctgggaagatcacgggaatgctgctggagatagacaactctgagctgctgcacatgttagagtcccccgagtctctccgctccaaggtggatgaagctgtagcagttctacaggctcatcatgccaagaaagaagctgcccagaaggtgggcgctgttgctgctgctacctcttagacaaggaaaaaccgattcaaaagccaaataaccccttatggaattcaactcaaggtttgaagacttcctagcttgtcctatggacctcaacaccaaggattacaaattgcaaatttaataggtcattttgtatcaaaaggtcaattatgaagcacctagaatttttcaattatacgaatatgttctttgggttctgctgtggcccagacagtgttaactttttttttattgtgggttttgattttttcccccagaaattggttttatttgatgtacccaagtcttacgtttcccaataaagaaaaaaaatctccataaaa

SEQ ID NO: 13122 - DNA, 15975 bp, Homo sapiens; identical to SEQ ID NO: 1228

SEQ ID NO: 13123 - DNA, 3142 bp, Homo sapiens
ctctctccgccccgggtcgctgccgcctccgccgctttcgggcttcgcagcctgaggaaaaaaagagaaaaagataaaaaaaatctgaaaacgcttcaaaatcctgaaaaaaaaaaaggaaaagaaaaaacgaatcctcggagaacccgcggggaagtcactttcgtacgcttccggcctgccccgcgcccgccgccgcagcgcttggcgtccgtcggtctccgtccgtcggtccgggggtgagccgcccgcccggcccgccgtgccctccccccgctcgggccccgagccccgcgccccgcgcctgccccggcgcaccacgtgtccgtgctgcccttcgccgcccgcccggggctcgccgagtcggcgcccacaaagatttggtttccctctgccccggcggttgtaatcttaaaccgccggagcccgaggcctatatttatagagaaacgcgtgtccccgaggccgccgtgggcagcgtccggtcgcctcttaaaggatttttacccttcggaaggggattccccgtttaatttttttcctactttgattttttgaaatttggagcttcgcaccaggaccgcggagaagtgcaaagtcgcggggagggccgtattgtgcggagagccttttgtctgcggtgctgcggccgtgggagccggcccccgcctcccgtttccgtcccgtctccaagcccgccgactccagctcgtcctcgccgcgccggtgccacctgtgagccgcggcgcgggcccgggctccgaaggcgcccctttgtcctgcggcgggcccgataagaagtcctcctggcggggctcggggtggtggggggcggggagatgaacgctgcggccagcagctaccccatggcctccctgtacgtgggcgacctgcattcggacgtcaccgaggccatgctgtacgaaaagttcagccccgcggggcctgtgctgtccatccgggtctgccgcgatatgatcacccgccgctccctgggctatgcctacgtcaacttccagcagccggccgacgctgagcgggctttggacaccatgaactttgatgtgattaagggaaagccaatccgcatcatgtggtctcagagggatccctctttgagaaaatctggtgtgggaaacgtcttcatcaagaacctggacaaatctatagataacaaggcactttatgatactttttctgcttttggaaacatactgtcctgcaaggtggtgtgtgatgagaacggctctaagggttatgcctttgtccacttcgagacccaagaggctgccgacaaggccatcgagaagatgaatggcatgctcctcaatgaccgcaaagtatttgtgggcagattcaagtctcgcaaagagcgggaagctgagcttggagccaaagccaaggaattcaccaatgtttatatcaaaaactttggggaagaggtggatgatgagagtctgaaagagctattcagtcagtttggtaagaccctaagtgtcaaggtgatgagagatcccaatgggaaatccaaaggctttggctttgtgagttacgaaaaacacgaggatgccaataaggctgtggaagagatgaatggaaaagaaataagtggtaaaatcatatttgtaggccgtgcacaaaagaaagtagaacggcaggcagagttaaaacggaaatttgaacagttgaaacaggagagaattagtcgatatcagggggtgaatctctacattaagaacttggatgacactattgatgatgagaaattaaggaaagaattttctccttttggatcaattaccagtgctaaggtaatgctggaggatggaagaagcaaagggtttggcttcgtctgcttctcatctcctgaagaagcaaccaaagcagtcactgagatgaatggacgcattgtgggctccaagccactatatgttgccctggcccagaggaaggaagagagaaaggctcacctgaccaaccagtatatgcaacgagtggctggaatgagagcacttcctgccaatgccatcttaaatcagttccagcctgcagcgggtggctactttgtgccagcagtcccacaggctcagggaaggcctccatattatacacctaaccagttagcacagatgaggcctaatccacgctggcagcaaggtgggagacctcaaggcttccaaggaatgccaagtgctatacgccagtctgggcctcgtccaactcttcgccatctggctccaactggtaatgctccggcctctcgtggcctccctactaccactcagagagtcgggtctgagtgcccggaccgcttggctatggactttggtggggctggtgccgcccagcaagggctgactgacagctgccagtctggaggcgttcccacagctgtgcagaacttagcgccacgcgctgctgttgctgctgctgctccccgggctgttgccccctacaaatacgcctccagtgtccgcagccctcatcctgccatacagcctctgcaggcaccccagcctgcggtccatgtgcaggggcaggagccactgactgcctccatgctggctgcagcacccccccaggaacagaagcagatgctgggagaacgcttgttcccactcatccaaacaatgcattcaaatctggctgggaagatcacgggaatgctgctggagatagacaactctgagctgctgcacatgttagagtcccccgagtctctccgctccaaggtggatgaagctgtagcagttctacaggctcatcatgccaagaaagaagctgcccagaaggtgggcgctgttgctgctgctacctcttagacaaggaaaaaccgattcaaaagccaaataaccccttatggaattcaactcaaggtttgaagacttcctagcttgtcctatggacctcaacaccaaggattacaaattgcaaatttaataggtcattttgtatcaaaaggtcaattatgaagcacctagaatttttcaattatacgaatatgttctttgggttctgctgtggcccagacagtgttaactttttttttattgtgggttttgattttttcccccagaaattggttttatttgatgtacccaagtcttacgtttcccaataaagaaaaaaaatctccataaaa

SEQ ID NO: 13124 - DNA, 15438 bp, Homo sapiens
tttcctactttgattttttgaaatttggagcttcgcaccaggaccgcggagaagtgcaaagtcgcggggagggccgtattgtgcggagagccttttgtctgcggtgctgcggccgtgggagccggcccccgcctcccgtttccgtcccgtctccaagcccgccgactccagctcgtcctcgccgcgccggtgccacctgtgagccgcggcgcgggcccgggctccgaaggcgcccctttgtcctgcggcgggcccgataagaagtcctcctggcggggctcggggtggtggggggcggggagatgaacgctgcggccagcagctaccccatggcctccctgtacgtgggcgacctgcattcggacgtcaccgaggccatgctgtacgaaaagttcagccccgcggggcctgtgctgtccatccgggtctgccgcgatatgatcacccgccgctccctgggctatgcctacgtcaacttccagcagccggccgacggtgagtagaagctgtgcccacacgtgcgtgggagcccggaggaccccgggagtcgtcttctggcagggccctcctgccgaggagggcggcatcacgacagcatgttgccaccgaagctgggagcagggtgcggagattgagaacgcggacctggcatcagatgactcgagtttcaatcttgtttctaccacttgctaactgggtgaccttgggctacttattagtgttgctggtagtggggttggaaaccaaggagactgtaaaacaggattagagtgaagccactggcattccactgcgtgtggtccttgtcagtggggctgggctgttagagatccttgcttgtgcccctcacaggctggccaaaaaggcgggacgtttgaaacacaattccccgcgaaagttttacattgtaaagctcctgcccgctccgccacctttactaaccttgactacctgatgttgtgctgataaaggatcagtcagggcaggcaggaagcagggggaaggtttctgtgcgttaaactttcgcagagacttaggttagtgccacaaaagctgcgtgtgccaggccacctccttggtctgtgtgtttgccactggagtggagaagtgctttactctggacaaatggtatccaggctctgtgctgtagagtgtcgtggaggtagtttagggaagcgtcacttgaaaatctggtgtcatttgtcacctcagctgtaacagtgctttgcactagtcagagcccttttatttcatctaatctgaagaaaatgggactcctgagaaggagaacgaatgcaaaaagttggaagccaagttaggactcccagcacagtgctctgccacctcagattgtggccttagcgtggagcatggagagaggtatgctgcaggcgtggcaggagggaggccagaggaaacctgatcagaggctgcacgtgactccagattaaaagggaacaactgcagagatcattactgggagaaacaagccattctatggcaaagcatctccaggtccctagttttggggtcccccctttgttttctgtctgaggcccagagttactacctgcccaggttgcggctgagaccagagaattggacatgttgagagggactaggtattgctactgtcaatccagtgtgctccaagctgagttctgtccatggccataggagcgcaaaggtagctgagtgtggtctttttaagggataatgtaccacattagctgttgtctgccttactgacttttgaacaaaagtcgtgtcacttagagatagcagaagctattggtcagtgtgtctgccaacacatacttctgcaggacttctccctgctataaataagtgcagccagatttgtcagactaagccggcttgccttgtgcagtgctgtctggaaatagacgaggagctgttgttgaagtgggctcctttactgctaattaatgaaatagtttgcgatcccagctatctatctctgatagccatcacaagcaaagtcctctttccctggactgttcctgacttggatcggtcttgtcatctccccttttcccaactaccccccacacagatgaggcccaccttctgaagggggtggggaaagttgttggaaataatgagtgaaaataaattctcccggctaatgaaacagttgagcttgtggagcggcagagttggggaattttgtcccccctttaagtgagatgttgtcctgaggcaaggagcaggttccactgctctgaccctgtctaaatcccctcatggaggaggttctgggtgatgtcaccgttaggagatgccatcatagccttaaggaaaagtggccaccagatctgggcatccttgttgcgattagtgatgagaagtgttttggctggcaggtggtgttattttttagcttttggttctttttgttgttgtttgttttgagacactgtttcactcttgctgcccaggctggagtgcaatggcgcgatctcagctcactgcaacctctgactcctgggtccaaacaattttcctgcctcagtctcctgagtagctgggattacaggcacccgccaccatgcccagctaattgtgtatttttagtagagatggggttttcaccatgttggtcaggctggtctcgaactcctgacctcaggtaatccacccgccttggcctcccaaagtgctgggattacaggagtgagccaccatacccagcccagcctttggttctttaaattgtctctggtgtacacacggacttggttgggaagctaaggaagcattccaaggtgttggatggggaagttggttgagcacccagggtagctgaagtcctagaattctacagaacttccattaaggcttcaaaaggtgggtgcagggcctgccatctgcgcactgtctacttaggcagaaggtatggtggttttatccttgtgatagtacagagaacttttccatgtgtgatcagttgtgtccattttgatgactgatgcttttttgtttaagtcaatttctgttctcagaaattgaaaataaactggactgaattctgaattcagggatagcacctttttttttttttccagatcatttgctttacaggttttgtcacttgtctccataggtggattgcagactaaatgacttgataactttgatgcaatacctcactgaaaaataaatcagataatctagtattagtttcgtaattactagctagctgcacagcttagttaccctaaacataagtttgttcattttgtaaaatgtataatttcagctgtcccacctgagtcatggtgggtggtagtctgcaaagtctcttctaagtggtaaagcttagtcaaatgtgaggtattatcactggatcttggtgtcattaaggccatttagattatctttacttgtggcccctttatccaacaagggcacagacccagaagggtgtttagacttctgtcatgaagtagagtcattagctggaacttatgcttcccttactaacagtgcaggctggaggaatctgatgcccttttattttaatagagttgccttttatcaagagtgattaccttgaaaagtcctggagtaatctgttcttaggctgttggcctgtgggagctgacgttttctctccttattgaaatgtgtttctctcttacagctgagcgggctttggacaccatgaactttgatgtgattaagggaaagccaatccgcatcatgtggtctcagagggatccctctttgagaaaatctggtgtgggaaacgtcttcatcaagaacctggacaaatctatagataacaaggcactttatgatactttttctgcttttggaaacatactgtcctgcaaggtaaacattgattaaatgattttagcagaataattaattgattcttgaaaacaagataaataccaaacagagaactatcttggaattggggaacaagatatgggaattttcaaaatgctggacatggaatcctaaaagttcccataggtaatctcagggccatacccagcgtaaccagcacacgctttcatacccttgttctttactcagcctgaaatatccttcctattctttagctttggaaagcccacgtttttcttttgggatgggggaaagtagaggaccagagaagtgtctctagtcttgaggaaacttaatcactttagaagcataaattcactctattccttctacgtatctgttctatgctgagcactttaaaacttaaacggtggtggtgtatatgtttaatgccatactacactgaaaatctgttgtggccttggaaaatgttttgttttctgcatcaccgtggtttgcacccagatctcttaaaatgtgttgttgtgttttaaagagacagagtcttgctctgtctgtcacccagggtggagtgcagtggtctagtaatagctcattgtagcttcgacctcctgggctcaagccatcctcccacctcagcctcccaagtagctggaactacaggcacgtgccaccacactcatttaatttttttcttttttgtagagacagggtctccattgtccaacgatctggctccaacgatcctcctgctttggcctcccaaagcattgggattacaggcatgagccacagcacccaattttaagtattttttgtttgtttgtttttgataaaaataaaacatttggaatagaagcatcttagtagggctacctttgtaaatggaacacttactaggcacctggtgctgtgctaggtgttagaaaaattatactggtgtacttgaccaccattggccatggatgggctagagtctcctcaggcacaagataccctgaggttctcatgtctcaggagctggccagttctgctaaagtggtccgccttgtctttgacaggtggtgtgtgatgagaacggctctaagggttatgcctttgtccacttcgagacccaagaggctgccgacaaggccatcgagaagatgaatggcatgctcctcaatgaccgcaaagtgtgagtgtcccagtccggagcaacaaccatcgcatgagccagccgtggccccacctcgctattaactggcacacacaaggcggctactggttctcggcccaagtgtggcctgctcctacctctccactccagggctggtgagtctccctgcctgagccgtggcagcccttttgactcgccaaggtgggcttcctgcccaagccatggcctgcctgccgcctctcccttaaaggcatctgtctgtgggttttgtgagcatcaacaactggggctggctggaaagcagctctaagctcactctgagtcggggtcttggccagcggcagagtggagagggccctggactgaccaggagctgtatactagcagtgtgaccttggctttcctgtgattcaggtctgtccatgggtccctcgctagtggttgatgccaaattgtccccgcggttctccattttctaacttatgactcagtgacctaatacaaggctggctccacagtaatacttggtgacaatgaaaaaatcccatccctttgcagaaaaacttcataacagaccttgttgctttgatgtggttgttactgtagaatgcagagagggggaacttaccaaagccatatggggagaagaagagacaataagtcttggctattacaagccaaaataatttttgtcctttgtgtcattcagtatgccagaggatgggttatctttataatgtctgtgtgtgcagtggttgatctacagatatcactaaaaagaaatacaaaaatgtcagtgcatggataaattttcttttaagtataacagaccaaaataaataaatttaaaaagcaaagggtgccccttcactccaacaatctcatatctaggattaaccactgttaacagtttggtttgtatccttccagaccttttctatgcatttacatagttgcacagaaatgaacattttaaaaacatggccatcaggtttcttcatgaaggcagtgtgatgtggtaggaatagccctggtctaagccaggagccctggggctggtcctcacaggatagtcctgcctttttctctttctgctggggacttggggtatctctgagcctccttggtggtggatggggatctcgtgttttaacctctcctgtcagtctttaacctgtattcctttgggtccctggacatcatgttttattcctctgggtaattactgttcttcatggtttcattttagatttgtgggcagattcaagtctcgcaaagagcgggaagctgagcttggagccaaagccaaggaattcaccaatgtttatatcaaaaactttggggaagaggtggatgatgagagtctgaaagagctattcagtcagtttggtaagttggggttccttgtctcctttcacagtctaccagacccatctgttttttcttaagagatgagggcactgctccagagatttgcttcaagtgagtttccagagggaagccttctgttcctgagctgtgctcaagatggtgttactaatagttctgtcctttggtaataggtaagaccctaagtgtcaaggtgatgagagatcccaatgggaaatccaaaggctttggctttgtgagttacgaaaaacacgaggatgccaataaggtgagtataccacaaagattgggaaaagcttttaagaggttgccccagagtatgggtagggtcttgctagcacctacctagagctgggacggtctgagtatctggtagtagatgtaccattactatactctgggatcatcttcctgggttccgcatgttaacttcatgtaggtgtttacaaagcacttggcacatacctgtcacctcagctatcagttgttgaaagaataggacagacgtttgttatgctgcaaaggtgagagaactaaagcccagtgagtgctgatttgataacagcacggcagctacttgtgggcaaagcattgtgccagaccctcaatatttatcacttaaatacccacaaaagcacctgcagaatttactggcagccggaatattatatcgccctaggctcatgtcagcacacttgtgtttatacacctgtactatttctatattatctggatcaataacccatttaaatattaacctcactttacagatgaggaagtttggatttgtgtgacagacttcagaggtggagtgaatttagtttttagtcctatagtagaaagaatattttttgggacttagacctccagaataagaccccatcgctgcaactttattttaaagacatatttttcctctctaggctgtggaagagatgaatggaaaagaaataagtggtaaaatcatatttgtaggccgtgcacaaaagaaagtagaacggcaggcagagttaaaacggaaatttgaacagttgaaacaggagagaattagtcgatatcaggtaaggtggtcttggcccagcctagcaatgggatttgctgtgaaatatttgcagaacacccctatgtttagcgggctttctttttgaggacttggagtgtgttcttcttcccattttacctaaaaagatgaggtttaaaaggatatatacctactacatatgactgattattatagaaccagaaacaagagatgggtttattcatcaagaagctctctattttggaagcctcagcctgttgcttttagccatgtaggttccttttacttaaatgagactcctttgtttggcatggcttcaagaagacccctgctggggtgggtgagtggtcaccagaacagctgtggggagaggtgacaaaaggtgagtgcactgatgatcctgtcagtttcagggcagtagtttcacaactttggacttgcatcagattcatcagcagagcttgttaaaacagatagctgggctccagccccagagtttttcttattcattgggtttggggtctggcctaagaatttcatttctttcttttttttttttttttcttgagacagtctcgctctgtcgcccaggttggagtgcagtggcacaatctcggctcactgcaaactccgcctcccgggttcgcaccattctcctgccttagcctcctgagtagctgggactacaggcacccgccaccatgcctggctaattttttgtatttttagtagagacggggtttcactgtgttagccaggatggtctcgatctcctgaccttgtgattcgcccgcctcggcctcccaaagtgctgggattacaggcgtgagccaccgcgtccggccgagaatttcatttctaacaagttcccaaagatgctggtgctcctggtctggggccacccttggggaaccactttcttagggaatatttgtgatatagaagtgtagttaacagtgatctttttccttcagggggtgaatctctacattaagaacttggatgacactattgatgatgagaaattaaggaaagaattttctccttttggatcaattaccagtgctaaggtattatactgcgatctggggattgaaagcagtggtattccattataggcttattggcatttgtcccattgaaggaatagcatttaaattatgttcatttctgaaagtagctactacgtttttctagcaaaatttctggatgcattctggagaatgacatttcattaggttaacattacactgtttcccaagcactggagtctggagaggaatttgacccagcccctccttgccaactcagagcacctgaatctttcccattccttgctgcctcgtgccggtgtggggacagatggtgctacagaatgagcagaggaaatccagacaggttgttttccatttgtcttggggcctgtctctacagctctgccacattttctccttgagaatgaaggtattttgaagattttggaggtgggcttgggaacttctaccctggtcttaaaaagagaggaaaggggagtggaaggtttttctatgtttcgtagtgtgcatcatttgcttgattttctttgataatcatatcaactaagttagcagggtaagtaggaacctcattttaaagataaggaattttagtccttgaacaagagaatgctgactacatggggatggtgtactgcttgtccttggcactttgggagcaggatggaaactggtgccatctgaacattttgagttatggccggatgcagacgccggtcttgctaaacaggtgtaccagatgccacaaaatcctttagttgatgagaagggaagccacgtgggctggtaagggcttagtggccctgccctggctcttagtggactttgctcccaacctgggaatgtggaaagcaatgttatcagttgtagtagggagttggccagaggccaactgtgggtttgcccagttcttaccctttcgtttttgctatgaccccccccttgactggccctcatcagtgtaaggagtgatcttctatccttgcttatctgcctagtagtcaagttggcatttgttaagagagcagaagagccataccttgaattgtccccattttcattatgatggtgtggcatttttattcacataccttactggcccatctcattggtagagagttatggagtgatgcacttctttacttccctatcctccacttcaggaggctctctgggccattaactaagacataaaacaatgacagtcacaccagagaagacagtgaataaccttgtctattaggaagaatgccatttgtgaatgatgaacttaatgtgggaaaagactgcctgaaccagtagacctgtggttttgtagctgtttggagtatttcttggaaattgagcctcaggaaggcaagtgagactagaatctaggctgcctatctctgagctggtcatctcattgaattaatggtggcagtcattggttacctgaacattttaggactcctgtccacacgtggtattccaaaagtgttatcctgacgttggtaagagcttgttagagtttgtccaccgaggtcttgaagcatatgagatatgaaaataaattgctcagtactactctcaagatgttttgtggttacccggagtagctatccaccaggtatcaggaaacatctttgagttcctggttttattattagccatatcatagtgtttcagaactttagcatcacctggggactcaaagaaaacacctagataccttagaggttgtgacttagttggtctggggtaaatcctgtgccagaaccctgacctagactcagtgactgcagcagaacccaggctttctggttcttctgaatagttccctccccacccagggacatccttttttttcctatttgtaggtttgttttgttttttttgttggtttggttggttggtgtttttgttttgttttgttttgttttgttttgttttgttttggagatggagtctcgctctgtcgcccaggctggagtgcagtggcgcgatctcggctcactgcaatctctgtctcccgggttgaagcggttctcctgcctcagcctcctgagtagctaggattacaggtgtgtgccaccacgcccagctgatttttgtatttttagtagagacggggttgcaccatgttggtcaggatggtcttgaattcctgacctcgtgatccacccacctcggcctcccaaagtgctgggattacaggcatgagccactgcgcctggccctttgtttttttgagatgaggtctcactacattgctcaagctggtctcaacctcctgagctcaagcagccctcccacctcagccttccaaagtgctgggattacaggcacaagccatcacacccagccagggacaccttatttcttaagtagctggtctcattttgtaggtaatgctggaggatggaagaagcaaagggtttggcttcgtctgcttctcatctcctgaagaagcaaccaaagcagtcactgagatgaatggacgcattgtgggctccaagccactatatgttgccctggcccagaggaaggaagagagaaaggctcacctgaccaaccagtatatgcaacgagtggctggaatgagagcacttcctgccaatgccatcttaaatcagttccagcctgcagcgggtggctactttgtgccagcagtcccacaggtgggtgtgctgtttggtcacagctcttgggaacctgccggctggcagtattctgcagtggttggggagagggatttttcgttattagagttctagaatgtcacaataaggacccttcaagtaaaaatgaaggacttacccatggtcacaaacacacacccacagtggcagtggtagcataaaacagtccccattagctgacccctcagctcttgaatagaaagaacatttaaataattagcttaggtcctggttagtgagatgagatgagatacttctctaggatgggttcagtccttaagggggtgtttgggtattcttctgtcttacaggctcagggaaggcctccatattatacacctaaccagttagcacagatgaggcctaatccacgctggcagcaaggtgggagacctcaaggtaggtggtggggaacagtaattgacagcccaggatatacctgtcctggtctcccctgcctttccttcttccccactctgaggcacagcctaggttctggtccacatcacttctcaatgatgtgcaatttttctcttcaccaggcttccaaggaatgccaagtgctatacgccagtctgggcctcgtccaactcttcgccatctggctccaactggtaatgctccggcctctcgtggcctccctactaccactcagagagtcggtgagcaaactggcctttagaagtgtggcctggggaggagggagtcaggatgactaggctctgtcctgggttggtcagtttgttgggctcgaatttatcgagtcctggttctgtaatcttagctgtgtgcttaggtggccacttcaggagcagagaaacagtatgagttctaggtgtgtcagttgcttttaacattctttgctcatcggtgacctatgtgaaaaaggttagttgtagaagtttgctagctggatgaccacagaggcagcttgttcttttgggtggggtgaggaatacaaggaaacagtgtatacagaatatgtcttgtattccaagatgtggaaagagttgtatgttatcctttggctcatcctcgaaagtagtagtggccccctgtgcaatgtgttgcgtaaacgtgctttgaaatttctccttccgtgggacgtggccagttggacatctgccgccaacactgatgtgcatttgctggtctgttgtagggtctgagtgcccggaccgcttggctatggactttggtggggctggtgccgcccagcaagggctgactgacagctgccagtctggaggtggtattggatgcacacagaagggggaaagatgggatttgacgggtctttgcccagactgatgggctttaattgtatttgttctttccctaaggcgttcccacagctgtgcagaacttagcgccacgcgctgctgttgctgctgctgctccccgggctgttgccccctacaaatacgcctccagtgtccgcagccctcatcctgccatacagcctctgcaggtgaggttcaccagacagaatgcttaaaaggatttcccccatttccacttgatgtaaaagaagctgtgcttttgattccttcaacaggtattaaatgcctgctctgtgttatgacgctatgttctgattcactgtccctgcccttcaggggctcactagtgggaaagaaggggcttaaaagtgctctgcctgatgccagttcactcagaaatgcctcagagcgggcagccagtgcttcctcttctgtttgtacgaaataatgtgctcattcagctgtttgagcctccaggtcacttccgcatccaatgacctattggatccttggctgctctgcaagatgattggtacattaatgcaggaaataacttcaacttacagatcggatgttcagcttcaaagatgtaaagtgtgtgtaggaggtgaaggggttgaacctagagcttagattttctaagctgtaacttgctgtctctagacctgtgctctagatgcaactagtttgtttcagagcctaatagcaatttgctgtggaggtgtcaccctaagccttcaggcccataagctgcttaggagattactctttaactgtcctgtctcatactctctaagttggggatttcctagaacttgatgctatgtaaaataccttttctttgcaaggctttgactagcattgacgttgcatgttgaccgtttttaagcatttgatacaaaaacatttggtagaattaaggtgatgtggaatgtaattataaatgtgttgatatttactccctttgatccaatctgcactgagatttaccctaaaggaaaactaattttcaggaaaaggttatatacaagtgtttacccttatttatatcaaggcttttcattcttgagtaactttgggtgtattaaggaaatgtcagaaaatgcttgcctagcactataggtttgttttattatttacgtttcacttcgctttctgatagcatgccattttcattgtaattggttgtgtttatgtccataccactctgttcctcaacacacccctcaatccttcaaggactgaaattagttcctttagagcaaggacagccacctcctctcctctttcacatagtcagatgttcagatattgaacaggcactcaaccaccatcaggtgttgtcctttcctcagtgctaacccactgcctttcctggttcccaggcaccccagcctgcggtccatgtgcaggggcaggagccactgactgcctccatgctggctgcagcacccccccaggaacagaagcagatgctgggtgagtgacccacttgcttgcagaagaagagggtcccagagcctgatgccagctaggacaccagtgtccattgtttactgggatttgatttgtttttttattaactatcctccccataggagaacgcttgttcccactcatccaaacaatgcattcaaatctggctgggaagatcacgggaatgctgctggagatagacaactctgagctgctgcacatgttagagtcccccgagtctctccgctccaaggtgagctggggctcagaccctgcagcttcagttctcagcttgggaagactgggggcaaacttggatgcccaggtgcagcagaaagtgggatctgctgcccccaggacccctctcgtcatgccttgactgtgactggaggctgcagtgggtatttgggaaagtagttagcaccagaagcctagggatcatctgtacagttggctttggtccaccactaggtctgggcactggggaggggtggagtagctctcctagattcactgaccacctgaagatttctcgcaggtggatgaagctgtagcagttctacaggctcatcatgccaagaaagaagctgcccagaaggtgggcgctgttgctgctgctacctcttagacaaggaaaaaccgtatgtgtggctattttcatttttgttcctatgagcattgttcctatgagcattgtctttgtggtttgacctgaggttgtatatatgctcactgcttagctctgggaatacaataagtacagttagttacacggagtgtgttgcaggtgacttcttatcatgaggactgtggactttgtctgcaggagcttgagtgaataataaaactagtactggttgatggttgtaggtgtctccagatagggaaagaagagacagtaaaataagctaaggaaaaagcacatggtaaggaccagagctggtgtgttgggagggttgacttggcatagtcatgaccctcttgtcaagggcctcaggagccttgtcatctagtggtaaagaccagagatgctgctaaatgttgtacagtacacaggaggacagacccaacagaatgtccaaagtgtcaatagcactgaggttgagaaactctcttctagaataccttcctttatccactatatgttaatgaatctaaattatttgattatgcatttatttgtgttggtgcttttctttacaggattcaaaagccaaataaccccttatggaattcaactcaaggtttgaagacttcctagcttgtcctatggacctcaacaccaaggattacaaattgcaaatttaataggtcattttgtatcaaaaggtcaattatgaagcacctagaatttttcaattatacgaatatgttctttgggttctgctgtggcccagacagtgttaactttttttttattgtgggttttgattttttcccccagaaattggttttatttgatgtacccaagtcttacgtttcccaataaagaaaaaaaatctccataaaa

SEQ ID NO: 13125 - DNA, 2470 bp, Homo sapiens
tttcctactttgattttttgaaatttggagcttcgcaccaggaccgcggagaagtgcaaagtcgcggggagggccgtattgtgcggagagccttttgtctgcggtgctgcggccgtgggagccggcccccgcctcccgtttccgtcccgtctccaagcccgccgactccagctcgtcctcgccgcgccggtgccacctgtgagccgcggcgcgggcccgggctccgaaggcgcccctttgtcctgcggcgggcccgataagaagtcctcctggcggggctcggggtggtggggggcggggagatgaacgctgcggccagcagctaccccatggcctccctgtacgtgggcgacctgcattcggacgtcaccgaggccatgctgtacgaaaagttcagccccgcggggcctgtgctgtccatccgggtctgccgcgatatgatcacccgccgctccctgggctatgcctacgtcaacttccagcagccggccgacgctgagcgggctttggacaccatgaactttgatgtgattaagggaaagccaatccgcatcatgtggtctcagagggatccctctttgagaaaatctggtgtgggaaacgtcttcatcaagaacctggacaaatctatagataacaaggcactttatgatactttttctgcttttggaaacatactgtcctgcaaggtggtgtgtgatgagaacggctctaagggttatgcctttgtccacttcgagacccaagaggctgccgacaaggccatcgagaagatgaatggcatgctcctcaatgaccgcaaagtatttgtgggcagattcaagtctcgcaaagagcgggaagctgagcttggagccaaagccaaggaattcaccaatgtttatatcaaaaactttggggaagaggtggatgatgagagtctgaaagagctattcagtcagtttggtaagaccctaagtgtcaaggtgatgagagatcccaatgggaaatccaaaggctttggctttgtgagttacgaaaaacacgaggatgccaataaggctgtggaagagatgaatggaaaagaaataagtggtaaaatcatatttgtaggccgtgcacaaaagaaagtagaacggcaggcagagttaaaacggaaatttgaacagttgaaacaggagagaattagtcgatatcagggggtgaatctctacattaagaacttggatgacactattgatgatgagaaattaaggaaagaattttctccttttggatcaattaccagtgctaaggtaatgctggaggatggaagaagcaaagggtttggcttcgtctgcttctcatctcctgaagaagcaaccaaagcagtcactgagatgaatggacgcattgtgggctccaagccactatatgttgccctggcccagaggaaggaagagagaaaggctcacctgaccaaccagtatatgcaacgagtggctggaatgagagcacttcctgccaatgccatcttaaatcagttccagcctgcagcgggtggctactttgtgccagcagtcccacaggctcagggaaggcctccatattatacacctaaccagttagcacagatgaggcctaatccacgctggcagcaaggtgggagacctcaaggcttccaaggaatgccaagtgctatacgccagtctgggcctcgtccaactcttcgccatctggctccaactggcgttcccacagctgtgcagaacttagcgccacgcgctgctgttgctgctgctgctccccgggctgttgccccctacaaatacgcctccagtgtccgcagccctcatcctgccatacagcctctgcaggcaccccagcctgcggtccatgtgcaggggcaggagccactgactgcctccatgctggctgcagcacccccccaggaacagaagcagatgctgggagaacgcttgttcccactcatccaaacaatgcattcaaatctggctgggaagatcacgggaatgctgctggagatagacaactctgagctgctgcacatgttagagtcccccgagtctctccgctccaaggtggatgaagctgtagcagttctacaggctcatcatgccaagaaagaagctgcccagaaggtgggcgctgttgctgctgctacctcttagacaaggaaaaaccgattcaaaagccaaataaccccttatggaattcaactcaaggtttgaagacttcctagcttgtcctatggacctcaacaccaaggattacaaattgcaaatttaataggtcattttgtatcaaaaggtcaattatgaagcacctagaatttttcaattatacgaatatgttctttgggttctgctgtggcccagacagtgttaactttttttttattgtgggttttgattttttcccccagaaattggttttatttgatgtacccaagtcttacgtttcccaataaagaaaaaaaatctccataaaa

SEQ ID NO: 13126 - DNA, 10798 bp, Homo sapiens
gaaacgtcttcatcaagaacctggacaaatctatagataacaaggcactttatgatactttttctgcttttggaaacatactgtcctgcaaggtaaacattgattaaatgattttagcagaataattaattgattcttgaaaacaagataaataccaaacagagaactatcttggaattggggaacaagatatgggaattttcaaaatgctggacatggaatcctaaaagttcccataggtaatctcagggccatacccagcgtaaccagcacacgctttcatacccttgttctttactcagcctgaaatatccttcctattctttagctttggaaagcccacgtttttcttttgggatgggggaaagtagaggaccagagaagtgtctctagtcttgaggaaacttaatcactttagaagcataaattcactctattccttctacgtatctgttctatgctgagcactttaaaacttaaacggtggtggtgtatatgtttaatgccatactacactgaaaatctgttgtggccttggaaaatgttttgttttctgcatcaccgtggtttgcacccagatctcttaaaatgtgttgttgtgttttaaagagacagagtcttgctctgtctgtcacccagggtggagtgcagtggtctagtaatagctcattgtagcttcgacctcctgggctcaagccatcctcccacctcagcctcccaagtagctggaactacaggcacgtgccaccacactcatttaatttttttcttttttgtagagacagggtctccattgtccaacgatctggctccaacgatcctcctgctttggcctcccaaagcattgggattacaggcatgagccacagcacccaattttaagtattttttgtttgtttgtttttgataaaaataaaacatttggaatagaagcatcttagtagggctacctttgtaaatggaacacttactaggcacctggtgctgtgctaggtgttagaaaaattatactggtgtacttgaccaccattggccatggatgggctagagtctcctcaggcacaagataccctgaggttctcatgtctcaggagctggccagttctgctaaagtggtccgccttgtctttgacaggtggtgtgtgatgagaacggctctaagggttatgcctttgtccacttcgagacccaagaggctgccgacaaggccatcgagaagatgaatggcatgctcctcaatgaccgcaaagtgtgagtgtcccagtccggagcaacaaccatcgcatgagccagccgtggccccacctcgctattaactggcacacacaaggcggctactggttctcggcccaagtgtggcctgctcctacctctccactccagggctggtgagtctccctgcctgagccgtggcagcccttttgactcgccaaggtgggcttcctgcccaagccatggcctgcctgccgcctctcccttaaaggcatctgtctgtgggttttgtgagcatcaacaactggggctggctggaaagcagctctaagctcactctgagtcggggtcttggccagcggcagagtggagagggccctggactgaccaggagctgtatactagcagtgtgaccttggctttcctgtgattcaggtctgtccatgggtccctcgctagtggttgatgccaaattgtccccgcggttctccattttctaacttatgactcagtgacctaatacaaggctggctccacagtaatacttggtgacaatgaaaaaatcccatccctttgcagaaaaacttcataacagaccttgttgctttgatgtggttgttactgtagaatgcagagagggggaacttaccaaagccatatggggagaagaagagacaataagtcttggctattacaagccaaaataatttttgtcctttgtgtcattcagtatgccagaggatgggttatctttataatgtctgtgtgtgcagtggttgatctacagatatcactaaaaagaaatacaaaaatgtcagtgcatggataaattttcttttaagtataacagaccaaaataaataaatttaaaaagcaaagggtgccccttcactccaacaatctcatatctaggattaaccactgttaacagtttggtttgtatccttccagaccttttctatgcatttacatagttgcacagaaatgaacattttaaaaacatggccatcaggtttcttcatgaaggcagtgtgatgtggtaggaatagccctggtctaagccaggagccctggggctggtcctcacaggatagtcctgcctttttctctttctgctggggacttggggtatctctgagcctccttggtggtggatggggatctcgtgttttaacctctcctgtcagtctttaacctgtattcctttgggtccctggacatcatgttttattcctctgggtaattactgttcttcatggtttcattttagatttgtgggcagattcaagtctcgcaaagagcgggaagctgagcttggagccaaagccaaggaattcaccaatgtttatatcaaaaactttggggaagaggtggatgatgagagtctgaaagagctattcagtcagtttggtaagttggggttccttgtctcctttcacagtctaccagacccatctgttttttcttaagagatgagggcactgctccagagatttgcttcaagtgagtttccagagggaagccttctgttcctgagctgtgctcaagatggtgttactaatagttctgtcctttggtaataggtaagaccctaagtgtcaaggtgatgagagatcccaatgggaaatccaaaggctttggctttgtgagttacgaaaaacacgaggatgccaataaggtgagtataccacaaagattgggaaaagcttttaagaggttgccccagagtatgggtagggtcttgctagcacctacctagagctgggacggtctgagtatctggtagtagatgtaccattactatactctgggatcatcttcctgggttccgcatgttaacttcatgtaggtgtttacaaagcacttggcacatacctgtcacctcagctatcagttgttgaaagaataggacagacgtttgttatgctgcaaaggtgagagaactaaagcccagtgagtgctgatttgataacagcacggcagctacttgtgggcaaagcattgtgccagaccctcaatatttatcacttaaatacccacaaaagcacctgcagaatttactggcagccggaatattatatcgccctaggctcatgtcagcacacttgtgtttatacacctgtactatttctatattatctggatcaataacccatttaaatattaacctcactttacagatgaggaagtttggatttgtgtgacagacttcagaggtggagtgaatttagtttttagtcctatagtagaaagaatattttttgggacttagacctccagaataagaccccatcgctgcaactttattttaaagacatatttttcctctctaggctgtggaagagatgaatggaaaagaaataagtggtaaaatcatatttgtaggccgtgcacaaaagaaagtagaacggcaggcagagttaaaacggaaatttgaacagttgaaacaggagagaattagtcgatatcaggtaaggtggtcttggcccagcctagcaatgggatttgctgtgaaatatttgcagaacacccctatgtttagcgggctttctttttgaggacttggagtgtgttcttcttcccattttacctaaaaagatgaggtttaaaaggatatatacctactacatatgactgattattatagaaccagaaacaagagatgggtttattcatcaagaagctctctattttggaagcctcagcctgttgcttttagccatgtaggttccttttacttaaatgagactcctttgtttggcatggcttcaagaagacccctgctggggtgggtgagtggtcaccagaacagctgtggggagaggtgacaaaaggtgagtgcactgatgatcctgtcagtttcagggcagtagtttcacaactttggacttgcatcagattcatcagcagagcttgttaaaacagatagctgggctccagccccagagtttttcttattcattgggtttggggtctggcctaagaatttcatttctttcttttttttttttttttcttgagacagtctcgctctgtcgcccaggttggagtgcagtggcacaatctcggctcactgcaaactccgcctcccgggttcgcaccattctcctgccttagcctcctgagtagctgggactacaggcacccgccaccatgcctggctaattttttgtatttttagtagagacggggtttcactgtgttagccaggatggtctcgatctcctgaccttgtgattcgcccgcctcggcctcccaaagtgctgggattacaggcgtgagccaccgcgtccggccgagaatttcatttctaacaagttcccaaagatgctggtgctcctggtctggggccacccttggggaaccactttcttagggaatatttgtgatatagaagtgtagttaacagtgatctttttccttcagggggtgaatctctacattaagaacttggatgacactattgatgatgagaaattaaggaaagaattttctccttttggatcaattaccagtgctaaggtattatactgcgatctggggattgaaagcagtggtattccattataggcttattggcatttgtcccattgaaggaatagcatttaaattatgttcatttctgaaagtagctactacgtttttctagcaaaatttctggatgcattctggagaatgacatttcattaggttaacattacactgtttcccaagcactggagtctggagaggaatttgacccagcccctccttgccaactcagagcacctgaatctttcccattccttgctgcctcgtgccggtgtggggacagatggtgctacagaatgagcagaggaaatccagacaggttgttttccatttgtcttggggcctgtctctacagctctgccacattttctccttgagaatgaaggtattttgaagattttggaggtgggcttgggaacttctaccctggtcttaaaaagagaggaaaggggagtggaaggtttttctatgtttcgtagtgtgcatcatttgcttgattttctttgataatcatatcaactaagttagcagggtaagtaggaacctcattttaaagataaggaattttagtccttgaacaagagaatgctgactacatggggatggtgtactgcttgtccttggcactttgggagcaggatggaaactggtgccatctgaacattttgagttatggccggatgcagacgccggtcttgctaaacaggtgtaccagatgccacaaaatcctttagttgatgagaagggaagccacgtgggctggtaagggcttagtggccctgccctggctcttagtggactttgctcccaacctgggaatgtggaaagcaatgttatcagttgtagtagggagttggccagaggccaactgtgggtttgcccagttcttaccctttcgtttttgctatgaccccccccttgactggccctcatcagtgtaaggagtgatcttctatccttgcttatctgcctagtagtcaagttggcatttgttaagagagcagaagagccataccttgaattgtccccattttcattatgatggtgtggcatttttattcacataccttactggcccatctcattggtagagagttatggagtgatgcacttctttacttccctatcctccacttcaggaggctctctgggccattaactaagacataaaacaatgacagtcacaccagagaagacagtgaataaccttgtctattaggaagaatgccatttgtgaatgatgaacttaatgtgggaaaagactgcctgaaccagtagacctgtggttttgtagctgtttggagtatttcttggaaattgagcctcaggaaggcaagtgagactagaatctaggctgcctatctctgagctggtcatctcattgaattaatggtggcagtcattggttacctgaacattttaggactcctgtccacacgtggtattccaaaagtgttatcctgacgttggtaagagcttgttagagtttgtccaccgaggtcttgaagcatatgagatatgaaaataaattgctcagtactactctcaagatgttttgtggttacccggagtagctatccaccaggtatcaggaaacatctttgagttcctggttttattattagccatatcatagtgtttcagaactttagcatcacctggggactcaaagaaaacacctagataccttagaggttgtgacttagttggtctggggtaaatcctgtgccagaaccctgacctagactcagtgactgcagcagaacccaggctttctggttcttctgaatagttccctccccacccagggacatccttttttttcctatttgtaggtttgttttgttttttttgttggtttggttggttggtgtttttgttttgttttgttttgttttgttttgttttgttttggagatggagtctcgctctgtcgcccaggctggagtgcagtggcgcgatctcggctcactgcaatctctgtctcccgggttgaagcggttctcctgcctcagcctcctgagtagctaggattacaggtgtgtgccaccacgcccagctgatttttgtatttttagtagagacggggttgcaccatgttggtcaggatggtcttgaattcctgacctcgtgatccacccacctcggcctcccaaagtgctgggattacaggcatgagccactgcgcctggccctttgtttttttgagatgaggtctcactacattgctcaagctggtctcaacctcctgagctcaagcagccctcccacctcagccttccaaagtgctgggattacaggcacaagccatcacacccagccagggacaccttatttcttaagtagctggtctcattttgtaggtaatgctggaggatggaagaagcaaagggtttggcttcgtctgcttctcatctcctgaagaagcaaccaaagcagtcactgagatgaatggacgcattgtgggctccaagccactatatgttgccctggcccagaggaaggaagagagaaaggctcacctgaccaaccagtatatgcaacgagtggctggaatgagagcacttcctgccaatgccatcttaaatcagttccagcctgcagcgggtggctactttgtgccagcagtcccacaggtgggtgtgctgtttggtcacagctcttgggaacctgccggctggcagtattctgcagtggttggggagagggatttttcgttattagagttctagaatgtcacaataaggacccttcaagtaaaaatgaaggacttacccatggtcacaaacacacacccacagtggcagtggtagcataaaacagtccccattagctgacccctcagctcttgaatagaaagaacatttaaataattagcttaggtcctggttagtgagatgagatgagatacttctctaggatgggttcagtccttaagggggtgtttgggtattcttctgtcttacaggctcagggaaggcctccatattatacacctaaccagttagcacagatgaggcctaatccacgctggcagcaaggtgggagacctcaaggtaggtggtggggaacagtaattgacagcccaggatatacctgtcctggtctcccctgcctttccttcttccccactctgaggcacagcctaggttctggtccacatcacttctcaatgatgtgcaatttttctcttcaccaggcttccaaggaatgccaagtgctatacgccagtctgggcctcgtccaactcttcgccatctggctccaactggtaatgctccggcctctcgtggcctccctactaccactcagagagtcggtgagcaaactggcctttagaagtgtggcctggggaggagggagtcaggatgactaggctctgtcctgggttggtcagtttgttgggctcgaatttatcgagtcctggttctgtaatcttagctgtgtgcttaggtggccacttcaggagcagagaaacagtatgagttctaggtgtgtcagttgcttttaacattctttgctcatcggtgacctatgtgaaaaaggttagttgtagaagtttgctagctggatgaccacagaggcagcttgttcttttgggtggggtgaggaatacaaggaaacagtgtatacagaatatgtcttgtattccaagatgtggaaagagttgtatgttatcctttggctcatcctcgaaagtagtagtggccccctgtgcaatgtgttgcgtaaacgtgctttgaaatttctccttccgtgggacgtggccagttggacatctgccgccaacactgatgtgcatttgctggtctgttgtagggtctgagtgcccggaccgcttggctatggactttggtggggctggtgccgcccagcaagggctgactgacagctgccagtctggaggtggtattggatgcacacagaagggggaaagatgggatttgacgggtctttgcccagactgatgggctttaattgtatttgttctttccctaaggcgttcccacagctgtgcagaacttagcgccacgcgctgctgttgctgctgctgctccccgggctgttgccccctacaaatacgcctccagtgtccgcagccctcatcctgccatacagcctctgcaggtgaggttcaccagacagaatgcttaaaaggatttcccccatttccacttgatgtaaaagaagctgtgcttttgattccttcaacaggtattaaatgcctgctctgtgttatgacgctatgttctgattcactgtccctgcccttcaggggctcactagtgggaaagaaggggcttaaaagtgctctgcctgatgccagttcactcagaaatgcctcagagcgggcagccagtgcttcctcttctgtttgtacgaaataatgtgctcattcagctgtttgagcctccaggtcacttccgcatccaatgacctattggatccttggctgctctgcaagatgattggtacattaatgcaggaaataacttcaacttacagatcggatgttcagcttcaaagatgtaaagtgtgtgtaggaggtgaaggggttgaacctagagcttagattttctaagctgtaacttgctgtctctagacctgtgctctagatgcaactagtttgtttcagagcctaatagcaatttgctgtggaggtgtcaccctaagccttcaggcccataagctgcttaggagattactctttaactgtcctgtctcatactctctaagttggggatttcctagaacttgatgctatgtaaaataccttttctttgcaaggctttgactagcattgacgttgcatgttgaccgtttttaagcatttgatacaaaaacatttggtagaattaaggtgatgtggaatgtaattataaatgtgttgatatttactccctttgatccaatctgcactgagatttaccctaaaggaaaactaattttcaggaaaaggttatatacaagtgtttacccttatttatatcaaggcttttcattcttgagtaactttgggtgtattaaggaaatgtcagaaaatgcttgcctagcactataggtttgttttattatttacgtttcacttcgctttctgatagcatgccattttcattgtaattggttgtgtttatgtccataccactctgttcctcaacacacccctcaatccttcaaggactgaaattagttcctttagagcaaggacagccacctcctctcctctttcacatagtcagatgttcagatattgaacaggcactcaaccaccatcaggtgttgtcctttcctcagtgctaacccactgcctttcctggttcccaggcaccccagcctgcggtccatgtgcaggggcaggagccactgactgcctccatgctggctgcagcacccccccaggaacagaagcagatgctgggtgagtgacccacttgcttgcagaagaagagggtcccagagcctgatgccagctaggacaccagtgtccattgtttactgggatttgatttgtttttttattaactatcctccccataggagaacgcttgttcccactcatccaaacaatgcattcaaatctggctgggaagatcacgggaatgctgctggagatagacaactctgagctgctgcacatgttagagtcccccgagtctctccgctccaaggtgagctggggctcagaccctgcagcttcagttctcagcttgggaagactgggggcaaacttggatgcccaggtgcagcagaaagtgggatctgctgcccccaggacccctctcgtcatgccttgactgtgactggaggctgcagtgggtatttgggaaagtagttagcaccagaagcctagggatcatctgtacagttggctttggtccaccactaggtctgggcactggggaggggtggagtagctctcctagattcactgaccacctgaagatttctcgcaggtggatgaagctgtagcagttctacaggctcatcatgccaagaaagaagctgcccagaaggtgggcgctgttgctgctgctacctcttagacaaggaaaaa

SEQ ID NO: 13127 - DNA, 1663 bp, Homo sapiens
gaaacgtcttcatcaagaacctggacaaatctatagataacaaggcactttatgatactttttctgcttttggaaacatactgtcctgcaaggtggtgtgtgatgagaacggctctaagggttatgcctttgtccacttcgagacccaagaggctgccgacaaggccatcgagaagatgaatggcatgctcctcaatgaccgcaaagtatttgtgggcagattcaagtctcgcaaagagcgggaagctgagcttggagccaaagccaaggaattcaccaatgtttatatcaaaaactttggggaagaggtggatgatgagagtctgaaagagctattcagtcagtttggtaagaccctaagtgtcaaggtgatgagagatcccaatgggaaatccaaaggctttggctttgtgagttacgaaaaacacgaggatgccaataaggctgtggaagagatgaatggaaaagaaataagtggtaaaatcatatttgtaggccgtgcacaaaagaaagtagaacggcaggcagagttaaaacggaaatttgaacagttgaaacaggagagaattagtcgatatcagggggtgaatctctacattaagaacttggatgacactattgatgatgagaaattaaggaaagaattttctccttttggatcaattaccagtgctaaggtaatgctggaggatggaagaagcaaagggtttggcttcgtctgcttctcatctcctgaagaagcaaccaaagcagtcactgagatgaatggacgcattgtgggctccaagccactatatgttgccctggcccagaggaaggaagagagaaaggctcacctgaccaaccagtatatgcaacgagtggctggaatgagagcacttcctgccaatgccatcttaaatcagttccagcctgcagcgggtggctactttgtgccagcagtcccacaggctcagggaaggcctccatattatacacctaaccagttagcacagatgaggcctaatccacgctggcagcaaggtgggagacctcaaggcttccaaggaatgccaagtgctatacgccagtctgggcctcgtccaactcttcgccatctggctccaactggtaatgctccggcctctcgtggcctccctactaccactcagagagtcgggtctgagtgcccggaccgcttggctatggactttggtggggctggtgccgcccagcaagggctgactgacagctgccagtctggaggcgttcccacagctgtgcagaacttagcgccacgcgctgctgttgctgctgctgctccccgggctgttgccccctacaaatacgcctccagtgtccgcagccctcatcctgccatacagcctctgcagccactgactgcctccatgctggctgcagcacccccccaggaacagaagcagatgctgggagaacgcttgttcccactcatccaaacaatgcattcaaatctggctgggaagatcacgggaatgctgctggagatagacaactctgagctgctgcacatgttagagtcccccgagtctctccgctccaaggtggatgaagctgtagcagttctacaggctcatcatgccaagaaagaagctgcccagaaggtgggcgctgttgctgctgctacctcttagacaaggaaaaa

SEQ ID NO: 13128 - DNA, 3676 bp, Homo sapiens
ttcgccatctggctccaactggtaatgctccggcctctcgtggcctccctactaccactcagagagtcggtgagcaaactggcctttagaagtgtggcctggggaggagggagtcaggatgactaggctctgtcctgggttggtcagtttgttgggctcgaatttatcgagtcctggttctgtaatcttagctgtgtgcttaggtggccacttcaggagcagagaaacagtatgagttctaggtgtgtcagttgcttttaacattctttgctcatcggtgacctatgtgaaaaaggttagttgtagaagtttgctagctggatgaccacagaggcagcttgttcttttgggtggggtgaggaatacaaggaaacagtgtatacagaatatgtcttgtattccaagatgtggaaagagttgtatgttatcctttggctcatcctcgaaagtagtagtggccccctgtgcaatgtgttgcgtaaacgtgctttgaaatttctccttccgtgggacgtggccagttggacatctgccgccaacactgatgtgcatttgctggtctgttgtagggtctgagtgcccggaccgcttggctatggactttggtggggctggtgccgcccagcaagggctgactgacagctgccagtctggaggtggtattggatgcacacagaagggggaaagatgggatttgacgggtctttgcccagactgatgggctttaattgtatttgttctttccctaaggcgttcccacagctgtgcagaacttagcgccacgcgctgctgttgctgctgctgctccccgggctgttgccccctacaaatacgcctccagtgtccgcagccctcatcctgccatacagcctctgcaggtgaggttcaccagacagaatgcttaaaaggatttcccccatttccacttgatgtaaaagaagctgtgcttttgattccttcaacaggtattaaatgcctgctctgtgttatgacgctatgttctgattcactgtccctgcccttcaggggctcactagtgggaaagaaggggcttaaaagtgctctgcctgatgccagttcactcagaaatgcctcagagcgggcagccagtgcttcctcttctgtttgtacgaaataatgtgctcattcagctgtttgagcctccaggtcacttccgcatccaatgacctattggatccttggctgctctgcaagatgattggtacattaatgcaggaaataacttcaacttacagatcggatgttcagcttcaaagatgtaaagtgtgtgtaggaggtgaaggggttgaacctagagcttagattttctaagctgtaacttgctgtctctagacctgtgctctagatgcaactagtttgtttcagagcctaatagcaatttgctgtggaggtgtcaccctaagccttcaggcccataagctgcttaggagattactctttaactgtcctgtctcatactctctaagttggggatttcctagaacttgatgctatgtaaaataccttttctttgcaaggctttgactagcattgacgttgcatgttgaccgtttttaagcatttgatacaaaaacatttggtagaattaaggtgatgtggaatgtaattataaatgtgttgatatttactccctttgatccaatctgcactgagatttaccctaaaggaaaactaattttcaggaaaaggttatatacaagtgtttacccttatttatatcaaggcttttcattcttgagtaactttgggtgtattaaggaaatgtcagaaaatgcttgcctagcactataggtttgttttattatttacgtttcacttcgctttctgatagcatgccattttcattgtaattggttgtgtttatgtccataccactctgttcctcaacacacccctcaatccttcaaggactgaaattagttcctttagagcaaggacagccacctcctctcctctttcacatagtcagatgttcagatattgaacaggcactcaaccaccatcaggtgttgtcctttcctcagtgctaacccactgcctttcctggttcccaggcaccccagcctgcggtccatgtgcaggggcaggagccactgactgcctccatgctggctgcagcacccccccaggaacagaagcagatgctgggtgagtgacccacttgcttgcagaagaagagggtcccagagcctgatgccagctaggacaccagtgtccattgtttactgggatttgatttgtttttttattaactatcctccccataggagaacgcttgttcccactcatccaaacaatgcattcaaatctggctgggaagatcacgggaatgctgctggagatagacaactctgagctgctgcacatgttagagtcccccgagtctctccgctccaaggtgagctggggctcagaccctgcagcttcagttctcagcttgggaagactgggggcaaacttggatgcccaggtgcagcagaaagtgggatctgctgcccccaggacccctctcgtcatgccttgactgtgactggaggctgcagtgggtatttgggaaagtagttagcaccagaagcctagggatcatctgtacagttggctttggtccaccactaggtctgggcactggggaggggtggagtagctctcctagattcactgaccacctgaagatttctcgcaggtggatgaagctgtagcagttctacaggctcatcatgccaagaaagaagctgcccagaaggtgggcgctgttgctgctgctacctcttagacaaggaaaaaccgtatgtgtggctattttcatttttgttcctatgagcattgttcctatgagcattgtctttgtggtttgacctgaggttgtatatatgctcactgcttagctctgggaatacaataagtacagttagttacacggagtgtgttgcaggtgacttcttatcatgaggactgtggactttgtctgcaggagcttgagtgaataataaaactagtactggttgatggttgtaggtgtctccagatagggaaagaagagacagtaaaataagctaaggaaaaagcacatggtaaggaccagagctggtgtgttgggagggttgacttggcatagtcatgaccctcttgtcaagggcctcaggagccttgtcatctagtggtaaagaccagagatgctgctaaatgttgtacagtacacaggaggacagacccaacagaatgtccaaagtgtcaatagcactgaggttgagaaactctcttctagaataccttcctttatccactatatgttaatgaatctaaattatttgattatgcatttatttgtgttggtgcttttctttacaggattcaaaagccaaataaccccttatggaattcaactcaaggtttgaagacttcctagcttgtcctatggacctcaacaccaaggattacaaattgcaaatttaataggtcattttgtatcaaaaggtcaattatgaagcacctagaatttttcaattatacgaatatgttctttgggttctgctgtggcccagacagtgttaactttttttttattgtgggttttgattttttcccccagaaattggttttatttgatgtacccaagtcttacgtttcccaataaagaaaaaaaatctccataaaa

SEQ ID NO: 13129 - DNA, 876 bp, Homo sapiens
ttcgccatctggctccaactggtaatgctccggcctctcgtggcctccctactaccactcagagagtcgggtctgagtgcccggaccgcttggctatggactttggtggggctggtgccgcccagcaagggctgactgacagctgccagtctggaggcgttcccacagctgtgcagaacttagcgccacgcgctgctgttgctgctgctgctccccgggctgttgccccctacaaatacgcctccagtgtccgcagccctcatcctgccatacagcctctgcaggcaccccagcctgcggtccatgtgcaggggcaggagccactgactgcctccatgctggctgcagcacccccccaggaacagaagcagatgctgggagaacgcttgttcccactcatccaaacaatgcattcaaatctggctgggaagatcacgggaatgctgctggagatagacaactctgagctgctgcacatgttagagtcccccgagtctctccgctccaaggtggatgaagctgtagcagttctacaggctcatcatgccaagaaagaagctgcccagaaggattcaaaagccaaataaccccttatggaattcaactcaaggtttgaagacttcctagcttgtcctatggacctcaacaccaaggattacaaattgcaaatttaataggtcattttgtatcaaaaggtcaattatgaagcacctagaatttttcaattatacgaatatgttctttgggttctgctgtggcccagacagtgttaactttttttttattgtgggttttgattttttcccccagaaattggttttatttgatgtacccaagtcttacgtttcccaataaagaaaaaaaatctccataaaa

SEQ ID NO: 13130 - DNA, 4398 bp, Homo sapiens
ctctctccgccccgggtcgctgccgcctccgccgctttcgggcttcgcagcctgaggaaaaaaagagaaaaagataaaaaaaatctgaaaacgcttcaaaatcctgaaaaaaaaaaaggaaaagaaaaaacgaatcctcggagaacccgcggggaagtcactttcgtacgcttccggcctgccccgcgcccgccgccgcagcgcttggcgtccgtcggtctccgtccgtcggtccgggggtgagccgcccgcccggcccgccgtgccctccccccgctcgggccccgagccccgcgccccgcgcctgccccggcgcaccacgtgtccgtgctgcccttcgccgcccgcccggggctcgccgagtcggcgcccacaaagatttggtttccctctgccccggcggttgtaatcttaaaccgccggagcccgaggcctatatttatagagaaacgcgtgtccccgaggccgccgtgggcagcgtccggtcgcctcttaaaggatttttacccttcggaaggggattccccgtttaatttttttcctactttgattttttgaaatttggagcttcgcaccaggaccgcggagaagtgcaaagtcgcggggagggccgtattgtgcggagagccttttgtctgcggtgctgcggccgtgggagccggcccccgcctcccgtttccgtcccgtctccaagcccgccgactccagctcgtcctcgccgcgccggtgccacctgtgagccgcggcgcgggcccgggctccgaaggcgcccctttgtcctgcggcgggcccgataagaagtcctcctggcggggctcggggtggtggggggcggggagatgaacgctgcggccagcagctaccccatggcctccctgtacgtgggcgacctgcattcggacgtcaccgaggccatgctgtacgaaaagttcagccccgcggggcctgtgctgtccatccgggtctgccgcgatatgatcacccgccgctccctgggctatgcctacgtcaacttccagcagccggccgacggtgagtagaagctgtgcccacacgtgcgtgggagcccggaggaccccgggagtcgtcttctggcagggccctcctgccgaggagggcggcatcacgacagcatgttgccaccgaagctgggagcagggtgcggagattgagaacgcggacctggcatcagatgactcgagtttcaatcttgtttctaccacttgctaactgggtgaccttgggctacttattagtgttgctggtagtggggttggaaaccaaggagactgtaaaacaggattagagtgaagccactggcattccactgcgtgtggtccttgtcagtggggctgggctgttagagatccttgcttgtgcccctcacaggctggccaaaaaggcgggacgtttgaaacacaattccccgcgaaagttttacattgtaaagctcctgcccgctccgccacctttactaaccttgactacctgatgttgtgctgataaaggatcagtcagggcaggcaggaagcagggggaaggtttctgtgcgttaaactttcgcagagacttaggttagtgccacaaaagctgcgtgtgccaggccacctccttggtctgtgtgtttgccactggagtggagaagtgctttactctggacaaatggtatccaggctctgtgctgtagagtgtcgtggaggtagtttagggaagcgtcacttgaaaatctggtgtcatttgtcacctcagctgtaacagtgctttgcactagtcagagcccttttatttcatctaatctgaagaaaatgggactcctgagaaggagaacgaatgcaaaaagttggaagccaagttaggactcccagcacagtgctctgccacctcagattgtggccttagcgtggagcatggagagaggtatgctgcaggcgtggcaggagggaggccagaggaaacctgatcagaggctgcacgtgactccagattaaaagggaacaactgcagagatcattactgggagaaacaagccattctatggcaaagcatctccaggtccctagttttggggtcccccctttgttttctgtctgaggcccagagttactacctgcccaggttgcggctgagaccagagaattggacatgttgagagggactaggtattgctactgtcaatccagtgtgctccaagctgagttctgtccatggccataggagcgcaaaggtagctgagtgtggtctttttaagggataatgtaccacattagctgttgtctgccttactgacttttgaacaaaagtcgtgtcacttagagatagcagaagctattggtcagtgtgtctgccaacacatacttctgcaggacttctccctgctataaataagtgcagccagatttgtcagactaagccggcttgccttgtgcagtgctgtctggaaatagacgaggagctgttgttgaagtgggctcctttactgctaattaatgaaatagtttgcgatcccagctatctatctctgatagccatcacaagcaaagtcctctttccctggactgttcctgacttggatcggtcttgtcatctccccttttcccaactaccccccacacagatgaggcccaccttctgaagggggtggggaaagttgttggaaataatgagtgaaaataaattctcccggctaatgaaacagttgagcttgtggagcggcagagttggggaattttgtcccccctttaagtgagatgttgtcctgaggcaaggagcaggttccactgctctgaccctgtctaaatcccctcatggaggaggttctgggtgatgtcaccgttaggagatgccatcatagccttaaggaaaagtggccaccagatctgggcatccttgttgcgattagtgatgagaagtgttttggctggcaggtggtgttattttttagcttttggttctttttgttgttgtttgttttgagacactgtttcactcttgctgcccaggctggagtgcaatggcgcgatctcagctcactgcaacctctgactcctgggtccaaacaattttcctgcctcagtctcctgagtagctgggattacaggcacccgccaccatgcccagctaattgtgtatttttagtagagatggggttttcaccatgttggtcaggctggtctcgaactcctgacctcaggtaatccacccgccttggcctcccaaagtgctgggattacaggagtgagccaccatacccagcccagcctttggttctttaaattgtctctggtgtacacacggacttggttgggaagctaaggaagcattccaaggtgttggatggggaagttggttgagcacccagggtagctgaagtcctagaattctacagaacttccattaaggcttcaaaaggtgggtgcagggcctgccatctgcgcactgtctacttaggcagaaggtatggtggttttatccttgtgatagtacagagaacttttccatgtgtgatcagttgtgtccattttgatgactgatgcttttttgtttaagtcaatttctgttctcagaaattgaaaataaactggactgaattctgaattcagggatagcacctttttttttttttccagatcatttgctttacaggttttgtcacttgtctccataggtggattgcagactaaatgacttgataactttgatgcaatacctcactgaaaaataaatcagataatctagtattagtttcgtaattactagctagctgcacagcttagttaccctaaacataagtttgttcattttgtaaaatgtataatttcagctgtcccacctgagtcatggtgggtggtagtctgcaaagtctcttctaagtggtaaagcttagtcaaatgtgaggtattatcactggatcttggtgtcattaaggccatttagattatctttacttgtggcccctttatccaacaagggcacagacccagaagggtgtttagacttctgtcatgaagtagagtcattagctggaacttatgcttcccttactaacagtgcaggctggaggaatctgatgcccttttattttaatagagttgccttttatcaagagtgattaccttgaaaagtcctggagtaatctgttcttaggctgttggcctgtgggagctgacgttttctctccttattgaaatgtgtttctctcttacagctgagcgggctttggacaccatgaactttgatgtgattaagggaaagccaatccgcatcatgtggtctcagagggatccctctttgagaaaatctggtgtgggaaacgtcttcatcaagaacctggacaaatctatagataacaaggcactttatgatactttttctgcttttggaaacatactgtcctgcaag

SEQ ID NO: 13131 - DNA, 898 bp, Homo sapiens
ctctctccgccccgggtcgctgccgcctccgccgctttcgggcttcgcagcctgaggaaaaaaagagaaaaagataaaaaaaatctgaaaacgcttcaaaatcctgaaaaaaaaaaaggaaaagaaaaaacgaatcctcggagaacccgcggggaagtcactttcgtacgcttccggcctgccccgcgcccgccgccgcagcgcttggcgtccgtcggtctccgtccgtcggtccggggcttcgcaccaggaccgcggagaagtgcaaagtcgcggggagggccgtattgtgcggagagccttttgtctgcggtgctgcggccgtgggagccggcccccgcctcccgtttccgtcccgtctccaagcccgccgactccagctcgtcctcgccgcgccggtgccacctgtgagccgcggcgcgggcccgggctccgaaggcgcccctttgtcctgcggcgggcccgataagaagtcctcctggcggggctcggggtggtggggggcggggagatgaacgctgcggccagcagctaccccatggcctccctgtacgtgggcgacctgcattcggacgtcaccgaggccatgctgtacgaaaagttcagccccgcggggcctgtgctgtccatccgggtctgccgcgatatgatcacccgccgctccctgggctatgcctacgtcaacttccagcagccggccgacgctgagcgggctttggacaccatgaactttgatgtgattaagggaaagccaatccgcatcatgtggtctcagagggatccctctttgagaaaatctggtgtgggaaacgtcttcatcaagaacctggacaaatctatagataacaaggcactttatgatactttttctgcttttggaaacatactgtcctgcaag

SEQ ID NO: 13132 - DNA, 741 bp, Homo sapiens
aaggaatgccaagtgctatacgccagtctgggcctcgtccaactcttcgccatctggctccaactggtaatgctccggcctctcgtggcctccctactaccactcagagagtcggtgagcaaactggcctttagaagtgtggcctggggaggagggagtcaggatgactaggctctgtcctgggttggtcagtttgttgggctcgaatttatcgagtcctggttctgtaatcttagctgtgtgcttaggtggccacttcaggagcagagaaacagtatgagttctaggtgtgtcagttgcttttaacattctttgctcatcggtgacctatgtgaaaaaggttagttgtagaagtttgctagctggatgaccacagaggcagcttgttcttttgggtggggtgaggaatacaaggaaacagtgtatacagaatatgtcttgtattccaagatgtggaaagagttgtatgttatcctttggctcatcctcgaaagtagtagtggccccctgtgcaatgtgttgcgtaaacgtgctttgaaatttctccttccgtgggacgtggccagttggacatctgccgccaacactgatgtgcatttgctggtctgttgtagggtctgagtgcccggaccgcttggctatggactttggtggggctggtgccgcccagcaagggctgactgacagctgccagtctggaggtggtattggatgcacacagaagggggaaagatgggattt

SEQ ID NO: 13133 - DNA, 193 bp, Homo sapiens
aaggaatgccaagtgctatacgccagtctgggcctcgtccaactcttcgccatctggctccaactgggtctgagtgcccggaccgcttggctatggactttggtggggctggtgccgcccagcaagggctgactgacagctgccagtctggaggtggtattggatgcacacagaagggggaaagatgggattt

SEQ ID NO: 13134 - DNA, 3711 bp, Homo sapiens
aagtgctatacgccagtctgggcctcgtccaactcttcgccatctggctccaactggtaatgctccggcctctcgtggcctccctactaccactcagagagtcggtgagcaaactggcctttagaagtgtggcctggggaggagggagtcaggatgactaggctctgtcctgggttggtcagtttgttgggctcgaatttatcgagtcctggttctgtaatcttagctgtgtgcttaggtggccacttcaggagcagagaaacagtatgagttctaggtgtgtcagttgcttttaacattctttgctcatcggtgacctatgtgaaaaaggttagttgtagaagtttgctagctggatgaccacagaggcagcttgttcttttgggtggggtgaggaatacaaggaaacagtgtatacagaatatgtcttgtattccaagatgtggaaagagttgtatgttatcctttggctcatcctcgaaagtagtagtggccccctgtgcaatgtgttgcgtaaacgtgctttgaaatttctccttccgtgggacgtggccagttggacatctgccgccaacactgatgtgcatttgctggtctgttgtagggtctgagtgcccggaccgcttggctatggactttggtggggctggtgccgcccagcaagggctgactgacagctgccagtctggaggtggtattggatgcacacagaagggggaaagatgggatttgacgggtctttgcccagactgatgggctttaattgtatttgttctttccctaaggcgttcccacagctgtgcagaacttagcgccacgcgctgctgttgctgctgctgctccccgggctgttgccccctacaaatacgcctccagtgtccgcagccctcatcctgccatacagcctctgcaggtgaggttcaccagacagaatgcttaaaaggatttcccccatttccacttgatgtaaaagaagctgtgcttttgattccttcaacaggtattaaatgcctgctctgtgttatgacgctatgttctgattcactgtccctgcccttcaggggctcactagtgggaaagaaggggcttaaaagtgctctgcctgatgccagttcactcagaaatgcctcagagcgggcagccagtgcttcctcttctgtttgtacgaaataatgtgctcattcagctgtttgagcctccaggtcacttccgcatccaatgacctattggatccttggctgctctgcaagatgattggtacattaatgcaggaaataacttcaacttacagatcggatgttcagcttcaaagatgtaaagtgtgtgtaggaggtgaaggggttgaacctagagcttagattttctaagctgtaacttgctgtctctagacctgtgctctagatgcaactagtttgtttcagagcctaatagcaatttgctgtggaggtgtcaccctaagccttcaggcccataagctgcttaggagattactctttaactgtcctgtctcatactctctaagttggggatttcctagaacttgatgctatgtaaaataccttttctttgcaaggctttgactagcattgacgttgcatgttgaccgtttttaagcatttgatacaaaaacatttggtagaattaaggtgatgtggaatgtaattataaatgtgttgatatttactccctttgatccaatctgcactgagatttaccctaaaggaaaactaattttcaggaaaaggttatatacaagtgtttacccttatttatatcaaggcttttcattcttgagtaactttgggtgtattaaggaaatgtcagaaaatgcttgcctagcactataggtttgttttattatttacgtttcacttcgctttctgatagcatgccattttcattgtaattggttgtgtttatgtccataccactctgttcctcaacacacccctcaatccttcaaggactgaaattagttcctttagagcaaggacagccacctcctctcctctttcacatagtcagatgttcagatattgaacaggcactcaaccaccatcaggtgttgtcctttcctcagtgctaacccactgcctttcctggttcccaggcaccccagcctgcggtccatgtgcaggggcaggagccactgactgcctccatgctggctgcagcacccccccaggaacagaagcagatgctgggtgagtgacccacttgcttgcagaagaagagggtcccagagcctgatgccagctaggacaccagtgtccattgtttactgggatttgatttgtttttttattaactatcctccccataggagaacgcttgttcccactcatccaaacaatgcattcaaatctggctgggaagatcacgggaatgctgctggagatagacaactctgagctgctgcacatgttagagtcccccgagtctctccgctccaaggtgagctggggctcagaccctgcagcttcagttctcagcttgggaagactgggggcaaacttggatgcccaggtgcagcagaaagtgggatctgctgcccccaggacccctctcgtcatgccttgactgtgactggaggctgcagtgggtatttgggaaagtagttagcaccagaagcctagggatcatctgtacagttggctttggtccaccactaggtctgggcactggggaggggtggagtagctctcctagattcactgaccacctgaagatttctcgcaggtggatgaagctgtagcagttctacaggctcatcatgccaagaaagaagctgcccagaaggtgggcgctgttgctgctgctacctcttagacaaggaaaaaccgtatgtgtggctattttcatttttgttcctatgagcattgttcctatgagcattgtctttgtggtttgacctgaggttgtatatatgctcactgcttagctctgggaatacaataagtacagttagttacacggagtgtgttgcaggtgacttcttatcatgaggactgtggactttgtctgcaggagcttgagtgaataataaaactagtactggttgatggttgtaggtgtctccagatagggaaagaagagacagtaaaataagctaaggaaaaagcacatggtaaggaccagagctggtgtgttgggagggttgacttggcatagtcatgaccctcttgtcaagggcctcaggagccttgtcatctagtggtaaagaccagagatgctgctaaatgttgtacagtacacaggaggacagacccaacagaatgtccaaagtgtcaatagcactgaggttgagaaactctcttctagaataccttcctttatccactatatgttaatgaatctaaattatttgattatgcatttatttgtgttggtgcttttctttacaggattcaaaagccaaataaccccttatggaattcaactcaaggtttgaagacttcctagcttgtcctatggacctcaacaccaaggattacaaattgcaaatttaataggtcattttgtatcaaaaggtcaattatgaagcacctagaatttttcaattatacgaatatgttctttgggttctgctgtggcccagacagtgttaactttttttttattgtgggttttgattttttcccccagaaattggttttatttgatgtacccaagtcttacgtttcccaataaagaaaaaaaatctccataaaa

SEQ ID NO: 13135 - DNA, 3592 bp, Homo sapiens
aagtgctatacgccagtctgggcctcgtccaactcttcgccatctggctccaactggtaatgctccggcctctcgtggcctccctactaccactcagagagtcggtgagcaaactggcctttagaagtgtggcctggggaggagggagtcaggatgactaggctctgtcctgggttggtcagtttgttgggctcgaatttatcgagtcctggttctgtaatcttagctgtgtgcttaggtggccacttcaggagcagagaaacagtatgagttctaggtgtgtcagttgcttttaacattctttgctcatcggtgacctatgtgaaaaaggttagttgtagaagtttgctagctggatgaccacagaggcagcttgttcttttgggtggggtgaggaatacaaggaaacagtgtatacagaatatgtcttgtattccaagatgtggaaagagttgtatgttatcctttggctcatcctcgaaagtagtagtggccccctgtgcaatgtgttgcgtaaacgtgctttgaaatttctccttccgtgggacgtggccagttggacatctgccgccaacactgatgtgcatttgctggtctgttgtagggtctgagtgcccggaccgcttggctatggactttggtggggctggtgccgcccagcaagggctgactgacagctgccagtctggaggtggtattggatgcacacagaagggggaaagatgggatttgacgggtctttgcccagactgatgggctttaattgtatttgttctttccctaaggcgttcccacagctgtgcagaacttagcgccacgcgctgctgttgctgctgctgctccccgggctgttgccccctacaaatacgcctccagtgtccgcagccctcatcctgccatacagcctctgcaggtgaggttcaccagacagaatgcttaaaaggatttcccccatttccacttgatgtaaaagaagctgtgcttttgattccttcaacaggtattaaatgcctgctctgtgttatgacgctatgttctgattcactgtccctgcccttcaggggctcactagtgggaaagaaggggcttaaaagtgctctgcctgatgccagttcactcagaaatgcctcagagcgggcagccagtgcttcctcttctgtttgtacgaaataatgtgctcattcagctgtttgagcctccaggtcacttccgcatccaatgacctattggatccttggctgctctgcaagatgattggtacattaatgcaggaaataacttcaacttacagatcggatgttcagcttcaaagatgtaaagtgtgtgtaggaggtgaaggggttgaacctagagcttagattttctaagctgtaacttgctgtctctagacctgtgctctagatgcaactagtttgtttcagagcctaatagcaatttgctgtggaggtgtcaccctaagccttcaggcccataagctgcttaggagattactctttaactgtcctgtctcatactctctaagttggggatttcctagaacttgatgctatgtaaaataccttttctttgcaaggctttgactagcattgacgttgcatgttgaccgtttttaagcatttgatacaaaaacatttggtagaattaaggtgatgtggaatgtaattataaatgtgttgatatttactccctttgatccaatctgcactgagatttaccctaaaggaaaactaattttcaggaaaaggttatatacaagtgtttacccttatttatatcaaggcttttcattcttgagtaactttgggtgtattaaggaaatgtcagaaaatgcttgcctagcactataggtttgttttattatttacgtttcacttcgctttctgatagcatgccattttcattgtaattggttgtgtttatgtccataccactctgttcctcaacacacccctcaatccttcaaggactgaaattagttcctttagagcaaggacagccacctcctctcctctttcacatagtcagatgttcagatattgaacaggcactcaaccaccatcaggtgttgtcctttcctcagtgctaacccactgcctttcctggttcccaggcaccccagcctgcggtccatgtgcaggggcaggagccactgactgcctccatgctggctgcagcacccccccaggaacagaagcagatgctgggagaacgcttgttcccactcatccaaacaatgcattcaaatctggctgggaagatcacgggaatgctgctggagatagacaactctgagctgctgcacatgttagagtcccccgagtctctccgctccaaggtgagctggggctcagaccctgcagcttcagttctcagcttgggaagactgggggcaaacttggatgcccaggtgcagcagaaagtgggatctgctgcccccaggacccctctcgtcatgccttgactgtgactggaggctgcagtgggtatttgggaaagtagttagcaccagaagcctagggatcatctgtacagttggctttggtccaccactaggtctgggcactggggaggggtggagtagctctcctagattcactgaccacctgaagatttctcgcaggtggatgaagctgtagcagttctacaggctcatcatgccaagaaagaagctgcccagaaggtgggcgctgttgctgctgctacctcttagacaaggaaaaaccgtatgtgtggctattttcatttttgttcctatgagcattgttcctatgagcattgtctttgtggtttgacctgaggttgtatatatgctcactgcttagctctgggaatacaataagtacagttagttacacggagtgtgttgcaggtgacttcttatcatgaggactgtggactttgtctgcaggagcttgagtgaataataaaactagtactggttgatggttgtaggtgtctccagatagggaaagaagagacagtaaaataagctaaggaaaaagcacatggtaaggaccagagctggtgtgttgggagggttgacttggcatagtcatgaccctcttgtcaagggcctcaggagccttgtcatctagtggtaaagaccagagatgctgctaaatgttgtacagtacacaggaggacagacccaacagaatgtccaaagtgtcaatagcactgaggttgagaaactctcttctagaataccttcctttatccactatatgttaatgaatctaaattatttgattatgcatttatttgtgttggtgcttttctttacaggattcaaaagccaaataaccccttatggaattcaactcaaggtttgaagacttcctagcttgtcctatggacctcaacaccaaggattacaaattgcaaatttaataggtcattttgtatcaaaaggtcaattatgaagcacctagaatttttcaattatacgaatatgttctttgggttctgctgtggcccagacagtgttaactttttttttattgtgggttttgattttttcccccagaaattggttttatttgatgtacccaagtcttacgtttcccaataaagaaaaaaaatctccataaaa

SEQ ID NO: 13136 - DNA, 10676 bp, Homo sapiens
caacttccagcagccggccgacggtgagtagaagctgtgcccacacgtgcgtgggagcccggaggaccccgggagtcgtcttctggcagggccctcctgccgaggagggcggcatcacgacagcatgttgccaccgaagctgggagcagggtgcggagattgagaacgcggacctggcatcagatgactcgagtttcaatcttgtttctaccacttgctaactgggtgaccttgggctacttattagtgttgctggtagtggggttggaaaccaaggagactgtaaaacaggattagagtgaagccactggcattccactgcgtgtggtccttgtcagtggggctgggctgttagagatccttgcttgtgcccctcacaggctggccaaaaaggcgggacgtttgaaacacaattccccgcgaaagttttacattgtaaagctcctgcccgctccgccacctttactaaccttgactacctgatgttgtgctgataaaggatcagtcagggcaggcaggaagcagggggaaggtttctgtgcgttaaactttcgcagagacttaggttagtgccacaaaagctgcgtgtgccaggccacctccttggtctgtgtgtttgccactggagtggagaagtgctttactctggacaaatggtatccaggctctgtgctgtagagtgtcgtggaggtagtttagggaagcgtcacttgaaaatctggtgtcatttgtcacctcagctgtaacagtgctttgcactagtcagagcccttttatttcatctaatctgaagaaaatgggactcctgagaaggagaacgaatgcaaaaagttggaagccaagttaggactcccagcacagtgctctgccacctcagattgtggccttagcgtggagcatggagagaggtatgctgcaggcgtggcaggagggaggccagaggaaacctgatcagaggctgcacgtgactccagattaaaagggaacaactgcagagatcattactgggagaaacaagccattctatggcaaagcatctccaggtccctagttttggggtcccccctttgttttctgtctgaggcccagagttactacctgcccaggttgcggctgagaccagagaattggacatgttgagagggactaggtattgctactgtcaatccagtgtgctccaagctgagttctgtccatggccataggagcgcaaaggtagctgagtgtggtctttttaagggataatgtaccacattagctgttgtctgccttactgacttttgaacaaaagtcgtgtcacttagagatagcagaagctattggtcagtgtgtctgccaacacatacttctgcaggacttctccctgctataaataagtgcagccagatttgtcagactaagccggcttgccttgtgcagtgctgtctggaaatagacgaggagctgttgttgaagtgggctcctttactgctaattaatgaaatagtttgcgatcccagctatctatctctgatagccatcacaagcaaagtcctctttccctggactgttcctgacttggatcggtcttgtcatctccccttttcccaactaccccccacacagatgaggcccaccttctgaagggggtggggaaagttgttggaaataatgagtgaaaataaattctcccggctaatgaaacagttgagcttgtggagcggcagagttggggaattttgtcccccctttaagtgagatgttgtcctgaggcaaggagcaggttccactgctctgaccctgtctaaatcccctcatggaggaggttctgggtgatgtcaccgttaggagatgccatcatagccttaaggaaaagtggccaccagatctgggcatccttgttgcgattagtgatgagaagtgttttggctggcaggtggtgttattttttagcttttggttctttttgttgttgtttgttttgagacactgtttcactcttgctgcccaggctggagtgcaatggcgcgatctcagctcactgcaacctctgactcctgggtccaaacaattttcctgcctcagtctcctgagtagctgggattacaggcacccgccaccatgcccagctaattgtgtatttttagtagagatggggttttcaccatgttggtcaggctggtctcgaactcctgacctcaggtaatccacccgccttggcctcccaaagtgctgggattacaggagtgagccaccatacccagcccagcctttggttctttaaattgtctctggtgtacacacggacttggttgggaagctaaggaagcattccaaggtgttggatggggaagttggttgagcacccagggtagctgaagtcctagaattctacagaacttccattaaggcttcaaaaggtgggtgcagggcctgccatctgcgcactgtctacttaggcagaaggtatggtggttttatccttgtgatagtacagagaacttttccatgtgtgatcagttgtgtccattttgatgactgatgcttttttgtttaagtcaatttctgttctcagaaattgaaaataaactggactgaattctgaattcagggatagcacctttttttttttttccagatcatttgctttacaggttttgtcacttgtctccataggtggattgcagactaaatgacttgataactttgatgcaatacctcactgaaaaataaatcagataatctagtattagtttcgtaattactagctagctgcacagcttagttaccctaaacataagtttgttcattttgtaaaatgtataatttcagctgtcccacctgagtcatggtgggtggtagtctgcaaagtctcttctaagtggtaaagcttagtcaaatgtgaggtattatcactggatcttggtgtcattaaggccatttagattatctttacttgtggcccctttatccaacaagggcacagacccagaagggtgtttagacttctgtcatgaagtagagtcattagctggaacttatgcttcccttactaacagtgcaggctggaggaatctgatgcccttttattttaatagagttgccttttatcaagagtgattaccttgaaaagtcctggagtaatctgttcttaggctgttggcctgtgggagctgacgttttctctccttattgaaatgtgtttctctcttacagctgagcgggctttggacaccatgaactttgatgtgattaagggaaagccaatccgcatcatgtggtctcagagggatccctctttgagaaaatctggtgtgggaaacgtcttcatcaagaacctggacaaatctatagataacaaggcactttatgatactttttctgcttttggaaacatactgtcctgcaaggtaaacattgattaaatgattttagcagaataattaattgattcttgaaaacaagataaataccaaacagagaactatcttggaattggggaacaagatatgggaattttcaaaatgctggacatggaatcctaaaagttcccataggtaatctcagggccatacccagcgtaaccagcacacgctttcatacccttgttctttactcagcctgaaatatccttcctattctttagctttggaaagcccacgtttttcttttgggatgggggaaagtagaggaccagagaagtgtctctagtcttgaggaaacttaatcactttagaagcataaattcactctattccttctacgtatctgttctatgctgagcactttaaaacttaaacggtggtggtgtatatgtttaatgccatactacactgaaaatctgttgtggccttggaaaatgttttgttttctgcatcaccgtggtttgcacccagatctcttaaaatgtgttgttgtgttttaaagagacagagtcttgctctgtctgtcacccagggtggagtgcagtggtctagtaatagctcattgtagcttcgacctcctgggctcaagccatcctcccacctcagcctcccaagtagctggaactacaggcacgtgccaccacactcatttaatttttttcttttttgtagagacagggtctccattgtccaacgatctggctccaacgatcctcctgctttggcctcccaaagcattgggattacaggcatgagccacagcacccaattttaagtattttttgtttgtttgtttttgataaaaataaaacatttggaatagaagcatcttagtagggctacctttgtaaatggaacacttactaggcacctggtgctgtgctaggtgttagaaaaattatactggtgtacttgaccaccattggccatggatgggctagagtctcctcaggcacaagataccctgaggttctcatgtctcaggagctggccagttctgctaaagtggtccgccttgtctttgacaggtggtgtgtgatgagaacggctctaagggttatgcctttgtccacttcgagacccaagaggctgccgacaaggccatcgagaagatgaatggcatgctcctcaatgaccgcaaagtgtgagtgtcccagtccggagcaacaaccatcgcatgagccagccgtggccccacctcgctattaactggcacacacaaggcggctactggttctcggcccaagtgtggcctgctcctacctctccactccagggctggtgagtctccctgcctgagccgtggcagcccttttgactcgccaaggtgggcttcctgcccaagccatggcctgcctgccgcctctcccttaaaggcatctgtctgtgggttttgtgagcatcaacaactggggctggctggaaagcagctctaagctcactctgagtcggggtcttggccagcggcagagtggagagggccctggactgaccaggagctgtatactagcagtgtgaccttggctttcctgtgattcaggtctgtccatgggtccctcgctagtggttgatgccaaattgtccccgcggttctccattttctaacttatgactcagtgacctaatacaaggctggctccacagtaatacttggtgacaatgaaaaaatcccatccctttgcagaaaaacttcataacagaccttgttgctttgatgtggttgttactgtagaatgcagagagggggaacttaccaaagccatatggggagaagaagagacaataagtcttggctattacaagccaaaataatttttgtcctttgtgtcattcagtatgccagaggatgggttatctttataatgtctgtgtgtgcagtggttgatctacagatatcactaaaaagaaatacaaaaatgtcagtgcatggataaattttcttttaagtataacagaccaaaataaataaatttaaaaagcaaagggtgccccttcactccaacaatctcatatctaggattaaccactgttaacagtttggtttgtatccttccagaccttttctatgcatttacatagttgcacagaaatgaacattttaaaaacatggccatcaggtttcttcatgaaggcagtgtgatgtggtaggaatagccctggtctaagccaggagccctggggctggtcctcacaggatagtcctgcctttttctctttctgctggggacttggggtatctctgagcctccttggtggtggatggggatctcgtgttttaacctctcctgtcagtctttaacctgtattcctttgggtccctggacatcatgttttattcctctgggtaattactgttcttcatggtttcattttagatttgtgggcagattcaagtctcgcaaagagcgggaagctgagcttggagccaaagccaaggaattcaccaatgtttatatcaaaaactttggggaagaggtggatgatgagagtctgaaagagctattcagtcagtttggtaagttggggttccttgtctcctttcacagtctaccagacccatctgttttttcttaagagatgagggcactgctccagagatttgcttcaagtgagtttccagagggaagccttctgttcctgagctgtgctcaagatggtgttactaatagttctgtcctttggtaataggtaagaccctaagtgtcaaggtgatgagagatcccaatgggaaatccaaaggctttggctttgtgagttacgaaaaacacgaggatgccaataaggtgagtataccacaaagattgggaaaagcttttaagaggttgccccagagtatgggtagggtcttgctagcacctacctagagctgggacggtctgagtatctggtagtagatgtaccattactatactctgggatcatcttcctgggttccgcatgttaacttcatgtaggtgtttacaaagcacttggcacatacctgtcacctcagctatcagttgttgaaagaataggacagacgtttgttatgctgcaaaggtgagagaactaaagcccagtgagtgctgatttgataacagcacggcagctacttgtgggcaaagcattgtgccagaccctcaatatttatcacttaaatacccacaaaagcacctgcagaatttactggcagccggaatattatatcgccctaggctcatgtcagcacacttgtgtttatacacctgtactatttctatattatctggatcaataacccatttaaatattaacctcactttacagatgaggaagtttggatttgtgtgacagacttcagaggtggagtgaatttagtttttagtcctatagtagaaagaatattttttgggacttagacctccagaataagaccccatcgctgcaactttattttaaagacatatttttcctctctaggctgtggaagagatgaatggaaaagaaataagtggtaaaatcatatttgtaggccgtgcacaaaagaaagtagaacggcaggcagagttaaaacggaaatttgaacagttgaaacaggagagaattagtcgatatcaggtaaggtggtcttggcccagcctagcaatgggatttgctgtgaaatatttgcagaacacccctatgtttagcgggctttctttttgaggacttggagtgtgttcttcttcccattttacctaaaaagatgaggtttaaaaggatatatacctactacatatgactgattattatagaaccagaaacaagagatgggtttattcatcaagaagctctctattttggaagcctcagcctgttgcttttagccatgtaggttccttttacttaaatgagactcctttgtttggcatggcttcaagaagacccctgctggggtgggtgagtggtcaccagaacagctgtggggagaggtgacaaaaggtgagtgcactgatgatcctgtcagtttcagggcagtagtttcacaactttggacttgcatcagattcatcagcagagcttgttaaaacagatagctgggctccagccccagagtttttcttattcattgggtttggggtctggcctaagaatttcatttctttcttttttttttttttttcttgagacagtctcgctctgtcgcccaggttggagtgcagtggcacaatctcggctcactgcaaactccgcctcccgggttcgcaccattctcctgccttagcctcctgagtagctgggactacaggcacccgccaccatgcctggctaattttttgtatttttagtagagacggggtttcactgtgttagccaggatggtctcgatctcctgaccttgtgattcgcccgcctcggcctcccaaagtgctgggattacaggcgtgagccaccgcgtccggccgagaatttcatttctaacaagttcccaaagatgctggtgctcctggtctggggccacccttggggaaccactttcttagggaatatttgtgatatagaagtgtagttaacagtgatctttttccttcagggggtgaatctctacattaagaacttggatgacactattgatgatgagaaattaaggaaagaattttctccttttggatcaattaccagtgctaaggtattatactgcgatctggggattgaaagcagtggtattccattataggcttattggcatttgtcccattgaaggaatagcatttaaattatgttcatttctgaaagtagctactacgtttttctagcaaaatttctggatgcattctggagaatgacatttcattaggttaacattacactgtttcccaagcactggagtctggagaggaatttgacccagcccctccttgccaactcagagcacctgaatctttcccattccttgctgcctcgtgccggtgtggggacagatggtgctacagaatgagcagaggaaatccagacaggttgttttccatttgtcttggggcctgtctctacagctctgccacattttctccttgagaatgaaggtattttgaagattttggaggtgggcttgggaacttctaccctggtcttaaaaagagaggaaaggggagtggaaggtttttctatgtttcgtagtgtgcatcatttgcttgattttctttgataatcatatcaactaagttagcagggtaagtaggaacctcattttaaagataaggaattttagtccttgaacaagagaatgctgactacatggggatggtgtactgcttgtccttggcactttgggagcaggatggaaactggtgccatctgaacattttgagttatggccggatgcagacgccggtcttgctaaacaggtgtaccagatgccacaaaatcctttagttgatgagaagggaagccacgtgggctggtaagggcttagtggccctgccctggctcttagtggactttgctcccaacctgggaatgtggaaagcaatgttatcagttgtagtagggagttggccagaggccaactgtgggtttgcccagttcttaccctttcgtttttgctatgaccccccccttgactggccctcatcagtgtaaggagtgatcttctatccttgcttatctgcctagtagtcaagttggcatttgttaagagagcagaagagccataccttgaattgtccccattttcattatgatggtgtggcatttttattcacataccttactggcccatctcattggtagagagttatggagtgatgcacttctttacttccctatcctccacttcaggaggctctctgggccattaactaagacataaaacaatgacagtcacaccagagaagacagtgaataaccttgtctattaggaagaatgccatttgtgaatgatgaacttaatgtgggaaaagactgcctgaaccagtagacctgtggttttgtagctgtttggagtatttcttggaaattgagcctcaggaaggcaagtgagactagaatctaggctgcctatctctgagctggtcatctcattgaattaatggtggcagtcattggttacctgaacattttaggactcctgtccacacgtggtattccaaaagtgttatcctgacgttggtaagagcttgttagagtttgtccaccgaggtcttgaagcatatgagatatgaaaataaattgctcagtactactctcaagatgttttgtggttacccggagtagctatccaccaggtatcaggaaacatctttgagttcctggttttattattagccatatcatagtgtttcagaactttagcatcacctggggactcaaagaaaacacctagataccttagaggttgtgacttagttggtctggggtaaatcctgtgccagaaccctgacctagactcagtgactgcagcagaacccaggctttctggttcttctgaatagttccctccccacccagggacatccttttttttcctatttgtaggtttgttttgttttttttgttggtttggttggttggtgtttttgttttgttttgttttgttttgttttgttttgttttggagatggagtctcgctctgtcgcccaggctggagtgcagtggcgcgatctcggctcactgcaatctctgtctcccgggttgaagcggttctcctgcctcagcctcctgagtagctaggattacaggtgtgtgccaccacgcccagctgatttttgtatttttagtagagacggggttgcaccatgttggtcaggatggtcttgaattcctgacctcgtgatccacccacctcggcctcccaaagtgctgggattacaggcatgagccactgcgcctggccctttgtttttttgagatgaggtctcactacattgctcaagctggtctcaacctcctgagctcaagcagccctcccacctcagccttccaaagtgctgggattacaggcacaagccatcacacccagccagggacaccttatttcttaagtagctggtctcattttgtaggtaatgctggaggatggaagaagcaaagggtttggcttcgtctgcttctcatctcctgaagaagcaaccaaagcagtcactgagatgaatggacgcattgtgggctccaagccactatatgttgccctggcccagaggaaggaagagagaaaggctcacctgaccaaccagtatatgcaacgagtggctggaatgagagcacttcctgccaatgccatcttaaatcagttccagcctgcagcgggtggctactttgtgccagcagtcccacag

SEQ ID NO: 13137 - DNA, 1212 bp, Homo sapiens
caacttccagcagccggccgacgctgagcgggctttggacaccatgaactttgatgtgattaagggaaagccaatccgcatcatgtggtctcagagggatccctctttgagaaaatctggtgtgggaaacgtcttcatcaagaacctggacaaatctatagataacaaggcactttatgatactttttctgcttttggaaacatactgtcctgcaaggtggtgtgtgatgagaacggctctaagggttatgcctttgtccacttcgagacccaagaggctgccgacaaggccatcgagaagatgaatggcatgctcctcaatgaccgcaaagtgtgagtgtcccagtccggagcaacaaccatcgcatgagccagccgtggccccacctcgctattaactggcacacacaaggcggctactggttctcggcccaagtgtggcctgctcctacctctccactccagggctgatttgtgggcagattcaagtctcgcaaagagcgggaagctgagcttggagccaaagccaaggaattcaccaatgtttatatcaaaaactttggggaagaggtggatgatgagagtctgaaagagctattcagtcagtttggtaagaccctaagtgtcaaggtgatgagagatcccaatgggaaatccaaaggctttggctttgtgagttacgaaaaacacgaggatgccaataaggctgtggaagagatgaatggaaaagaaataagtggtaaaatcatatttgtaggccgtgcacaaaagaaagtagaacggcaggcagagttaaaacggaaatttgaacagttgaaacaggagagaattagtcgatatcagggggtgaatctctacattaagaacttggatgacactattgatgatgagaaattaaggaaagaattttctccttttggatcaattaccagtgctaaggtaatgctggaggatggaagaagcaaagggtttggcttcgtctgcttctcatctcctgaagaagcaaccaaagcagtcactgagatgaatggacgcattgtgggctccaagccactatatgttgccctggcccagaggaaggaagagagaaaggctcacctgaccaaccagtatatgcaacgagtggctggaatgagagcacttcctgccaatgccatcttaaatcagttccagcctgcagcgggtggctactttgtgccagcagtcccacag

SEQ ID NO: 13138 - DNA, 3594 bp, Homo sapiens
cttttggaaacatactgtcctgcaaggtaaacattgattaaatgattttagcagaataattaattgattcttgaaaacaagataaataccaaacagagaactatcttggaattggggaacaagatatgggaattttcaaaatgctggacatggaatcctaaaagttcccataggtaatctcagggccatacccagcgtaaccagcacacgctttcatacccttgttctttactcagcctgaaatatccttcctattctttagctttggaaagcccacgtttttcttttgggatgggggaaagtagaggaccagagaagtgtctctagtcttgaggaaacttaatcactttagaagcataaattcactctattccttctacgtatctgttctatgctgagcactttaaaacttaaacggtggtggtgtatatgtttaatgccatactacactgaaaatctgttgtggccttggaaaatgttttgttttctgcatcaccgtggtttgcacccagatctcttaaaatgtgttgttgtgttttaaagagacagagtcttgctctgtctgtcacccagggtggagtgcagtggtctagtaatagctcattgtagcttcgacctcctgggctcaagccatcctcccacctcagcctcccaagtagctggaactacaggcacgtgccaccacactcatttaatttttttcttttttgtagagacagggtctccattgtccaacgatctggctccaacgatcctcctgctttggcctcccaaagcattgggattacaggcatgagccacagcacccaattttaagtattttttgtttgtttgtttttgataaaaataaaacatttggaatagaagcatcttagtagggctacctttgtaaatggaacacttactaggcacctggtgctgtgctaggtgttagaaaaattatactggtgtacttgaccaccattggccatggatgggctagagtctcctcaggcacaagataccctgaggttctcatgtctcaggagctggccagttctgctaaagtggtccgccttgtctttgacaggtggtgtgtgatgagaacggctctaagggttatgcctttgtccacttcgagacccaagaggctgccgacaaggccatcgagaagatgaatggcatgctcctcaatgaccgcaaagtgtgagtgtcccagtccggagcaacaaccatcgcatgagccagccgtggccccacctcgctattaactggcacacacaaggcggctactggttctcggcccaagtgtggcctgctcctacctctccactccagggctggtgagtctccctgcctgagccgtggcagcccttttgactcgccaaggtgggcttcctgcccaagccatggcctgcctgccgcctctcccttaaaggcatctgtctgtgggttttgtgagcatcaacaactggggctggctggaaagcagctctaagctcactctgagtcggggtcttggccagcggcagagtggagagggccctggactgaccaggagctgtatactagcagtgtgaccttggctttcctgtgattcaggtctgtccatgggtccctcgctagtggttgatgccaaattgtccccgcggttctccattttctaacttatgactcagtgacctaatacaaggctggctccacagtaatacttggtgacaatgaaaaaatcccatccctttgcagaaaaacttcataacagaccttgttgctttgatgtggttgttactgtagaatgcagagagggggaacttaccaaagccatatggggagaagaagagacaataagtcttggctattacaagccaaaataatttttgtcctttgtgtcattcagtatgccagaggatgggttatctttataatgtctgtgtgtgcagtggttgatctacagatatcactaaaaagaaatacaaaaatgtcagtgcatggataaattttcttttaagtataacagaccaaaataaataaatttaaaaagcaaagggtgccccttcactccaacaatctcatatctaggattaaccactgttaacagtttggtttgtatccttccagaccttttctatgcatttacatagttgcacagaaatgaacattttaaaaacatggccatcaggtttcttcatgaaggcagtgtgatgtggtaggaatagccctggtctaagccaggagccctggggctggtcctcacaggatagtcctgcctttttctctttctgctggggacttggggtatctctgagcctccttggtggtggatggggatctcgtgttttaacctctcctgtcagtctttaacctgtattcctttgggtccctggacatcatgttttattcctctgggtaattactgttcttcatggtttcattttagatttgtgggcagattcaagtctcgcaaagagcgggaagctgagcttggagccaaagccaaggaattcaccaatgtttatatcaaaaactttggggaagaggtggatgatgagagtctgaaagagctattcagtcagtttggtaagttggggttccttgtctcctttcacagtctaccagacccatctgttttttcttaagagatgagggcactgctccagagatttgcttcaagtgagtttccagagggaagccttctgttcctgagctgtgctcaagatggtgttactaatagttctgtcctttggtaataggtaagaccctaagtgtcaaggtgatgagagatcccaatgggaaatccaaaggctttggctttgtgagttacgaaaaacacgaggatgccaataaggtgagtataccacaaagattgggaaaagcttttaagaggttgccccagagtatgggtagggtcttgctagcacctacctagagctgggacggtctgagtatctggtagtagatgtaccattactatactctgggatcatcttcctgggttccgcatgttaacttcatgtaggtgtttacaaagcacttggcacatacctgtcacctcagctatcagttgttgaaagaataggacagacgtttgttatgctgcaaaggtgagagaactaaagcccagtgagtgctgatttgataacagcacggcagctacttgtgggcaaagcattgtgccagaccctcaatatttatcacttaaatacccacaaaagcacctgcagaatttactggcagccggaatattatatcgccctaggctcatgtcagcacacttgtgtttatacacctgtactatttctatattatctggatcaataacccatttaaatattaacctcactttacagatgaggaagtttggatttgtgtgacagacttcagaggtggagtgaatttagtttttagtcctatagtagaaagaatattttttgggacttagacctccagaataagaccccatcgctgcaactttattttaaagacatatttttcctctctaggctgtggaagagatgaatggaaaagaaataagtggtaaaatcatatttgtaggccgtgcacaaaagaaagtagaacggcaggcagagttaaaacggaaatttgaacagttgaaac

SEQ ID NO: 13139 - DNA, 591 bp, Homo sapiens
cttttggaaacatactgtcctgcaagagacagggtctccattgtccaacgatctggctccaacgatcctcctgctttggcctcccaaagcattgggattacaggcatgagccacagcacccaattgtggtgtgtgatgagaacggctctaagggttatgcctttgtccacttcgagacccaagaggctgccgacaaggccatcgagaagatgaatggcatgctcctcaatgaccgcaaagtatttgtgggcagattcaagtctcgcaaagagcgggaagctgagcttggagccaaagccaaggaattcaccaatgtttatatcaaaaactttggggaagaggtggatgatgagagtctgaaagagctattcagtcagtttggtaagaccctaagtgtcaaggtgatgagagatcccaatgggaaatccaaaggctttggctttgtgagttacgaaaaacacgaggatgccaataaggctgtggaagagatgaatggaaaagaaataagtggtaaaatcatatttgtaggccgtgcacaaaagaaagtagaacggcaggcagagttaaaacggaaatttgaacagttgaaac

SEQ ID NO: 13140 - DNA, 913 bp, Homo sapiens
ccaagtgctatacgccagtctgggcctcgtccaactcttcgccatctggctccaactggtaatgctccggcctctcgtggcctccctactaccactcagagagtcggtgagcaaactggcctttagaagtgtggcctggggaggagggagtcaggatgactaggctctgtcctgggttggtcagtttgttgggctcgaatttatcgagtcctggttctgtaatcttagctgtgtgcttaggtggccacttcaggagcagagaaacagtatgagttctaggtgtgtcagttgcttttaacattctttgctcatcggtgacctatgtgaaaaaggttagttgtagaagtttgctagctggatgaccacagaggcagcttgttcttttgggtggggtgaggaatacaaggaaacagtgtatacagaatatgtcttgtattccaagatgtggaaagagttgtatgttatcctttggctcatcctcgaaagtagtagtggccccctgtgcaatgtgttgcgtaaacgtgctttgaaatttctccttccgtgggacgtggccagttggacatctgccgccaacactgatgtgcatttgctggtctgttgtagggtctgagtgcccggaccgcttggctatggactttggtggggctggtgccgcccagcaagggctgactgacagctgccagtctggaggtggtattggatgcacacagaagggggaaagatgggatttgacgggtctttgcccagactgatgggctttaattgtatttgttctttccctaaggcgttcccacagctgtgcagaacttagcgccacgcgctgctgttgctgctgctgctccccgggctgttgccccctacaaatacgcctccagtgtccgcagccctcatcctgccatacagcctctgc

SEQ ID NO: 13141 - DNA, 413 bp, Homo sapiens
ccaagtgctatacgccagtctgggcctcgtccaactcttcgccatctggctccaactggtaatgctccggcctctcgtggcctccctactaccactcagagagtcgggtctgagtgcccggaccgcttggctatggactttggtggggctggtgccgcccagcaagggctgactgacagctgccagtctggaggtggtattggatgcacacagaagggggaaagatgggatttgacgggtctttgcccagactgatgggctttaattgtatttgttctttccctaaggcgttcccacagctgtgcagaacttagcgccacgcgctgctgttgctgctgctgctccccgggctgttgccccctacaaatacgcctccagtgtccgcagccctcatcctgccatacagcctctgc

SEQ ID NO: 13142 - DNA, 1195 bp, Homo sapiens
ggatgcccaggtgcagcagaaagtgggatctgctgcccccaggacccctctcgtcatgccttgactgtgactggaggctgcagtgggtatttgggaaagtagttagcaccagaagcctagggatcatctgtacagttggctttggtccaccactaggtctgggcactggggaggggtggagtagctctcctagattcactgaccacctgaagatttctcgcaggtggatgaagctgtagcagttctacaggctcatcatgccaagaaagaagctgcccagaaggtgggcgctgttgctgctgctacctcttagacaaggaaaaaccgtatgtgtggctattttcatttttgttcctatgagcattgttcctatgagcattgtctttgtggtttgacctgaggttgtatatatgctcactgcttagctctgggaatacaataagtacagttagttacacggagtgtgttgcaggtgacttcttatcatgaggactgtggactttgtctgcaggagcttgagtgaataataaaactagtactggttgatggttgtaggtgtctccagatagggaaagaagagacagtaaaataagctaaggaaaaagcacatggtaaggaccagagctggtgtgttgggagggttgacttggcatagtcatgaccctcttgtcaagggcctcaggagccttgtcatctagtggtaaagaccagagatgctgctaaatgttgtacagtacacaggaggacagacccaacagaatgtccaaagtgtcaatagcactgaggttgagaaactctcttctagaataccttcctttatccactatatgttaatgaatctaaattatttgattatgcatttatttgtgttggtgcttttctttacaggattcaaaagccaaataaccccttatggaattcaactcaaggtttgaagacttcctagcttgtcctatggacctcaacaccaaggattacaaattgcaaatttaataggtcattttgtatcaaaaggtcaattatgaagcacctagaatttttcaattatacgaatatgttctttgggttctgctgtggcccagacagtgttaactttttttttattgtgggttttgattttttcccccagaaattggttttatttgatgtacccaagtcttacgtttcccaataaagaaaaaaaatctccataaaa

SEQ ID NO: 13143 - DNA, 633 bp, Homo sapiens
ggatgcccaggtgcagcagaaagtgggatctgctgcccccaggacccctctcgtcatgccttgactgtgactggaggctgcagtgggtatttgggaaagtagttagcaccagaagcctagggatcatctgtacagttggctttggtccaccactaggtctgggcactggggaggggtggagtagctctcctagattcactgaccacctgaagatttctcgcaggtggatgaagctgtagcagttctacaggctcatcatgccaagaaagaagctgcccagaaggtgggcgctgttgctgctgctacctcttagacaaggaaaaaccgattcaaaagccaaataaccccttatggaattcaactcaaggtttgaagacttcctagcttgtcctatggacctcaacaccaaggattacaaattgcaaatttaataggtcattttgtatcaaaaggtcaattatgaagcacctagaatttttcaattatacgaatatgttctttgggttctgctgtggcccagacagtgttaactttttttttattgtgggttttgattttttcccccagaaattggttttatttgatgtacccaagtcttacgtttcccaataaagaaaaaaaatctccataaaa

SEQ ID NO: 13144 - DNA, 951 bp, Homo sapiens
agagcacttcctgccaatgccatcttaaatcagttccagcctgcagcgggtggctactttgtgccagcagtcccacaggtgggtgtgctgtttggtcacagctcttgggaacctgccggctggcagtattctgcagtggttggggagagggatttttcgttattagagttctagaatgtcacaataaggacccttcaagtaaaaatgaaggacttacccatggtcacaaacacacacccacagtggcagtggtagcataaaacagtccccattagctgacccctcagctcttgaatagaaagaacatttaaataattagcttaggtcctggttagtgagatgagatgagatacttctctaggatgggttcagtccttaagggggtgtttgggtattcttctgtcttacaggctcagggaaggcctccatattatacacctaaccagttagcacagatgaggcctaatccacgctggcagcaaggtgggagacctcaaggtaggtggtggggaacagtaattgacagcccaggatatacctgtcctggtctcccctgcctttccttcttccccactctgaggcacagcctaggttctggtccacatcacttctcaatgatgtgcaatttttctcttcaccaggcttccaaggaatgccaagtgctatacgccagtctgggcctcgtccaactcttcgccatctggctccaactggtaatgctccggcctctcgtggcctccctactaccactcagagagtcggtgagcaaactggcctttagaagtgtggcctggggaggagggagtcaggatgactaggctctgtcctgggttggtcagtttgttgggctcgaatttatcgagtcctggttctgtaatcttagctgtgtgcttaggtggccacttcaggagcagagaaacagtatgagttctaggtgtgtcagttgctttt

SEQ ID NO: 13145 - DNA, 476 bp, Homo sapiens
agagcacttcctgccaatgccatcttaaatcagttccagcctgcagcgggtggctactttgtgccagcagtcccacaggctcagggaaggcctccatattatacacctaaccagttagcacagatgaggcctaatccacgctggcagcaaggtgggagacctcaaggcttccaaggaatgccaagtgctatacgccagtctgggcctcgtccaactcttcgccatctggctccaactggtaatgctccggcctctcgtggcctccctactaccactcagagagtcggtgagcaaactggcctttagaagtgtggcctggggaggagggagtcaggatgactaggctctgtcctgggttggtcagtttgttgggctcgaatttatcgagtcctggttctgtaatcttagctgtgtgcttaggtggccacttcaggagcagagaaacagtatgagttctaggtgtgtcagttgctttt

SEQ ID NO: 13146 - DNA, 1741 bp, Homo sapiens
aggaaacagtgtatacagaatatgtcttgtattccaagatgtggaaagagttgtatgttatcctttggctcatcctcgaaagtagtagtggccccctgtgcaatgtgttgcgtaaacgtgctttgaaatttctccttccgtgggacgtggccagttggacatctgccgccaacactgatgtgcatttgctggtctgttgtagggtctgagtgcccggaccgcttggctatggactttggtggggctggtgccgcccagcaagggctgactgacagctgccagtctggaggtggtattggatgcacacagaagggggaaagatgggatttgacgggtctttgcccagactgatgggctttaattgtatttgttctttccctaaggcgttcccacagctgtgcagaacttagcgccacgcgctgctgttgctgctgctgctccccgggctgttgccccctacaaatacgcctccagtgtccgcagccctcatcctgccatacagcctctgcaggtgaggttcaccagacagaatgcttaaaaggatttcccccatttccacttgatgtaaaagaagctgtgcttttgattccttcaacaggtattaaatgcctgctctgtgttatgacgctatgttctgattcactgtccctgcccttcaggggctcactagtgggaaagaaggggcttaaaagtgctctgcctgatgccagttcactcagaaatgcctcagagcgggcagccagtgcttcctcttctgtttgtacgaaataatgtgctcattcagctgtttgagcctccaggtcacttccgcatccaatgacctattggatccttggctgctctgcaagatgattggtacattaatgcaggaaataacttcaacttacagatcggatgttcagcttcaaagatgtaaagtgtgtgtaggaggtgaaggggttgaacctagagcttagattttctaagctgtaacttgctgtctctagacctgtgctctagatgcaactagtttgtttcagagcctaatagcaatttgctgtggaggtgtcaccctaagccttcaggcccataagctgcttaggagattactctttaactgtcctgtctcatactctctaagttggggatttcctagaacttgatgctatgtaaaataccttttctttgcaaggctttgactagcattgacgttgcatgttgaccgtttttaagcatttgatacaaaaacatttggtagaattaaggtgatgtggaatgtaattataaatgtgttgatatttactccctttgatccaatctgcactgagatttaccctaaaggaaaactaattttcaggaaaaggttatatacaagtgtttacccttatttatatcaaggcttttcattcttgagtaactttgggtgtattaaggaaatgtcagaaaatgcttgcctagcactataggtttgttttattatttacgtttcacttcgctttctgatagcatgccattttcattgtaattggttgtgtttatgtccataccactctgttcctcaacacacccctcaatccttcaaggactgaaattagttcctttagagcaaggacagccacctcctctcctctttcacatagtcagatgttcagatattgaacaggcactcaaccaccatcaggtgttgtcctttcctcagtgctaacccactgcctttcctggttcccaggcaccccagcctgcggtccatgtgcaggggcag

SEQ ID NO: 13147 - DNA, 450 bp, Homo sapiens
aggaaacagtgtatacagaatatgtcttgtattccaagatgtggaaagagttgtatgttatcctttggctcatcctcgaaagtagtagtggccccctgtgcaatgtgttgcgtaaacgtgctttgaaatttctccttccgtgggacgtggccagttggacatctgccgccaacactgatgtgcatttgctggtctgttgtagggtctgagtgcccggaccgcttggctatggactttggtggggctggtgccgcccagcaagggctgactgacagctgccagtctggaggcgttcccacagctgtgcagaacttagcgccacgcgctgctgttgctgctgctgctccccgggctgttgccccctacaaatacgcctccagtgtccgcagccctcatcctgccatacagcctctgcaggcaccccagcctgcggtccatgtgcaggggcag

SEQ ID NO: 13148 - DNA, 3223 bp, Homo sapiens
agtggccccctgtgcaatgtgttgcgtaaacgtgctttgaaatttctccttccgtgggacgtggccagttggacatctgccgccaacactgatgtgcatttgctggtctgttgtagggtctgagtgcccggaccgcttggctatggactttggtggggctggtgccgcccagcaagggctgactgacagctgccagtctggaggtggtattggatgcacacagaagggggaaagatgggatttgacgggtctttgcccagactgatgggctttaattgtatttgttctttccctaaggcgttcccacagctgtgcagaacttagcgccacgcgctgctgttgctgctgctgctccccgggctgttgccccctacaaatacgcctccagtgtccgcagccctcatcctgccatacagcctctgcaggtgaggttcaccagacagaatgcttaaaaggatttcccccatttccacttgatgtaaaagaagctgtgcttttgattccttcaacaggtattaaatgcctgctctgtgttatgacgctatgttctgattcactgtccctgcccttcaggggctcactagtgggaaagaaggggcttaaaagtgctctgcctgatgccagttcactcagaaatgcctcagagcgggcagccagtgcttcctcttctgtttgtacgaaataatgtgctcattcagctgtttgagcctccaggtcacttccgcatccaatgacctattggatccttggctgctctgcaagatgattggtacattaatgcaggaaataacttcaacttacagatcggatgttcagcttcaaagatgtaaagtgtgtgtaggaggtgaaggggttgaacctagagcttagattttctaagctgtaacttgctgtctctagacctgtgctctagatgcaactagtttgtttcagagcctaatagcaatttgctgtggaggtgtcaccctaagccttcaggcccataagctgcttaggagattactctttaactgtcctgtctcatactctctaagttggggatttcctagaacttgatgctatgtaaaataccttttctttgcaaggctttgactagcattgacgttgcatgttgaccgtttttaagcatttgatacaaaaacatttggtagaattaaggtgatgtggaatgtaattataaatgtgttgatatttactccctttgatccaatctgcactgagatttaccctaaaggaaaactaattttcaggaaaaggttatatacaagtgtttacccttatttatatcaaggcttttcattcttgagtaactttgggtgtattaaggaaatgtcagaaaatgcttgcctagcactataggtttgttttattatttacgtttcacttcgctttctgatagcatgccattttcattgtaattggttgtgtttatgtccataccactctgttcctcaacacacccctcaatccttcaaggactgaaattagttcctttagagcaaggacagccacctcctctcctctttcacatagtcagatgttcagatattgaacaggcactcaaccaccatcaggtgttgtcctttcctcagtgctaacccactgcctttcctggttcccaggcaccccagcctgcggtccatgtgcaggggcaggagccactgactgcctccatgctggctgcagcacccccccaggaacagaagcagatgctgggtgagtgacccacttgcttgcagaagaagagggtcccagagcctgatgccagctaggacaccagtgtccattgtttactgggatttgatttgtttttttattaactatcctccccataggagaacgcttgttcccactcatccaaacaatgcattcaaatctggctgggaagatcacgggaatgctgctggagatagacaactctgagctgctgcacatgttagagtcccccgagtctctccgctccaaggtgagctggggctcagaccctgcagcttcagttctcagcttgggaagactgggggcaaacttggatgcccaggtgcagcagaaagtgggatctgctgcccccaggacccctctcgtcatgccttgactgtgactggaggctgcagtgggtatttgggaaagtagttagcaccagaagcctagggatcatctgtacagttggctttggtccaccactaggtctgggcactggggaggggtggagtagctctcctagattcactgaccacctgaagatttctcgcaggtggatgaagctgtagcagttctacaggctcatcatgccaagaaagaagctgcccagaaggtgggcgctgttgctgctgctacctcttagacaaggaaaaaccgtatgtgtggctattttcatttttgttcctatgagcattgttcctatgagcattgtctttgtggtttgacctgaggttgtatatatgctcactgcttagctctgggaatacaataagtacagttagttacacggagtgtgttgcaggtgacttcttatcatgaggactgtggactttgtctgcaggagcttgagtgaataataaaactagtactggttgatggttgtaggtgtctccagatagggaaagaagagacagtaaaataagctaaggaaaaagcacatggtaaggaccagagctggtgtgttgggagggttgacttggcatagtcatgaccctcttgtcaagggcctcaggagccttgtcatctagtggtaaagaccagagatgctgctaaatgttgtacagtacacaggaggacagacccaacagaatgtccaaagtgtcaatagcactgaggttgagaaactctcttctagaataccttcctttatccactatatgttaatgaatctaaattatttgattatgcatttatttgtgttggtgcttttctttacaggattcaaaagccaaataaccccttatggaattcaactcaaggtttgaagacttcctagcttgtcctatggacctcaacaccaaggattacaaattgcaaatttaataggtcattttgtatcaaaaggtcaattatgaagcacctagaatttttcaattatacgaatatgttctttgggttctgctgtggcccagacagtgttaactttttttttattgtgggttttgattttttcccccagaaattggttttatttgatgtacccaagtcttacgtttcccaataaagaaaaaaaatctccataaaa

SEQ ID NO: 13149 - DNA, 2257 bp, Homo sapiens
agtggccccctgtgcaatgtgttgcgtaaacgtgctttgaaatttctccttccgtgggacgtggccagttggacatctgccgccaacactgatgtgcatttgctggtctgttgtagggtctgagtgcccggaccgcttggctatggactttggtggggctggtgccgcccagcaagggctgactgacagctgccagtctggaggtggtattggatgcacacagaagggggaaagatgggatttgacgggtctttgcccagactgatgggctttaattgtatttgttctttccctaaggcgttcccacagctgtgcagaacttagcgccacgcgctgctgttgctgctgctgctccccgggctgttgccccctacaaatacgcctccagtgtccgcagccctcatcctgccatacagcctctgcaggtgaggttcaccagacagaatgcttaaaaggatttcccccatttccacttgatgtaaaagaagctgtgcttttgattccttcaacaggtattaaatgcctgctctgtgttatgacgctatgttctgattcactgtccctgcccttcaggggctcactagtgggaaagaaggggcttaaaagtgctctgcctgatgccagttcactcagaaatgcctcagagcgggcagccagtgcttcctcttctgtttgtacgaaataatgtgctcattcagctgtttgagcctccaggtcacttccgcatccaatgacctattggatccttggctgctctgcaagatgattggtacattaatgcaggaaataacttcaacttacagatcggatgttcagcttcaaagatgtaaagtgtgtgtaggaggtgaaggggttgaacctagagcttagattttctaagctgtaacttgctgtctctagacctgtgctctagatgcaactagtttgtttcagagcctaatagcaatttgctgtggaggtgtcaccctaagccttcaggcccataagctgcttaggagattactctttaactgtcctgtctcatactctctaagttggggatttcctagaacttgatgctatgtaaaataccttttctttgcaaggctttgactagcattgacgttgcatgttgaccgtttttaagcatttgatacaaaaacatttggtagaattaaggtgatgtggaatgtaattataaatgtgttgatatttactccctttgatccaatctgcactgagatttaccctaaaggaaaactaattttcaggaaaaggttatatacaagtgtttacccttatttatatcaaggcttttcattcttgagtaactttgggtgtattaaggaaatgtcagaaaatgcttgcctagcactataggtttgttttattatttacgtttcacttcgctttctgatagcatgccattttcattgtaattggttgtgtttatgtccataccactctgttcctcaacacacccctcaatccttcaaggactgaaattagttcctttagagcaaggacagccacctcctctcctctttcacatagtcagatgttcagatattgaacaggcactcaaccaccatcaggtgttgtcctttcctcagtgctaacccactgcctttcctggttcccaggcaccccagcctgcggtccatgtgcaggggcaggagccactgactgcctccatgctggctgcagcacccccccaggaacagaagcagatgctgggagaacgcttgttcccactcatccaaacaatgcattcaaatctggctgggaagatcacgggaatgctgctggagatagacaactctgagctgctgcacatgttagagtcccccgagtctctccgctccaaggtggatgaagctgtagcagttctacaggctcatcatgccaagaaagaagctgcccagaaggtgggcgctgttgctgctgctacctcttagacaaggaaaaaccgattcaaaagccaaataaccccttatggaattcaactcaaggtttgaagacttcctagcttgtcctatggacctcaacaccaaggattacaaattgcaaatttaataggtcattttgtatcaaaaggtcaattatgaagcacctagaatttttcaattatacgaatatgttctttgggttctgctgtggcccagacagtgttaactttttttttattgtgggttttgattttttcccccagaaattggttttatttgatgtacccaagtcttacgtttcccaataaagaaaaaaaatctccataaaa

SEQ ID NO: 13150 - DNA, 496 bp, Homo sapiens
attcaagtctcgcaaagagcgggaagctgagcttggagccaaagccaaggaattcaccaatgtttatatcaaaaactttggggaagaggtggatgatgagagtctgaaagagctattcagtcagtttggtaagttggggttccttgtctcctttcacagtctaccagacccatctgttttttcttaagagatgagggcactgctccagagatttgcttcaagtgagtttccagagggaagccttctgttcctgagctgtgctcaagatggtgttactaatagttctgtcctttggtaataggtaagaccctaagtgtcaaggtgatgagagatcccaatgggaaatccaaaggctttggctttgtgagttacgaaaaacacgaggatgccaataaggtgagtataccacaaagattgggaaaagcttttaagaggttgccccagagtatgggtagggtcttgctagcacctacctagagctgggacggtctgagta

SEQ ID NO: 13151 - DNA, 323 bp, Homo sapiens
attcaagtctcgcaaagagcgggaagctgagcttggagccaaagccaaggaattcaccaatgtttatatcaaaaactttggggaagaggtggatgatgagagtctgaaagagctattcagtcagtttggtaagaccctaagtgtcaaggtgatgagagatcccaatgggaaatccaaaggctttggctttgtgagttacgaaaaacacgaggatgccaataaggtgagtataccacaaagattgggaaaagcttttaagaggttgccccagagtatgggtagggtcttgctagcacctacctagagctgggacggtctgagta

SEQ ID NO: 13152 - DNA, 3110 bp, Homo sapiens
gggcagtagtttcacaactttggacttgcatcagattcatcagcagagcttgttaaaacagatagctgggctccagccccagagtttttcttattcattgggtttggggtctggcctaagaatttcatttctttcttttttttttttttttcttgagacagtctcgctctgtcgcccaggttggagtgcagtggcacaatctcggctcactgcaaactccgcctcccgggttcgcaccattctcctgccttagcctcctgagtagctgggactacaggcacccgccaccatgcctggctaattttttgtatttttagtagagacggggtttcactgtgttagccaggatggtctcgatctcctgaccttgtgattcgcccgcctcggcctcccaaagtgctgggattacaggcgtgagccaccgcgtccggccgagaatttcatttctaacaagttcccaaagatgctggtgctcctggtctggggccacccttggggaaccactttcttagggaatatttgtgatatagaagtgtagttaacagtgatctttttccttcagggggtgaatctctacattaagaacttggatgacactattgatgatgagaaattaaggaaagaattttctccttttggatcaattaccagtgctaaggtattatactgcgatctggggattgaaagcagtggtattccattataggcttattggcatttgtcccattgaaggaatagcatttaaattatgttcatttctgaaagtagctactacgtttttctagcaaaatttctggatgcattctggagaatgacatttcattaggttaacattacactgtttcccaagcactggagtctggagaggaatttgacccagcccctccttgccaactcagagcacctgaatctttcccattccttgctgcctcgtgccggtgtggggacagatggtgctacagaatgagcagaggaaatccagacaggttgttttccatttgtcttggggcctgtctctacagctctgccacattttctccttgagaatgaaggtattttgaagattttggaggtgggcttgggaacttctaccctggtcttaaaaagagaggaaaggggagtggaaggtttttctatgtttcgtagtgtgcatcatttgcttgattttctttgataatcatatcaactaagttagcagggtaagtaggaacctcattttaaagataaggaattttagtccttgaacaagagaatgctgactacatggggatggtgtactgcttgtccttggcactttgggagcaggatggaaactggtgccatctgaacattttgagttatggccggatgcagacgccggtcttgctaaacaggtgtaccagatgccacaaaatcctttagttgatgagaagggaagccacgtgggctggtaagggcttagtggccctgccctggctcttagtggactttgctcccaacctgggaatgtggaaagcaatgttatcagttgtagtagggagttggccagaggccaactgtgggtttgcccagttcttaccctttcgtttttgctatgaccccccccttgactggccctcatcagtgtaaggagtgatcttctatccttgcttatctgcctagtagtcaagttggcatttgttaagagagcagaagagccataccttgaattgtccccattttcattatgatggtgtggcatttttattcacataccttactggcccatctcattggtagagagttatggagtgatgcacttctttacttccctatcctccacttcaggaggctctctgggccattaactaagacataaaacaatgacagtcacaccagagaagacagtgaataaccttgtctattaggaagaatgccatttgtgaatgatgaacttaatgtgggaaaagactgcctgaaccagtagacctgtggttttgtagctgtttggagtatttcttggaaattgagcctcaggaaggcaagtgagactagaatctaggctgcctatctctgagctggtcatctcattgaattaatggtggcagtcattggttacctgaacattttaggactcctgtccacacgtggtattccaaaagtgttatcctgacgttggtaagagcttgttagagtttgtccaccgaggtcttgaagcatatgagatatgaaaataaattgctcagtactactctcaagatgttttgtggttacccggagtagctatccaccaggtatcaggaaacatctttgagttcctggttttattattagccatatcatagtgtttcagaactttagcatcacctggggactcaaagaaaacacctagataccttagaggttgtgacttagttggtctggggtaaatcctgtgccagaaccctgacctagactcagtgactgcagcagaacccaggctttctggttcttctgaatagttccctccccacccagggacatccttttttttcctatttgtaggtttgttttgttttttttgttggtttggttggttggtgtttttgttttgttttgttttgttttgttttgttttgttttggagatggagtctcgctctgtcgcccaggctggagtgcagtggcgcgatctcggctcactgcaatctctgtctcccgggttgaagcggttctcctgcctcagcctcctgagtagctaggattacaggtgtgtgccaccacgcccagctgatttttgtatttttagtagagacggggttgcaccatgttggtcaggatggtcttgaattcctgacctcgtgatccacccacctcggcctcccaaagtgctgggattacaggcatgagccactgcgcctggccctttgtttttttgagatgaggtctcactacattgctcaagctggtctcaacctcctgagctcaagcagccctcccacctcagccttccaaagtgctgggattacaggcacaagccatcacacccagccagggacaccttatttcttaagtagctggtctcattttgtaggtaatgctggaggatggaagaagcaaagggtttggcttcgtctgcttctcatctcctgaagaagcaaccaaagcagtcac

SEQ ID NO: 13153 - DNA, 738 bp, Homo sapiens
gggcagtagtttcacaactttggacttgcatcagattcatcagcagagcttgttaaaacagatagctgggctccagccccagagtttttcttattcattgggtttggggtctggcctaagaatttcatttctttcttttttttttttttttcttgagacagtctcgctctgtcgcccaggttggagtgcagtggcacaatctcggctcactgcaaactccgcctcccgggttcgcaccattctcctgccttagcctcctgagtagctgggactacaggcacccgccaccatgcctggctaattttttgtatttttagtagagacggggtttcactgtgttagccaggatggtctcgatctcctgaccttgtgattcgcccgcctcggcctcccaaagtgctgggattacaggcgtgagccaccgcgtccggccgagaatttcatttctaacaagttcccaaagatgctggtgctcctggtctggggccacccttggggaaccactttcttagggaatatttgtgatatagaagtgtagttaacagtgatctttttccttcagggggtgaatctctacattaagaacttggatgacactattgatgatgagaaattaaggaaagaattttctccttttggatcaattaccagtgctaaggtaatgctggaggatggaagaagcaaagggtttggcttcgtctgcttctcatctcctgaagaagcaaccaaagcagtcac

SEQ ID NO: 13154 - DNA, 1788 bp, Homo sapiens
agagaaaggctcacctgaccaaccagtatatgcaacgagtggctggaatgagagcacttcctgccaatgccatcttaaatcagttccagcctgcagcgggtggctactttgtgccagcagtcccacaggtgggtgtgctgtttggtcacagctcttgggaacctgccggctggcagtattctgcagtggttggggagagggatttttcgttattagagttctagaatgtcacaataaggacccttcaagtaaaaatgaaggacttacccatggtcacaaacacacacccacagtggcagtggtagcataaaacagtccccattagctgacccctcagctcttgaatagaaagaacatttaaataattagcttaggtcctggttagtgagatgagatgagatacttctctaggatgggttcagtccttaagggggtgtttgggtattcttctgtcttacaggctcagggaaggcctccatattatacacctaaccagttagcacagatgaggcctaatccacgctggcagcaaggtgggagacctcaaggtaggtggtggggaacagtaattgacagcccaggatatacctgtcctggtctcccctgcctttccttcttccccactctgaggcacagcctaggttctggtccacatcacttctcaatgatgtgcaatttttctcttcaccaggcttccaaggaatgccaagtgctatacgccagtctgggcctcgtccaactcttcgccatctggctccaactggtaatgctccggcctctcgtggcctccctactaccactcagagagtcggtgagcaaactggcctttagaagtgtggcctggggaggagggagtcaggatgactaggctctgtcctgggttggtcagtttgttgggctcgaatttatcgagtcctggttctgtaatcttagctgtgtgcttaggtggccacttcaggagcagagaaacagtatgagttctaggtgtgtcagttgcttttaacattctttgctcatcggtgacctatgtgaaaaaggttagttgtagaagtttgctagctggatgaccacagaggcagcttgttcttttgggtggggtgaggaatacaaggaaacagtgtatacagaatatgtcttgtattccaagatgtggaaagagttgtatgttatcctttggctcatcctcgaaagtagtagtggccccctgtgcaatgtgttgcgtaaacgtgctttgaaatttctccttccgtgggacgtggccagttggacatctgccgccaacactgatgtgcatttgctggtctgttgtagggtctgagtgcccggaccgcttggctatggactttggtggggctggtgccgcccagcaagggctgactgacagctgccagtctggaggtggtattggatgcacacagaagggggaaagatgggatttgacgggtctttgcccagactgatgggctttaattgtatttgttctttccctaaggcgttcccacagctgtgcagaacttagcgccacgcgctgctgttgctgctgctgctccccgggctgttgccccctacaaatacgcctccagtgtccgcagccctcatcctgccatacagcctctgcaggtgaggttcaccagacagaatgcttaaaaggatttcccccatttccacttgatgtaaaagaagctgtgcttttgattccttcaacaggtattaaatgcctgctctgtgttatgacgctatgttctgattcactgtccctgcccttcaggggctcactagtgggaaaga

SEQ ID NO: 13155 - DNA, 765 bp, Homo sapiens
agagaaaggctcacctgaccaaccagtatatgcaacgagtggctggaatgagagcacttcctgccaatgccatcttaaatcagttccagcctgcagcgggtggctactttgtgccagcagtcccacaggctcagggaaggcctccatattatacacctaaccagttagcacagatgaggcctaatccacgctggcagcaaggtgggagacctcaaggcttccaaggaatgccaagtgctatacgccagtctgggcctcgtccaactcttcgccatctggctccaactgggtctgagtgcccggaccgcttggctatggactttggtggggctggtgccgcccagcaagggctgactgacagctgccagtctggaggtggtattggatgcacacagaagggggaaagatgggatttgacgggtctttgcccagactgatgggctttaattgtatttgttctttccctaaggcgttcccacagctgtgcagaacttagcgccacgcgctgctgttgctgctgctgctccccgggctgttgccccctacaaatacgcctccagtgtccgcagccctcatcctgccatacagcctctgcaggtgaggttcaccagacagaatgcttaaaaggatttcccccatttccacttgatgtaaaagaagctgtgcttttgattccttcaacaggtattaaatgcctgctctgtgttatgacgctatgttctgattcactgtccctgcccttcaggggctcactagtgggaaaga

SEQ ID NO: 13156 - DNA, 4472 bp, Homo sapiens
agagttaaaacggaaatttgaacagttgaaacaggagagaattagtcgatatcaggtaaggtggtcttggcccagcctagcaatgggatttgctgtgaaatatttgcagaacacccctatgtttagcgggctttctttttgaggacttggagtgtgttcttcttcccattttacctaaaaagatgaggtttaaaaggatatatacctactacatatgactgattattatagaaccagaaacaagagatgggtttattcatcaagaagctctctattttggaagcctcagcctgttgcttttagccatgtaggttccttttacttaaatgagactcctttgtttggcatggcttcaagaagacccctgctggggtgggtgagtggtcaccagaacagctgtggggagaggtgacaaaaggtgagtgcactgatgatcctgtcagtttcagggcagtagtttcacaactttggacttgcatcagattcatcagcagagcttgttaaaacagatagctgggctccagccccagagtttttcttattcattgggtttggggtctggcctaagaatttcatttctttcttttttttttttttttcttgagacagtctcgctctgtcgcccaggttggagtgcagtggcacaatctcggctcactgcaaactccgcctcccgggttcgcaccattctcctgccttagcctcctgagtagctgggactacaggcacccgccaccatgcctggctaattttttgtatttttagtagagacggggtttcactgtgttagccaggatggtctcgatctcctgaccttgtgattcgcccgcctcggcctcccaaagtgctgggattacaggcgtgagccaccgcgtccggccgagaatttcatttctaacaagttcccaaagatgctggtgctcctggtctggggccacccttggggaaccactttcttagggaatatttgtgatatagaagtgtagttaacagtgatctttttccttcagggggtgaatctctacattaagaacttggatgacactattgatgatgagaaattaaggaaagaattttctccttttggatcaattaccagtgctaaggtattatactgcgatctggggattgaaagcagtggtattccattataggcttattggcatttgtcccattgaaggaatagcatttaaattatgttcatttctgaaagtagctactacgtttttctagcaaaatttctggatgcattctggagaatgacatttcattaggttaacattacactgtttcccaagcactggagtctggagaggaatttgacccagcccctccttgccaactcagagcacctgaatctttcccattccttgctgcctcgtgccggtgtggggacagatggtgctacagaatgagcagaggaaatccagacaggttgttttccatttgtcttggggcctgtctctacagctctgccacattttctccttgagaatgaaggtattttgaagattttggaggtgggcttgggaacttctaccctggtcttaaaaagagaggaaaggggagtggaaggtttttctatgtttcgtagtgtgcatcatttgcttgattttctttgataatcatatcaactaagttagcagggtaagtaggaacctcattttaaagataaggaattttagtccttgaacaagagaatgctgactacatggggatggtgtactgcttgtccttggcactttgggagcaggatggaaactggtgccatctgaacattttgagttatggccggatgcagacgccggtcttgctaaacaggtgtaccagatgccacaaaatcctttagttgatgagaagggaagccacgtgggctggtaagggcttagtggccctgccctggctcttagtggactttgctcccaacctgggaatgtggaaagcaatgttatcagttgtagtagggagttggccagaggccaactgtgggtttgcccagttcttaccctttcgtttttgctatgaccccccccttgactggccctcatcagtgtaaggagtgatcttctatccttgcttatctgcctagtagtcaagttggcatttgttaagagagcagaagagccataccttgaattgtccccattttcattatgatggtgtggcatttttattcacataccttactggcccatctcattggtagagagttatggagtgatgcacttctttacttccctatcctccacttcaggaggctctctgggccattaactaagacataaaacaatgacagtcacaccagagaagacagtgaataaccttgtctattaggaagaatgccatttgtgaatgatgaacttaatgtgggaaaagactgcctgaaccagtagacctgtggttttgtagctgtttggagtatttcttggaaattgagcctcaggaaggcaagtgagactagaatctaggctgcctatctctgagctggtcatctcattgaattaatggtggcagtcattggttacctgaacattttaggactcctgtccacacgtggtattccaaaagtgttatcctgacgttggtaagagcttgttagagtttgtccaccgaggtcttgaagcatatgagatatgaaaataaattgctcagtactactctcaagatgttttgtggttacccggagtagctatccaccaggtatcaggaaacatctttgagttcctggttttattattagccatatcatagtgtttcagaactttagcatcacctggggactcaaagaaaacacctagataccttagaggttgtgacttagttggtctggggtaaatcctgtgccagaaccctgacctagactcagtgactgcagcagaacccaggctttctggttcttctgaatagttccctccccacccagggacatccttttttttcctatttgtaggtttgttttgttttttttgttggtttggttggttggtgtttttgttttgttttgttttgttttgttttgttttgttttggagatggagtctcgctctgtcgcccaggctggagtgcagtggcgcgatctcggctcactgcaatctctgtctcccgggttgaagcggttctcctgcctcagcctcctgagtagctaggattacaggtgtgtgccaccacgcccagctgatttttgtatttttagtagagacggggttgcaccatgttggtcaggatggtcttgaattcctgacctcgtgatccacccacctcggcctcccaaagtgctgggattacaggcatgagccactgcgcctggccctttgtttttttgagatgaggtctcactacattgctcaagctggtctcaacctcctgagctcaagcagccctcccacctcagccttccaaagtgctgggattacaggcacaagccatcacacccagccagggacaccttatttcttaagtagctggtctcattttgtaggtaatgctggaggatggaagaagcaaagggtttggcttcgtctgcttctcatctcctgaagaagcaaccaaagcagtcactgagatgaatggacgcattgtgggctccaagccactatatgttgccctggcccagaggaaggaagagagaaaggctcacctgaccaaccagtatatgcaacgagtggctggaatgagagcacttcctgccaatgccatcttaaatcagttccagcctgcagcgggtggctactttgtgccagcagtcccacaggtgggtgtgctgtttggtcacagctcttgggaacctgccggctggcagtattctgcagtggttggggagagggatttttcgttattagagttctagaatgtcacaataaggacccttcaagtaaaaatgaaggacttacccatggtcacaaacacacacccacagtggcagtggtagcataaaacagtccccattagctgacccctcagctcttgaatagaaagaacatttaaataattagcttaggtcctggttagtgagatgagatgagatacttctctaggatgggttcagtccttaagggggtgtttgggtattcttctgtcttacaggctcagggaaggcctccatattatacacctaaccagttagcacagatgaggcctaatccacgctggcagcaaggtgggagacctcaaggtaggtggtggggaacagtaattgacagcccaggatatacctgtcctggtctcccctgcctttccttcttccccactctgaggcacagcctaggttctggtccacatcacttctcaatgatgtgcaatttttctcttcaccaggcttccaaggaatgccaagtgctatacgccagtctgggcctcgtccaactcttcgccatctggctccaactggtaatgctccggcctctcgtggcctccctactaccactcagagagtcggtgagcaaactggcctttagaagtgtggcctggggagg

SEQ ID NO: 13157 - DNA, 582 bp, Homo sapiens
agagttaaaacggaaatttgaacagttgaaacaggagagaattagtcgatatcagggggtgaatctctacattaagaacttggatgacactattgatgatgagaaattaaggaaagaattttctccttttggatcaattaccagtgctaaggtaatgctggaggatggaagaagcaaagggtttggcttcgtctgcttctcatctcctgaagaagcaaccaaagcagtcactgagatgaatggacgcattgtgggctccaagccactatatgttgccctggcccagaggaaggaagagagaaaggctcacctgaccaaccagtatatgcaacgagtggctggaatgagagcacttcctgccaatgccatcttaaatcagttccagcctgcagcgggtggctactttgtgccagcagtcccacaggcttccaaggaatgccaagtgctatacgccagtctgggcctcgtccaactcttcgccatctggctccaactggtaatgctccggcctctcgtggcctccctactaccactcagagagtcggtgagcaaactggcctttagaagtgtggcctggggagg

SEQ ID NO: 13158 - DNA, 2478 bp, Homo sapiens
ctattaactggcacacacaaggcggctactggttctcggcccaagtgtggcctgctcctacctctccactccagggctggtgagtctccctgcctgagccgtggcagcccttttgactcgccaaggtgggcttcctgcccaagccatggcctgcctgccgcctctcccttaaaggcatctgtctgtgggttttgtgagcatcaacaactggggctggctggaaagcagctctaagctcactctgagtcggggtcttggccagcggcagagtggagagggccctggactgaccaggagctgtatactagcagtgtgaccttggctttcctgtgattcaggtctgtccatgggtccctcgctagtggttgatgccaaattgtccccgcggttctccattttctaacttatgactcagtgacctaatacaaggctggctccacagtaatacttggtgacaatgaaaaaatcccatccctttgcagaaaaacttcataacagaccttgttgctttgatgtggttgttactgtagaatgcagagagggggaacttaccaaagccatatggggagaagaagagacaataagtcttggctattacaagccaaaataatttttgtcctttgtgtcattcagtatgccagaggatgggttatctttataatgtctgtgtgtgcagtggttgatctacagatatcactaaaaagaaatacaaaaatgtcagtgcatggataaattttcttttaagtataacagaccaaaataaataaatttaaaaagcaaagggtgccccttcactccaacaatctcatatctaggattaaccactgttaacagtttggtttgtatccttccagaccttttctatgcatttacatagttgcacagaaatgaacattttaaaaacatggccatcaggtttcttcatgaaggcagtgtgatgtggtaggaatagccctggtctaagccaggagccctggggctggtcctcacaggatagtcctgcctttttctctttctgctggggacttggggtatctctgagcctccttggtggtggatggggatctcgtgttttaacctctcctgtcagtctttaacctgtattcctttgggtccctggacatcatgttttattcctctgggtaattactgttcttcatggtttcattttagatttgtgggcagattcaagtctcgcaaagagcgggaagctgagcttggagccaaagccaaggaattcaccaatgtttatatcaaaaactttggggaagaggtggatgatgagagtctgaaagagctattcagtcagtttggtaagttggggttccttgtctcctttcacagtctaccagacccatctgttttttcttaagagatgagggcactgctccagagatttgcttcaagtgagtttccagagggaagccttctgttcctgagctgtgctcaagatggtgttactaatagttctgtcctttggtaataggtaagaccctaagtgtcaaggtgatgagagatcccaatgggaaatccaaaggctttggctttgtgagttacgaaaaacacgaggatgccaataaggtgagtataccacaaagattgggaaaagcttttaagaggttgccccagagtatgggtagggtcttgctagcacctacctagagctgggacggtctgagtatctggtagtagatgtaccattactatactctgggatcatcttcctgggttccgcatgttaacttcatgtaggtgtttacaaagcacttggcacatacctgtcacctcagctatcagttgttgaaagaataggacagacgtttgttatgctgcaaaggtgagagaactaaagcccagtgagtgctgatttgataacagcacggcagctacttgtgggcaaagcattgtgccagaccctcaatatttatcacttaaatacccacaaaagcacctgcagaatttactggcagccggaatattatatcgccctaggctcatgtcagcacacttgtgtttatacacctgtactatttctatattatctggatcaataacccatttaaatattaacctcactttacagatgaggaagtttggatttgtgtgacagacttcagaggtggagtgaatttagtttttagtcctatagtagaaagaatattttttgggacttagacctccagaataagaccccatcgctgcaactttattttaaagacatatttttcctctctaggctgtggaagagatgaatggaaaagaaataagtggtaaaatcatatttgtaggccgtgcacaaaagaaagtagaacggcaggcagagttaaaacggaaatttgaacagttgaaacaggagagaattagtcgatatcaggtaaggtggtcttggcccagcctagcaatgggatttgctgtgaaatatttgcagaacacccctatgtttagcgggctttctttttgaggacttggagtgtgttc

SEQ ID NO: 13159 - DNA, 556 bp, Homo sapiens
ctattaactggcacacacaaggcggctactggttctcggcccaagtgtggcctgctcctacctctccactccagggctgatttgtgggcagattcaagtctcgcaaagagcgggaagctgagcttggagccaaagccaaggaattcaccaatgtttatatcaaaaactttggggaagaggtggatgatgagagtctgaaagagctattcagtcagtttggtaagaccctaagtgtcaaggtgatgagagatcccaatgggaaatccaaaggctttggctttgtgagttacgaaaaacacgaggatgccaataaggctgtggaagagatgaatggaaaagaaataagtggtaaaatcatatttgtaggccgtgcacaaaagaaagtagaacggcaggcagagttaaaacggaaatttgaacagttgaaacaggagagaattagtcgatatcaggtaaggtggtcttggcccagcctagcaatgggatttgctgtgaaatatttgcagaacacccctatgtttagcgggctttctttttgaggacttggagtgtgttc

SEQ ID NO: 13160 - DNA, 5244 bp, Homo sapiens
cagagttaaaacggaaatttgaacagttgaaacaggagagaattagtcgatatcaggtaaggtggtcttggcccagcctagcaatgggatttgctgtgaaatatttgcagaacacccctatgtttagcgggctttctttttgaggacttggagtgtgttcttcttcccattttacctaaaaagatgaggtttaaaaggatatatacctactacatatgactgattattatagaaccagaaacaagagatgggtttattcatcaagaagctctctattttggaagcctcagcctgttgcttttagccatgtaggttccttttacttaaatgagactcctttgtttggcatggcttcaagaagacccctgctggggtgggtgagtggtcaccagaacagctgtggggagaggtgacaaaaggtgagtgcactgatgatcctgtcagtttcagggcagtagtttcacaactttggacttgcatcagattcatcagcagagcttgttaaaacagatagctgggctccagccccagagtttttcttattcattgggtttggggtctggcctaagaatttcatttctttcttttttttttttttttcttgagacagtctcgctctgtcgcccaggttggagtgcagtggcacaatctcggctcactgcaaactccgcctcccgggttcgcaccattctcctgccttagcctcctgagtagctgggactacaggcacccgccaccatgcctggctaattttttgtatttttagtagagacggggtttcactgtgttagccaggatggtctcgatctcctgaccttgtgattcgcccgcctcggcctcccaaagtgctgggattacaggcgtgagccaccgcgtccggccgagaatttcatttctaacaagttcccaaagatgctggtgctcctggtctggggccacccttggggaaccactttcttagggaatatttgtgatatagaagtgtagttaacagtgatctttttccttcagggggtgaatctctacattaagaacttggatgacactattgatgatgagaaattaaggaaagaattttctccttttggatcaattaccagtgctaaggtattatactgcgatctggggattgaaagcagtggtattccattataggcttattggcatttgtcccattgaaggaatagcatttaaattatgttcatttctgaaagtagctactacgtttttctagcaaaatttctggatgcattctggagaatgacatttcattaggttaacattacactgtttcccaagcactggagtctggagaggaatttgacccagcccctccttgccaactcagagcacctgaatctttcccattccttgctgcctcgtgccggtgtggggacagatggtgctacagaatgagcagaggaaatccagacaggttgttttccatttgtcttggggcctgtctctacagctctgccacattttctccttgagaatgaaggtattttgaagattttggaggtgggcttgggaacttctaccctggtcttaaaaagagaggaaaggggagtggaaggtttttctatgtttcgtagtgtgcatcatttgcttgattttctttgataatcatatcaactaagttagcagggtaagtaggaacctcattttaaagataaggaattttagtccttgaacaagagaatgctgactacatggggatggtgtactgcttgtccttggcactttgggagcaggatggaaactggtgccatctgaacattttgagttatggccggatgcagacgccggtcttgctaaacaggtgtaccagatgccacaaaatcctttagttgatgagaagggaagccacgtgggctggtaagggcttagtggccctgccctggctcttagtggactttgctcccaacctgggaatgtggaaagcaatgttatcagttgtagtagggagttggccagaggccaactgtgggtttgcccagttcttaccctttcgtttttgctatgaccccccccttgactggccctcatcagtgtaaggagtgatcttctatccttgcttatctgcctagtagtcaagttggcatttgttaagagagcagaagagccataccttgaattgtccccattttcattatgatggtgtggcatttttattcacataccttactggcccatctcattggtagagagttatggagtgatgcacttctttacttccctatcctccacttcaggaggctctctgggccattaactaagacataaaacaatgacagtcacaccagagaagacagtgaataaccttgtctattaggaagaatgccatttgtgaatgatgaacttaatgtgggaaaagactgcctgaaccagtagacctgtggttttgtagctgtttggagtatttcttggaaattgagcctcaggaaggcaagtgagactagaatctaggctgcctatctctgagctggtcatctcattgaattaatggtggcagtcattggttacctgaacattttaggactcctgtccacacgtggtattccaaaagtgttatcctgacgttggtaagagcttgttagagtttgtccaccgaggtcttgaagcatatgagatatgaaaataaattgctcagtactactctcaagatgttttgtggttacccggagtagctatccaccaggtatcaggaaacatctttgagttcctggttttattattagccatatcatagtgtttcagaactttagcatcacctggggactcaaagaaaacacctagataccttagaggttgtgacttagttggtctggggtaaatcctgtgccagaaccctgacctagactcagtgactgcagcagaacccaggctttctggttcttctgaatagttccctccccacccagggacatccttttttttcctatttgtaggtttgttttgttttttttgttggtttggttggttggtgtttttgttttgttttgttttgttttgttttgttttgttttggagatggagtctcgctctgtcgcccaggctggagtgcagtggcgcgatctcggctcactgcaatctctgtctcccgggttgaagcggttctcctgcctcagcctcctgagtagctaggattacaggtgtgtgccaccacgcccagctgatttttgtatttttagtagagacggggttgcaccatgttggtcaggatggtcttgaattcctgacctcgtgatccacccacctcggcctcccaaagtgctgggattacaggcatgagccactgcgcctggccctttgtttttttgagatgaggtctcactacattgctcaagctggtctcaacctcctgagctcaagcagccctcccacctcagccttccaaagtgctgggattacaggcacaagccatcacacccagccagggacaccttatttcttaagtagctggtctcattttgtaggtaatgctggaggatggaagaagcaaagggtttggcttcgtctgcttctcatctcctgaagaagcaaccaaagcagtcactgagatgaatggacgcattgtgggctccaagccactatatgttgccctggcccagaggaaggaagagagaaaggctcacctgaccaaccagtatatgcaacgagtggctggaatgagagcacttcctgccaatgccatcttaaatcagttccagcctgcagcgggtggctactttgtgccagcagtcccacaggtgggtgtgctgtttggtcacagctcttgggaacctgccggctggcagtattctgcagtggttggggagagggatttttcgttattagagttctagaatgtcacaataaggacccttcaagtaaaaatgaaggacttacccatggtcacaaacacacacccacagtggcagtggtagcataaaacagtccccattagctgacccctcagctcttgaatagaaagaacatttaaataattagcttaggtcctggttagtgagatgagatgagatacttctctaggatgggttcagtccttaagggggtgtttgggtattcttctgtcttacaggctcagggaaggcctccatattatacacctaaccagttagcacagatgaggcctaatccacgctggcagcaaggtgggagacctcaaggtaggtggtggggaacagtaattgacagcccaggatatacctgtcctggtctcccctgcctttccttcttccccactctgaggcacagcctaggttctggtccacatcacttctcaatgatgtgcaatttttctcttcaccaggcttccaaggaatgccaagtgctatacgccagtctgggcctcgtccaactcttcgccatctggctccaactggtaatgctccggcctctcgtggcctccctactaccactcagagagtcggtgagcaaactggcctttagaagtgtggcctggggaggagggagtcaggatgactaggctctgtcctgggttggtcagtttgttgggctcgaatttatcgagtcctggttctgtaatcttagctgtgtgcttaggtggccacttcaggagcagagaaacagtatgagttctaggtgtgtcagttgcttttaacattctttgctcatcggtgacctatgtgaaaaaggttagttgtagaagtttgctagctggatgaccacagaggcagcttgttcttttgggtggggtgaggaatacaaggaaacagtgtatacagaatatgtcttgtattccaagatgtggaaagagttgtatgttatcctttggctcatcctcgaaagtagtagtggccccctgtgcaatgtgttgcgtaaacgtgctttgaaatttctccttccgtgggacgtggccagttggacatctgccgccaacactgatgtgcatttgctggtctgttgtagggtctgagtgcccggaccgcttggctatggactttggtggggctggtgccgcccagcaagggctgactgacagctgccagtctggaggtggtattggatgcacacagaagggggaaagatgggatttgacgggtctttgcccagactgatgggctttaattgtatttgttctttccctaaggcgttcccacagctgtgcagaacttagcgccacgcgctgctgttgctgctgctgctccccgggctgttgccccctacaaatacgcctccagtgtccgcagccctcatcctgccatacagcctctgcag

SEQ ID NO: 13161 - DNA, 746 bp, Homo sapiens
cagagttaaaacggaaatttgaacagttgaaacaggagagaattagtcgatatcagggggtgaatctctacattaagaacttggatgacactattgatgatgagaaattaaggaaagaattttctccttttggatcaattaccagtgctaaggtaatgctggaggatggaagaagcaaagggtttggcttcgtctgcttctcatctcctgaagaagcaaccaaagcagtcactgagatgaatggacgcattgtgggctccaagccactatatgttgccctggcccagaggaaggaagagagaaaggctcacctgaccaaccagtatatgcaacgagtggctggaatgagagcacttcctgccaatgccatcttaaatcagttccagcctgcagcgggtggctactttgtgccagcagtcccacaggctcagggaaggcctccatattatacacctaaccagttagcacagatgaggcctaatccacgctggcagcaaggcttccaaggaatgccaagtgctatacgccagtctgggcctcgtccaactcttcgccatctggctccaactggtaatgctccggcctctcgtggcctccctactaccactcagagagtcggcgttcccacagctgtgcagaacttagcgccacgcgctgctgttgctgctgctgctccccgggctgttgccccctacaaatacgcctccagtgtccgcagccctcatcctgccatacagcctctgcag

SEQ ID NO: 13162 - DNA, 2334 bp, Homo sapiens
ccagccgtggccccacctcgctattaactggcacacacaaggcggctactggttctcggcccaagtgtggcctgctcctacctctccactccagggctggtgagtctccctgcctgagccgtggcagcccttttgactcgccaaggtgggcttcctgcccaagccatggcctgcctgccgcctctcccttaaaggcatctgtctgtgggttttgtgagcatcaacaactggggctggctggaaagcagctctaagctcactctgagtcggggtcttggccagcggcagagtggagagggccctggactgaccaggagctgtatactagcagtgtgaccttggctttcctgtgattcaggtctgtccatgggtccctcgctagtggttgatgccaaattgtccccgcggttctccattttctaacttatgactcagtgacctaatacaaggctggctccacagtaatacttggtgacaatgaaaaaatcccatccctttgcagaaaaacttcataacagaccttgttgctttgatgtggttgttactgtagaatgcagagagggggaacttaccaaagccatatggggagaagaagagacaataagtcttggctattacaagccaaaataatttttgtcctttgtgtcattcagtatgccagaggatgggttatctttataatgtctgtgtgtgcagtggttgatctacagatatcactaaaaagaaatacaaaaatgtcagtgcatggataaattttcttttaagtataacagaccaaaataaataaatttaaaaagcaaagggtgccccttcactccaacaatctcatatctaggattaaccactgttaacagtttggtttgtatccttccagaccttttctatgcatttacatagttgcacagaaatgaacattttaaaaacatggccatcaggtttcttcatgaaggcagtgtgatgtggtaggaatagccctggtctaagccaggagccctggggctggtcctcacaggatagtcctgcctttttctctttctgctggggacttggggtatctctgagcctccttggtggtggatggggatctcgtgttttaacctctcctgtcagtctttaacctgtattcctttgggtccctggacatcatgttttattcctctgggtaattactgttcttcatggtttcattttagatttgtgggcagattcaagtctcgcaaagagcgggaagctgagcttggagccaaagccaaggaattcaccaatgtttatatcaaaaactttggggaagaggtggatgatgagagtctgaaagagctattcagtcagtttggtaagttggggttccttgtctcctttcacagtctaccagacccatctgttttttcttaagagatgagggcactgctccagagatttgcttcaagtgagtttccagagggaagccttctgttcctgagctgtgctcaagatggtgttactaatagttctgtcctttggtaataggtaagaccctaagtgtcaaggtgatgagagatcccaatgggaaatccaaaggctttggctttgtgagttacgaaaaacacgaggatgccaataaggtgagtataccacaaagattgggaaaagcttttaagaggttgccccagagtatgggtagggtcttgctagcacctacctagagctgggacggtctgagtatctggtagtagatgtaccattactatactctgggatcatcttcctgggttccgcatgttaacttcatgtaggtgtttacaaagcacttggcacatacctgtcacctcagctatcagttgttgaaagaataggacagacgtttgttatgctgcaaaggtgagagaactaaagcccagtgagtgctgatttgataacagcacggcagctacttgtgggcaaagcattgtgccagaccctcaatatttatcacttaaatacccacaaaagcacctgcagaatttactggcagccggaatattatatcgccctaggctcatgtcagcacacttgtgtttatacacctgtactatttctatattatctggatcaataacccatttaaatattaacctcactttacagatgaggaagtttggatttgtgtgacagacttcagaggtggagtgaatttagtttttagtcctatagtagaaagaatattttttgggacttagacctccagaataagaccccatcgctgcaactttattttaaagacatatttttcctctctaggctgtggaagagatgaatggaaaagaaataagtggtaaaatcatatttgtaggccgtgcacaaaagaaagtagaacgg

SEQ ID NO: 13163 - DNA, 317 bp, Homo sapiens
ccagccgtggccccacctcgctattaactggcacacacaaggcggctactggttctcggcccaagtgtggcctgctcctacctctccactccagggctgatttgtgggcagattcaagtctcgcaaagagcgggaagctgagcttggagccaaagccaaggaattcaccaatgtttatatcaaaaactttggggaagaggtggatgatgagagtctgaaagagctattcagtcagtttggctgtggaagagatgaatggaaaagaaataagtggtaaaatcatatttgtaggccgtgcacaaaagaaagtagaacgg

SEQ ID NO: 13164 - DNA, 637 bp, Homo sapiens
cactcatccaaacaatgcattcaaatctggctgggaagatcacgggaatgctgctggagatagacaactctgagctgctgcacatgttagagtcccccgagtctctccgctccaaggtgagctggggctcagaccctgcagcttcagttctcagcttgggaagactgggggcaaacttggatgcccaggtgcagcagaaagtgggatctgctgcccccaggacccctctcgtcatgccttgactgtgactggaggctgcagtgggtatttgggaaagtagttagcaccagaagcctagggatcatctgtacagttggctttggtccaccactaggtctgggcactggggaggggtggagtagctctcctagattcactgaccacctgaagatttctcgcaggtggatgaagctgtagcagttctacaggctcatcatgccaagaaagaagctgcccagaaggtgggcgctgttgctgctgctacctcttagacaaggaaaaaccgtatgtgtggctattttcatttttgttcctatgagcattgttcctatgagcattgtctttgtggtttgacctgaggttgtatatatgctcactgcttagctctgggaatacaataagtacagttagttacacg

SEQ ID NO: 13165 - DNA, 352 bp, Homo sapiens
cactcatccaaacaatgcattcaaatctggctgggaagatcacgggaatgctgctggagatagacaactctgagctgctgcacatgttagagtcccccgagtctctccgctccaaggtggatgaagctgtagcagttctacaggctcatcatgccaagaaagaagctgcccagaaggtgggcgctgttgctgctgctacctcttagacaaggaaaaaccgtatgtgtggctattttcatttttgttcctatgagcattgttcctatgagcattgtctttgtggtttgacctgaggttgtatatatgctcactgcttagctctgggaatacaataagtacagttagttacacg

SEQ ID NO: 13166 - DNA, 850 bp, Homo sapiens
tctccgccccgggtcgctgccgcctccgccgctttcgggcttcgcagcctgaggaaaaaaagagaaaaagataaaaaaaatctgaaaacgcttcaaaatcctgaaaaaaaaaaaggaaaagaaaaaacgaatcctcggagaacccgcggggaagtcactttcgtacgcttccggcctgccccgcgcccgccgccgcagcgcttggcgtccgtcggtctccgtccgtcggtccgggggtgagccgcccgcccggcccgccgtgccctccccccgctcgggccccgagccccgcgccccgcgcctgccccggcgcaccacgtgtccgtgctgcccttcgccgcccgcccggggctcgccgagtcggcgcccacaaagatttggtttccctctgccccggcggttgtaatcttaaaccgccggagcccgaggcctatatttatagagaaacgcgtgtccccgaggccgccgtgggcagcgtccggtcgcctcttaaaggatttttacccttcggaaggggattccccgtttaatttttttcctactttgattttttgaaatttggagcttcgcaccaggaccgcggagaagtgcaaagtcgcggggagggccgtattgtgcggagagccttttgtctgcggtgctgcggccgtgggagccggcccccgcctcccgtttccgtcccgtctccaagcccgccgactccagctcgtcctcgccgcgccggtgccacctgtgagccgcggcgcgggcccgggctccgaaggcgcccctttgtcctgcggcgggcccgataagaagtcctcctggcggggctcggggtggtggggggcggggagatgaacgctgcggc

SEQ ID NO: 13167 - DNA, 532 bp, Homo sapiens
tctccgccccgggtcgctgccgcctccgccgctttcgggcttcgcagcctgaggaaaaaaagagaaaaagataaaaaaaatctgaaaacgcttcaaaatcctgaaaaaaaaaaaggaaaagaaaaaacgaatcctcggagaacccgcggggaagtcactttcgtacgcttccggcctgccccgcgcccgccgccgcagcgcttggcgtccgtcggtctccgtccgtcggtccggggaaatttggagcttcgcaccaggaccgcggagaagtgcaaagtcgcggggagggccgtattgtgcggagagccttttgtctgcggtgctgcggccgtgggagccggcccccgcctcccgtttccgtcccgtctccaagcccgccgactccagctcgtcctcgccgcgccggtgccacctgtgagccgcggcgcgggcccgggctccgaaggcgcccctttgtcctgcggcgggcccgataagaagtcctcctggcggggctcggggtggtggggggcggggagatgaacgctgcggc

SEQ ID NO: 13168 - DNA, 5813 bp, Homo sapiens; identical to SEQ ID NO: 1229

SEQ ID NO: 13169 - DNA, 1516 bp, Homo sapiens
gattatcctgctgctgccgccaccgctgctgctgctctgcaaaattcagctgctgcctctgtcttgaggaccccagcgcctttcccccggggccatgctgcctgcagccacagcctccctcctggggcccctcctcactgcctgcgccctgctgccttttgcccagggccagacccccaactacaccagacccgtgttcctgtgcggaggggatgtgaagggggaatcaggttacgtggcaagtgaggggttccccaacctctacccccctaataaggagtgcatctggaccataacggtccccgagggccagactgtgtccctctcattccgagtcttcgacctggagctgcaccccgcctgccgctacgatgctctggaggtcttcgctgggtctgggacttccggccagcggctcggacgcttttgtgggaccttccggcctgcgcccctagtcgcccccggcaaccaggtgaccctgaggatgacgacggatgagggcacaggaggacgaggcttcctgctctggtacagcgggcgggccacctcgggcactgagcaccaattttgcggggggcggctggagaaggcccagggaaccctgaccacgcccaactggcccgagtccgattaccccccgggcatcagctgttcctggcacatcatcgcgcccccggaccaggtcatcgcgctgaccttcgagaagtttgacctggagccggacacctactgccgctatgactcggtcagcgtgttcaacggagccgtgagcgacgactcccggaggctggggaagttctgcggcgacgcagtcccgggctccatctcctccgaagggaatgaactcctcgtccagttcgtctcagatctcagtgtcaccgctgatggcttctcagcctcctacaagaccctgccgcggggcactgccaaagaagggcaagggcccggccccaaacggggaactgagcctaaagtcaagctgccccccaagtcccaacctccggagaaaacagaggaatctccttcagcccctgatgcacccacctgcccaaagcagtgccgccggacaggcaccttgcagagcaacttctgtgccagcagccttgtggtgactgcgacagtgaagtccatggttcgggagccaggggagggccttgccgtgactgtcagtcttattggtgcttataaaactggaggactggacctgccttctccacccactggtgcctccctgaagttttacgtgccttgcaagcagtgcccccccatgaagaaaggagtcagttatctgctgatgggccaggtagaagagaacagaggccccgtccttcctccagagagctttgtggttctccaccggcccaaccaggaccagatcctcaccaacctaagcaagaggaagtgcccctctcaacctgtgcgggctgctgcgtcccaggactgagacgcaggccagccccggcccctagccctcaggccttctttcttatccaaataaatgtttcttaatgaggaa

SEQ ID NO: 13170 - DNA, 736 bp, Homo sapiens
ggtcggggaggggccagaagggggcgtccagccagttcctcctcccgcttccaccgcccgccagtgcgccctgcggccccagacttccccgagccgcgctcctcccggccgctctctgttaacctgcccccatcttacctccccttcttctcgtcccctcatcctgagccccagacatccgagctgcctgccggggctcccagcctagagttctcctgaagctgaccgagggtctccaccgccccccacccccgctcctctctcccctccccagagcaccaattttgcggggggcggctggagaaggcccagggaaccctgaccacgcccaactggcccgagtccgattaccccccgggcatcagctgttcctggcacatcatcgcgcccccggaccaggtaccgaccctcctccccgggctgccctaggggacccaggcggcgccctccagcttgcagccagcagagatttattgaagatctgctgtgtcccgagcactgcgcttgcgctggtgggcacccaaaacagccccaacccctgcatgcacgcaaacaaaaatgtaaaaattacaactgagacaagtctcaggagagcgaggtacagggtcctggtataacacgcgggcctgtcacttgtgagtgcgccaggacttgaccttgccaaccacgacgaccgacacccctgcagggtcccatgggtgtgtgtggtcctccgtgctgtggtgtgaacgccttc

SEQ ID NO: 13171 - DNA, 447 bp, Homo sapiens
ggtcggggaggggccagaagggggcgtccagccagttcctcctcccgcttccaccgcccgccagtgcgccctgcggccccagacttccccgagccgcgctcctcccggccgctctctgttaacctgcccccatcttacctccccttcttctcgtcccctcatcctgagccccagacatccgagctgcctgccggggctcccagcctagagttctcctgaagctgaccgagggtctccaccgccccccacccccgctcctctctcccctccccagagcaccaattttgcggggggcggctggagaaggcccagggaaccctgaccacgcccaactggcccgagtccgattaccccccgggcatcagctgttcctggcacatcatcgcgcccccggaccagggtcccatgggtgtgtgtggtcctccgtgctgtggtgtgaacgccttc

SEQ ID NO: 13172 - DNA, 974 bp, Homo sapiens
attcctgttggggtgggggtggggactcttggggttggagggatggtcgagttgccaggcccacttttcccttatctttgtgggagtctgggacaccccagccctgtcctggctggtggaagctgccccaggtctctcaaggcctttccatttcatcccccagcttccctccttggagtttcatcctcatcacctcatccccatcttgccagtgctcccccgtcccacccgtccctgctctttcctgaccccttttctgttctccagacccgtgttcctgtgcggaggggatgtgaagggggaatcaggttacgtggcaagtgaggggttccccaacctctacccccctaataaggagtgcatctggaccataacggtgagaaacccctctgggcactaccccttgttaaagtctcagaggcaaaaaggcctgactgcgaagggaccccccccccgtcccccccgcaccaccttctcaacctggggcagctccaagtgtcttccctctgtcactgaaggcatcattcccaccgtaacacgcatcatcttaacccttccctcaaatcttcattctccagtccccggccctccctcctcttccaaagcctcagctcttgtcccctgcacaggctaccagcagagctgcagagaccaggccctctgctctgcactcacatggaggccccttcccattcagtccgtttctgcaagaaacgcttggggcaggggagctgccctctggctgggttgtgtggggcctgactctgtgggtccccgcctctgtccccgctatcaggtccccgagggccagactgtgtccctctcattccgagtcttcgacctggagctgcaccccgcctgccgctacgatgctctggaggtcttcgctgggtctgggacttccggccagcggctcggacgcttttgtgggaccttccggcctgcgcccctagtcgcccccggcaaccaggtga

SEQ ID NO: 13173 - DNA, 554 bp, Homo sapiens
attcctgttggggtgggggtggggactcttggggttggagggatggtcgagttgccaggcccacttttcccttatctttgtgggagtctgggacaccccagccctgtcctggctggtggaagctgccccaggtctctcaaggcctttccatttcatcccccagcttccctccttggagtttcatcctcatcacctcatccccatcttgccagtgctcccccgtcccacccgtccctgctctttcctgaccccttttctgttctccagacccgtgttcctgtgcggaggggatgtgaagggggaatcaggttacgtggcaagtgaggggttccccaacctctacccccctaataaggagtgcatctggaccataacggtccccgagggccagactgtgtccctctcattccgagtcttcgacctggagctgcaccccgcctgccgctacgatgctctggaggtcttcgctgggtctgggacttccggccagcggctcggacgcttttgtgggaccttccggcctgcgcccctagtcgcccccggcaaccaggtga

SEQ ID NO: 13174 - DNA, 1129 bp, Homo sapiens
aggcgcgaggcggaaatgggtcaccgacccgcgggtggaatgggcggcctggggttactgggacggtgagtaactgccggcccccgtccgcaatcgggctccctccgtcgggcgcgagggggcaccccagggctggggggactaggttcctccaaccccggggggcccctacacccagccctgggctcccgattgcggtcccatcaccccctcctggcggcagaagtctcccttgcaatgtttcaggcggggacctccctaaaggggtcctcgggggctgtgccccaagtcgaggacaccctctccagcctgaaaggggactctgctgcagggccggggagatgggatctcctaggggaagaggcgcggtgcggccgcgggtcggggaggggccagaagggggcgtccagccagttcctcctcccgcttccaccgcccgccagtgcgccctgcggccccagacttccccgagccgcgctcctcccggccgctctctgttaacctgcccccatcttacctccccttcttctcgtcccctcatcctgagccccagacatccgagctgcctgccggggctcccagcctagagttctcctgaagctgaccgagggtctccaccgccccccacccccgctcctctctcccctccccagagcaccaattttgcggggggcggctggagaaggcccagggaaccctgaccacgcccaactggcccgagtccgattaccccccgggcatcagctgttcctggcacatcatcgcgcccccggaccaggtaccgaccctcctccccgggctgccctaggggacccaggcggcgccctccagcttgcagccagcagagatttattgaagatctgctgtgtcccgagcactgcgcttgcgctggtgggcacccaaaacagccccaacccctgcatgcacgcaaacaaaaatgtaaaaattacaactgagacaagtctcaggagagcgaggtacagggtcctggtataacacgcgggcctgtcacttgtgagtgcgccaggacttgaccttgccaaccacgacgaccgacacccctgcagggtcccatgggtgtgtgtggtcctccgtgctgtggtgtgaacgccttcaggaggggggccca

SEQ ID NO: 13175 - DNA, 541 bp, Homo sapiens
aggcgcgaggcggaaatgggtcaccgacccgcgggtggaatgggcggcctggggttactgggacgagcaccaattttgcggggggcggctggagaaggcccagggaaccctgaccacgcccaactggcccgagtccgattaccccccgggcatcagctgttcctggcacatcatcgcgcccccggaccaggtaccgaccctcctccccgggctgccctaggggacccaggcggcgccctccagcttgcagccagcagagatttattgaagatctgctgtgtcccgagcactgcgcttgcgctggtgggcacccaaaacagccccaacccctgcatgcacgcaaacaaaaatgtaaaaattacaactgagacaagtctcaggagagcgaggtacagggtcctggtataacacgcgggcctgtcacttgtgagtgcgccaggacttgaccttgccaaccacgacgaccgacacccctgcagggtcccatgggtgtgtgtggtcctccgtgctgtggtgtgaacgccttcaggaggggggccca

SEQ ID NO: 13176 - DNA, 2023 bp, Homo sapiens
cgcaaccttgtctgtaccaaaaatacaaaataattagctgggcatggtggcgtgcctgtagtcccagcaacttgcggggctgaggcaggaggattacttgaacccagaaggtcaaggctgcagtaagcctagatggagccactgcactcaagcctgggagacaaagtgagaccctgtctcaaacaaacaaaaaaggtcatggggctgagaagagtgtggtgcacgcccgccctgacacttcccccaatgctcggtggccacctgcagctccatctcctccgaagggaatgaactcctcgtccagttcgtctcagatctcagtgtcaccgctgatggcttctcagcctcctacaagaccctgccgcggggcactgccaaagaagggcaagggcccggccccaaacggggaactgagcctaaagtcaagctgccccccaagtcccaacctccggagaaaacagaggaatctccttcagcccctggtgagtctgggataggggaggaaggggaaacagactgaagggggccatttcaaaaagttctgacctgggctgtggctcacacctgtaatcccagcattttgggaggtccagacagcaggatcgcttaagcctaggagtttaccatagcaagaccctgtcttttcaaaaataaaaaattaggctgggctggtggctcacgcctgtaatcccagcactttgggaggccaaggcaggcagatcacctgaggtcaggagttcaagaccaccccggctaacatggcaacaccacatctctactaaaaatacaaaaattagccaggtgtggtggtacacacctgtaatcccagctactcgggaggctgaggcaggagagtcgcttgaacctgggaggtggagattgtagtgagccgagattgtgccactgcactccaacttgggttacagagtgagattctgtctcaaaaaaaaaaaaaaaacttagccaggcgtgtggtcatagctactccggaggctgaggtgggaggattgcttgagctgggaaggtcgaggcttcagtgagccatgactgtgccgctacactccagcctgggcaacagagcaaaactccatcttaaacaaacaaaaaagttcttccttggctacattcactcattgattcatctggtactcactggtgcctccttcctgccgatgacccctactgggtgctaggaccggaagcctgacagagctctgaacagttcaagtcaatgaggctgttatggggacagtgctccctcctacctgctgagcaggtcaccctccaccctcctccctcctagatgcacccacctgcccaaagcagtgccgccggacaggcaccttgcagagcaacttctgtgccagcagccttggtaagaatacccccaaccccattccagctcctcgaaccacctcctgcttctgtttccagtcctgccatctggaacctcccatctcctcatctctcactcccattctcccacagtggtgactgcgacagtgaagtccatggttcgggagccaggggagggccttgccgtgactgtcagtcttattggtgcttataaaactggaggactggacctgccttctccacccactggtgcctccctgaagttttacgtgccttgcaagcagtgcccccccatgaagaaaggtaacagagatgtggggaaatggggatgggtcaagctaagccacacagaaatgatcaaggtgtggaatcttgagacctgctgacaggtctcaagaataagagatctcaacccctccctccttcttccaggagtcagttatctgctgatgggccaggtagaagagaacagaggccccgtccttcctccagagagctttgtggttctccaccggcccaaccaggaccagatcctcaccaacctaagcaagaggaagtgcccctctcaacctgtgcgggctgctgcgtcccaggactgagacgcaggccagccccggcccctagccctcaggccttctttcttatccaaataaatgtttcttaatga

SEQ ID NO: 13177 - DNA, 960 bp, Homo sapiens
cgcaaccttgtctgtaccaaaaatacaaaataattagctgggcatggtggcgtgcctgtagtcccagcaacttgcggggctgaggcaggaggattacttgaacccagaaggtcaaggctgcagtaagcctagatggagccactgcactcaagcctgggagacaaagtgagaccctgtctcaaacaaacaaaaaaggtcatggggctgagaagagtgtggtgcacgcccgccctgacacttcccccaatgctcggtggccacctgcagctccatctcctccgaagggaatgaactcctcgtccagttcgtctcagatctcagtgtcaccgctgatggcttctcagcctcctacaagaccctgccgcggggcactgccaaagaagggcaagggcccggccccaaacggggaactgagcctaaagtcaagctgccccccaagtcccaacctccggagaaaacagaggaatctccttcagcccctgatgcacccacctgcccaaagcagtgccgccggacaggcaccttgcagagcaacttctgtgccagcagccttgtggtgactgcgacagtgaagtccatggttcgggagccaggggagggccttgccgtgactgtcagtcttattggtgcttataaaactggaggactggacctgccttctccacccactggtgcctccctgaagttttacgtgccttgcaagcagtgcccccccatgaagaaaggagtcagttatctgctgatgggccaggtagaagagaacagaggccccgtccttcctccagagagctttgtggttctccaccggcccaaccaggaccagatcctcaccaacctaagcaagaggaagtgcccctctcaacctgtgcgggctgctgcgtcccaggactgagacgcaggccagccccggcccctagccctcaggccttctttcttatccaaataaatgtttcttaatga

SEQ ID NO: 13178 - DNA, 1447 bp, Homo sapiens
gcacaggctaccagcagagctgcagagaccaggccctctgctctgcactcacatggaggccccttcccattcagtccgtttctgcaagaaacgcttggggcaggggagctgccctctggctgggttgtgtggggcctgactctgtgggtccccgcctctgtccccgctatcaggtccccgagggccagactgtgtccctctcattccgagtcttcgacctggagctgcaccccgcctgccgctacgatgctctggaggtcttcgctgggtctgggacttccggccagcggctcggacgcttttgtgggaccttccggcctgcgcccctagtcgcccccggcaaccaggtgaccctgaggatgacgacggatgagggcacaggaggacgaggcttcctgctctggtacagcgggcgggccacctcgggcactggtgagaactccctcacctccgccttccccccctccaggccccgccccggccgcagccccgcccccagccctaacctccgccccgcccaccccgcgccccagtgcctagggccccctacctccctgacccattttcctcactaaccgccccttcagtccctcctccccgtcttctctcccctcctcccgcacccacccatccctcttccagggccccccccaggcgcgaggcggaaatgggtcaccgacccgcgggtggaatgggcggcctggggttactgggacggtgagtaactgccggcccccgtccgcaatcgggctccctccgtcgggcgcgagggggcaccccagggctggggggactaggttcctccaaccccggggggcccctacacccagccctgggctcccgattgcggtcccatcaccccctcctggcggcagaagtctcccttgcaatgtttcaggcggggacctccctaaaggggtcctcgggggctgtgccccaagtcgaggacaccctctccagcctgaaaggggactctgctgcagggccggggagatgggatctcctaggggaagaggcgcggtgcggccgcgggtcggggaggggccagaagggggcgtccagccagttcctcctcccgcttccaccgcccgccagtgcgccctgcggccccagacttccccgagccgcgctcctcccggccgctctctgttaacctgcccccatcttacctccccttcttctcgtcccctcatcctgagccccagacatccgagctgcctgccggggctcccagcctagagttctcctgaagctgaccgagggtctccaccgccccccacccccgctcctctctcccctccccagagcaccaattttgcggggggcggctggagaaggcccagggaaccctgaccacgcccaactggcccgagtccgattaccccccgggcatcagctgttcctggcacatcatcgcgcccccggaccaggtaccgaccctcctccc

SEQ ID NO: 13179 - DNA, 545 bp, Homo sapiens
gcacaggctaccagcagagctgcagagaccaggccctctgctctgcactcacatggaggccccttcccattcagtccgtttctgcaagaaacgcttggggcaggggagctgccctctggctgggttgtgtggggcctgactctgtgggtccccgcctctgtccccgctatcaggtccccgagggccagactgtgtccctctcattccgagtcttcgacctggagctgcaccccgcctgccgctacgatgctctggaggtcttcgctgggtctgggacttccggccagcggctcggacgcttttgtgggaccttccggcctgcgcccctagtcgcccccggcaaccaggtgaccctgaggatgacgacggatgagggcacaggaggacgaggcttcctgctctgagcaccaattttgcggggggcggctggagaaggcccagggaaccctgaccacgcccaactggcccgagtccgattaccccccgggcatcagctgttcctggcacatcatcgcgcccccggaccaggtaccgaccctcctccc

SEQ ID NO: 13180 - DNA, 2591 bp, Homo sapiens
cccgagtccgattaccccccgggcatcagctgttcctggcacatcatcgcgcccccggaccaggtaccgaccctcctccccgggctgccctaggggacccaggcggcgccctccagcttgcagccagcagagatttattgaagatctgctgtgtcccgagcactgcgcttgcgctggtgggcacccaaaacagccccaacccctgcatgcacgcaaacaaaaatgtaaaaattacaactgagacaagtctcaggagagcgaggtacagggtcctggtataacacgcgggcctgtcacttgtgagtgcgccaggacttgaccttgccaaccacgacgaccgacacccctgcagggtcccatgggtgtgtgtggtcctccgtgctgtggtgtgaacgccttcaggaggggggcccagaggacgcgggaggtgggagtgggagctgctgcaggcacccagtaggagatgaggtgcaggcgcccaggggtgtcccgccgcgcagtccccgcctccgcccgccgccaggtcatcgcgctgaccttcgagaagtttgacctggagccggacacctactgccgctatgactcggtcagcgtgttcaacggagccgtgagcgacgactcccggaggctggggaagttctgcggcgacgcagtcccggggtgaggggcgggacctgggcgagtccgggagagagtcggcggaccgcacgcacgcggctgtttggaggggcggggttcagctaaagggacgggatctgaaccccagggctccaaaccggcgaggggagcaggttggaggccaggcaaagaggagatttggccccgggtctggggtccgcggatagagaggcgactggggctctgcgaagttgggacgaagttaaaaggccacctggccaggggtagtggctcatgcctgtaatcatagcactttgggaggctgaagcgggaggatcacctgagcttaggaattcgagaccagcctgggcaacatggcgcaaccttgtctgtaccaaaaatacaaaataattagctgggcatggtggcgtgcctgtagtcccagcaacttgcggggctgaggcaggaggattacttgaacccagaaggtcaaggctgcagtaagcctagatggagccactgcactcaagcctgggagacaaagtgagaccctgtctcaaacaaacaaaaaaggtcatggggctgagaagagtgtggtgcacgcccgccctgacacttcccccaatgctcggtggccacctgcagctccatctcctccgaagggaatgaactcctcgtccagttcgtctcagatctcagtgtcaccgctgatggcttctcagcctcctacaagaccctgccgcggggcactgccaaagaagggcaagggcccggccccaaacggggaactgagcctaaagtcaagctgccccccaagtcccaacctccggagaaaacagaggaatctccttcagcccctggtgagtctgggataggggaggaaggggaaacagactgaagggggccatttcaaaaagttctgacctgggctgtggctcacacctgtaatcccagcattttgggaggtccagacagcaggatcgcttaagcctaggagtttaccatagcaagaccctgtcttttcaaaaataaaaaattaggctgggctggtggctcacgcctgtaatcccagcactttgggaggccaaggcaggcagatcacctgaggtcaggagttcaagaccaccccggctaacatggcaacaccacatctctactaaaaatacaaaaattagccaggtgtggtggtacacacctgtaatcccagctactcgggaggctgaggcaggagagtcgcttgaacctgggaggtggagattgtagtgagccgagattgtgccactgcactccaacttgggttacagagtgagattctgtctcaaaaaaaaaaaaaaaacttagccaggcgtgtggtcatagctactccggaggctgaggtgggaggattgcttgagctgggaaggtcgaggcttcagtgagccatgactgtgccgctacactccagcctgggcaacagagcaaaactccatcttaaacaaacaaaaaagttcttccttggctacattcactcattgattcatctggtactcactggtgcctccttcctgccgatgacccctactgggtgctaggaccggaagcctgacagagctctgaacagttcaagtcaatgaggctgttatggggacagtgctccctcctacctgctgagcaggtcaccctccaccctcctccctcctagatgcacccacctgcccaaagcagtgccgccggacaggcaccttgcagagcaacttctgtgccagcagccttggtaagaatacccccaaccccattccagctcctcgaaccacctcctgcttctgtttccagtcctgccatctggaacctcccatctcctcatctctcactcccattctcccacagtggtgactgcgacagtgaagtccatggttcgggagccaggggagggccttgccgtgactgtcagtcttattggtgcttataaaactggaggactggacctgccttct

SEQ ID NO: 13181 - DNA, 765 bp, Homo sapiens
cccgagtccgattaccccccgggcatcagctgttcctggcacatcatcgcgcccccggaccagggtcccatgggtgtgtgtggtcctccgtgctgtggtgtgaacgccttcaggaggggggcccagaggacgcgggaggtgggagtgggagctgctgcaggcacccagtaggagatgaggtgcaggcgcccaggggtgtcccgccgcgcagtccccgcctccgcccgccgccaggtcatcgcgctgaccttcgagaagtttgacctggagccggacacctactgccgctatgactcggtcagcgtgttcaacggagccgtgagcgacgactcccggaggctggggaagttctgcggcgacgcagtcccgggctccatctcctccgaagggaatgaactcctcgtccagttcgtctcagatctcagtgtcaccgctgatggcttctcagcctcctacaagaccctgccgcggggcactgccaaagaagggcaagggcccggccccaaacggggaactgagcctaaagtcaagctgccccccaagtcccaacctccggagaaaacagaggaatctccttcagcccctgatgcacccacctgcccaaagcagtgccgccggacaggcaccttgcagagcaacttctgtgccagcagccttgtggtgactgcgacagtgaagtccatggttcgggagccaggggagggccttgccgtgactgtcagtcttattggtgcttataaaactggaggactggacctgccttct

SEQ ID NO: 13182 - DNA, 1559 bp, Homo sapiens
atgctctggaggtcttcgctgggtctgggacttccggccagcggctcggacgcttttgtgggaccttccggcctgcgcccctagtcgcccccggcaaccaggtgaccctgaggatgacgacggatgagggcacaggaggacgaggcttcctgctctggtacagcgggcgggccacctcgggcactggtgagaactccctcacctccgccttccccccctccaggccccgccccggccgcagccccgcccccagccctaacctccgccccgcccaccccgcgccccagtgcctagggccccctacctccctgacccattttcctcactaaccgccccttcagtccctcctccccgtcttctctcccctcctcccgcacccacccatccctcttccagggccccccccaggcgcgaggcggaaatgggtcaccgacccgcgggtggaatgggcggcctggggttactgggacggtgagtaactgccggcccccgtccgcaatcgggctccctccgtcgggcgcgagggggcaccccagggctggggggactaggttcctccaaccccggggggcccctacacccagccctgggctcccgattgcggtcccatcaccccctcctggcggcagaagtctcccttgcaatgtttcaggcggggacctccctaaaggggtcctcgggggctgtgccccaagtcgaggacaccctctccagcctgaaaggggactctgctgcagggccggggagatgggatctcctaggggaagaggcgcggtgcggccgcgggtcggggaggggccagaagggggcgtccagccagttcctcctcccgcttccaccgcccgccagtgcgccctgcggccccagacttccccgagccgcgctcctcccggccgctctctgttaacctgcccccatcttacctccccttcttctcgtcccctcatcctgagccccagacatccgagctgcctgccggggctcccagcctagagttctcctgaagctgaccgagggtctccaccgccccccacccccgctcctctctcccctccccagagcaccaattttgcggggggcggctggagaaggcccagggaaccctgaccacgcccaactggcccgagtccgattaccccccgggcatcagctgttcctggcacatcatcgcgcccccggaccaggtaccgaccctcctccccgggctgccctaggggacccaggcggcgccctccagcttgcagccagcagagatttattgaagatctgctgtgtcccgagcactgcgcttgcgctggtgggcacccaaaacagccccaacccctgcatgcacgcaaacaaaaatgtaaaaattacaactgagacaagtctcaggagagcgaggtacagggtcctggtataacacgcgggcctgtcacttgtgagtgcgccaggacttgaccttgccaaccacgacgaccgacacccctgcagggtcccatgggtgtgtgtggtcctccgtgctgtggtgtgaacgccttcaggaggggggcccagaggacgcgggaggtgggagtggg

SEQ ID NO: 13183 - DNA, 686 bp, Homo sapiens
atgctctggaggtcttcgctgggtctgggacttccggccagcggctcggacgcttttgtgggaccttccggcctgcgcccctagtcgcccccggcaaccaggtgaccctgaggatgacgacggatgagggcacaggaggacgaggcttcctgctctggtacagcgggcgggccacctcgggcactgagcaccaattttgcggggggcggctggagaaggcccagggaaccctgaccacgcccaactggcccgagtccgattaccccccgggcatcagctgttcctggcacatcatcgcgcccccggaccaggtaccgaccctcctccccgggctgccctaggggacccaggcggcgccctccagcttgcagccagcagagatttattgaagatctgctgtgtcccgagcactgcgcttgcgctggtgggcacccaaaacagccccaacccctgcatgcacgcaaacaaaaatgtaaaaattacaactgagacaagtctcaggagagcgaggtacagggtcctggtataacacgcgggcctgtcacttgtgagtgcgccaggacttgaccttgccaaccacgacgaccgacacccctgcagggtcccatgggtgtgtgtggtcctccgtgctgtggtgtgaacgccttcaggaggggggcccagaggacgcgggaggtgggagtggg

SEQ ID NO: 13184 - DNA, 778 bp, Homo sapiens
cagacatccgagctgcctgccggggctcccagcctagagttctcctgaagctgaccgagggtctccaccgccccccacccccgctcctctctcccctccccagagcaccaattttgcggggggcggctggagaaggcccagggaaccctgaccacgcccaactggcccgagtccgattaccccccgggcatcagctgttcctggcacatcatcgcgcccccggaccaggtaccgaccctcctccccgggctgccctaggggacccaggcggcgccctccagcttgcagccagcagagatttattgaagatctgctgtgtcccgagcactgcgcttgcgctggtgggcacccaaaacagccccaacccctgcatgcacgcaaacaaaaatgtaaaaattacaactgagacaagtctcaggagagcgaggtacagggtcctggtataacacgcgggcctgtcacttgtgagtgcgccaggacttgaccttgccaaccacgacgaccgacacccctgcagggtcccatgggtgtgtgtggtcctccgtgctgtggtgtgaacgccttcaggaggggggcccagaggacgcgggaggtgggagtgggagctgctgcaggcacccagtaggagatgaggtgcaggcgcccaggggtgtcccgccgcgcagtccccgcctccgcccgccgccaggtcatcgcgctgaccttcgagaagtttgacctggagccggacacctactgccgctatgactcggtcagcgtgttcaacggagccgtgagc

SEQ ID NO: 13185 - DNA, 318 bp, Homo sapiens
cagacatccgagctgcctgccggggctcccagcctagagttctcctgaagctgaccgagggtctccaccgccccccacccccgctcctctctcccctccccagagcaccaattttgcggggggcggctggagaaggcccagggaaccctgaccacgcccaactggcccgagtccgattaccccccgggcatcagctgttcctggcacatcatcgcgcccccggaccaggtcatcgcgctgaccttcgagaagtttgacctggagccggacacctactgccgctatgactcggtcagcgtgttcaacggagccgtgagc

SEQ ID NO: 13186 - DNA, 2503 bp, Homo sapiens
aaaattcagctgctgcctctgtcttgaggaccccagcgcctttcccccggggccatgctgcctgcagccacagcctccctcctggggcccctcctcactgcctgcgccctgctgccttttgcccagggccagacccccaactacaccaggtaggtctcttggcatcttccagacagctccagtgaacttcagacccccgattcctttggggttatgcctggagatattttgggttcccttgctgacacaccactccccagattccccaccgcctcacccttctctggcccccaaatcctccccatctgctgcaagaccttggtctcctgcaggccaccactgctcccattcccccaccttcgtcctctggtctcttaagtctccccacccacccagatccttgaccccccatagaacccaagagagagccaagctcctgaacttgcctggtagctggattccaggaaggaattcgagagggattgtagggggaggagggggcagtgagtggagacttgggagtcagaatctgaagtagtttggaacaggggcagggctaaggtgtggagctcgcggagcctggcctccaggttcaatcagagggccatcgccactgcagctccctccatctctccaccccctcccccccaccgcctcgtggctgtgtccacatctggaagtagttaggcggctcctgtccctggactgccaggcagagtgaggcgggagtctggaaggggggccgaggaggattccgggaattcctgttggggtgggggtggggactcttggggttggagggatggtcgagttgccaggcccacttttcccttatctttgtgggagtctgggacaccccagccctgtcctggctggtggaagctgccccaggtctctcaaggcctttccatttcatcccccagcttccctccttggagtttcatcctcatcacctcatccccatcttgccagtgctcccccgtcccacccgtccctgctctttcctgaccccttttctgttctccagacccgtgttcctgtgcggaggggatgtgaagggggaatcaggttacgtggcaagtgaggggttccccaacctctacccccctaataaggagtgcatctggaccataacggtgagaaacccctctgggcactaccccttgttaaagtctcagaggcaaaaaggcctgactgcgaagggaccccccccccgtcccccccgcaccaccttctcaacctggggcagctccaagtgtcttccctctgtcactgaaggcatcattcccaccgtaacacgcatcatcttaacccttccctcaaatcttcattctccagtccccggccctccctcctcttccaaagcctcagctcttgtcccctgcacaggctaccagcagagctgcagagaccaggccctctgctctgcactcacatggaggccccttcccattcagtccgtttctgcaagaaacgcttggggcaggggagctgccctctggctgggttgtgtggggcctgactctgtgggtccccgcctctgtccccgctatcaggtccccgagggccagactgtgtccctctcattccgagtcttcgacctggagctgcaccccgcctgccgctacgatgctctggaggtcttcgctgggtctgggacttccggccagcggctcggacgcttttgtgggaccttccggcctgcgcccctagtcgcccccggcaaccaggtgaccctgaggatgacgacggatgagggcacaggaggacgaggcttcctgctctggtacagcgggcgggccacctcgggcactggtgagaactccctcacctccgccttccccccctccaggccccgccccggccgcagccccgcccccagccctaacctccgccccgcccaccccgcgccccagtgcctagggccccctacctccctgacccattttcctcactaaccgccccttcagtccctcctccccgtcttctctcccctcctcccgcacccacccatccctcttccagggccccccccaggcgcgaggcggaaatgggtcaccgacccgcgggtggaatgggcggcctggggttactgggacggtgagtaactgccggcccccgtccgcaatcgggctccctccgtcgggcgcgagggggcaccccagggctggggggactaggttcctccaaccccggggggcccctacacccagccctgggctcccgattgcggtcccatcaccccctcctggcggcagaagtctcccttgcaatgtttcaggcggggacctccctaaaggggtcctcgggggctgtgccccaagtcgaggacaccctctccagcctgaaaggggactctgctgcagggccggggagatgggatctcctaggggaagaggcgcggtgcggccgcgggtcggggaggggccagaagggggcgtccagccagttcctcctcccgcttccaccgcccgccagtgcgccctgcggccccagacttccc

SEQ ID NO: 13187 - DNA, 995 bp, Homo sapiens
aaaattcagctgctgcctctgtcttgaggaccccagcgcctttcccccggggccatgctgcctgcagccacagcctccctcctggggcccctcctcactgcctgcgccctgctgccttttgcccagggccagacccccaactacaccagacccgtgttcctgtgcggaggggatgtgaagggggaatcaggttacgtggcaagtgaggggttccccaacctctacccccctaataaggagtgcatctggaccataacggtccccgagggccagactgtgtccctctcattccgagtcttcgacctggagctgcaccccgcctgccgctacgatgctctggaggtcttcgctgggtctgggacttccggccagcggctcggacgcttttgtgggaccttccggcctgcgcccctagtcgcccccggcaaccaggtgaccctgaggatgacgacggatgagggcacaggaggacgaggcttcctgctctggtacagcgggcgggccacctcgggcactgggccccccccaggcgcgaggcggaaatgggtcaccgacccgcgggtggaatgggcggcctggggttactgggacggtgagtaactgccggcccccgtccgcaatcgggctccctccgtcgggcgcgagggggcaccccagggctggggggactaggttcctccaaccccggggggcccctacacccagccctgggctcccgattgcggtcccatcaccccctcctggcggcagaagtctcccttgcaatgtttcaggcggggacctccctaaaggggtcctcgggggctgtgccccaagtcgaggacaccctctccagcctgaaaggggactctgctgcagggccggggagatgggatctcctaggggaagaggcgcggtgcggccgcgggtcggggaggggccagaagggggcgtccagccagttcctcctcccgcttccaccgcccgccagtgcgccctgcggccccagacttccc

SEQ ID NO: 13188 - DNA, 5077 bp, Homo sapiens
gctttccaaccggactttggggctagcgtttagaaaagtctcgacctcctccggcccggtcccatcccaagaaccgactaaggctgtgagtgtccgggaaccagacccgcttggaggccacagccccgacgtcccgcgcccacgcggcagatcgggcgctgcggcctgggagcctcggggagatgcggagcaggagcaattccggggtccgcttggacgggtacgcgcggctggtgcagcaaaccatcctgtgttaccagaatcccgtcacggggctgctgtcagccagccatgagcagaaggatgcctgggtgcgggataacatctacagtatcctggccgtgtggggcctgggcatggcctaccgtaagaatgcagaccgcgatgaggacaaggccaaggcctacgagctggagcagaacgtggtgaagctgatgcgaggtcttctccagtgcatgatgagacaggtggccaaagtggagaagttcaaacacactcagagcaccaaggacagcctgcacgccaagtacaacaccgccacctgtggcacggtggtgggcgacgaccagtggggccacctccaggtggatgccacctctctcttcctcctgttcctggcccagatgaccgcctcaggcttacgtatcattttcactctcgatgaggtggccttcatacagaatcttgtcttttacatagaagctgcatataaagtcgctgattatggaatgtgggagcgtggagataagactaatcagggcatcccggaattgaatgcaagctccgtaggaatggccaaggcagctcttgaggcaattgatgaactggacctttttggagcccatggaggacgcaagtcagtgattcatgttctgccagatgaggtcgagcactgccagtctattctgttctccatgctgccaagagcgtcgacatctaaagaaattgatgctggacttctttccattatttccttcccggcctttgcagtggaagatgtaaaccttgtaaatgtgaccaaaaatgaaattatttctaagctccaggggcgttatggatgctgtcgcttccttcgagatggttataaaactccaagagaggaccctaatcgactgcattatgaccctgctgaactcaagctcttcgaaaacattgaatgtgagtggcctgtgttttggacatattttataatagatggagtcttcagtggtgatgctgttcaggtccaagaataccgagaggccctggagggaatactcatcagaggcaagaatgggatccgcctggtgcctgaactctacgctgtcccgcctaacaaggtagatgaagagtacaagaatcctcacacagtagaccgagttcctatggggaaggtgcctcatctgtggggccaatccttgtacatcctcagctcgctgttggcagagggattccttgccgctggtgaaatcgatcccttaaatagaagattttccacttcagtcaaacctgatgttgtagtacaagttactgttttggcagaaaacaatcacattaaggacttattgaggaaacacggggtgaacgtccagagtatcgcggacattcatccaattcaagtccagccgggccggattcttagtcacatatatgccaagcttggacggaataagaatatgaatttgagtgggcgaccgtatcgacatattggtgtccttggaacctctaaactatatgtgattaggaaccaaatctttacttttacaccccagttcaccgaccagcatcacttctacctggccctcgacaatgagatgatcgtggagatgctaaggatcgagctggcctacctgtgcacctgctggaggatgacgggcagacccacactcaccttccccatcagtcgcaccatgctcacaaatgatggctcagacattcattctgctgtgctctccacaattagaaaactagaggatggatattttggaggagccagagtaaaattagggaacctttcggaatttctcaccacatcgttctacacatatctgacttttctggatccagactgtgatgagaagttgtttgacaatgccagcgaagggactttcagtcctgatagtgattcagatttggtaggatatctggaagacacctgtaatcaagaaagccaagacgaacttgaccattatatcaaccaccttctgcaaagcacatcgttgaggtcctatctgcctcctctttgtaagaacacagaagaccgccatgtcttcagtgctatccactccacgcgggacatactttctgtgatggcaaaagcaaagggtttggaagttccatttgttcccatgactttgccgactaaagttctaagtgcccaccgtaaatcactgaatcttgttgattctcctcagccactcctagaaaaggttcctgaaagtgactttcagtggcccagagatgaccatggtgacgtggactgtgagaagctggttgagcagctaaaagattgttcgaacctacaggaccaagcagacattctgtacattctttatgtcataaagggtcccagctgggacacaaatctctctggacagcacggggtcaccgttcaaaaccttcttggtgagctctatgggaaagccggcttgaaccaggagtggggtctgattcgctacatctcaggccttctcaggaagaaagtggaggtcctggctgaggcctgcacagacctgctttcgcaccagaagcagctcaccgtgggcctgccgcccgagccccgggagaagatcatctctgcgccccttcccccagaggagctcacaaaactcatctacgaggccagtgggcaggacatcagcattgccgtcctcacgcaggagattgtggtttacctggccatgtatgtcagggcgcagcccagcctctttgtggagatgctgagactccggattggactgatcattcaggtgatggccacggagctggcacggagcctgaactgctcaggagaagaggcttctgaaagtttgatgaacctcagccctttcgatatgaaaaatctcctgcaccatattctaagtgggaaagagtttggcgttgaaagaagtgtgcgccctatccactcctccacatccagccctaccatctccatccacgaggtgggccataccggagtcaccaaaactgagaggagtggcattaacagactgaggagtgaaatgaaacagatgactaggcggtttagtgctgatgaacagttcttttctgtgggccaggccgcgtccagcagtgcgcattcctccaagtctgcgaggtccagcaccccatcctcgcccactggcacgtcatcctcagactcgggaggacatcacatcggctggggtgagcggcagggccagtggctgcgcaggagaaggctggatggggccatcaacagggtccccgtgggattctaccagagggtgtggaagatcctccagaagtgccacggtctctccatcgatggttatgtcctcccatcctcgacgacccgagagatgaccccgcatgagatcaagtttgctgtccatgtcgaatcggtgctgaaccgcgtgccgcagcccgagtaccggcagctgctggtggaagccatcatggtgctgacgctgctctcggacacggagatgaccagcatcgggggcatcatccacgtggaccagatcgtgcagatggccagtcagctgttcttgcaggaccaggtgtcaattggtgccatggacaccctggagaaagaccaagccacaggaatctgccacttcttttatgacagcgctccgagtggggcttatgggacgatgacctacctaacaagagcagtggcttcttatttgcaggaattgttgcccaattcgggctgccagatgcaatagggtctcacctggaaacatgatcacactctcaatctgtcacgtgccccctagccttactgggaaccttctgtcccccaagatcccctgtgctatcaggaaagcatgtcccatcagaaacactctcggggggcaatggtagcactcaccctgaaactgatgtatgttaaagccacagagatagagctgaggagtcctgtgttcccccgcaaggagcaccccgggatcattttctaggttcatttctctggaacatttgctgtagcatctggtctcacggactctgaggaggaattggaaattggtctcttttgagtgcagagggaactgagacgccagcttaaattggctcttgcagagagttacagaaatagtttcgatgagctagtgacacatcctaaagatgcaaagatcctcctggcggcagtagccttgacaagggccacctcttcacaggatgcagtctgtctgtgcaccaaactcttcaccaaatagaacacttgtgtctctctgtggaatgggggttttcttgtgccttgcttgctttcatagccttccattttattggcatggctgccttgatgtaacataattctctgtccccaagatttagaaaattcctcttcgttcaccttggctcatggtcttccagggtttttatcctggctgtctatgaactagggttttctcctgccttaggaaaaatactgcatcttctggaatctagaaaaaaaaaaaaaaaaagacaaggctcctcttatagccaggcaagcagttgtttagggctagacctgttgtccccgctcgcgtggggtgaacgccccgcagtggatactgtcctcctgtgctctgggcgaggcgtcatagggtgagcacaagtcagcagtgccatggaagtgaacaggcatgtccccgcagaaacaatgcttccctctgaaaaatagagccaggctaggaacctgtaccctcttggtagaagcactttggtcttcactctcttgggtgggtgcagttggaggcaccgattggaggagagcaaggttgagtcaggtgtcagggtctggcaaatcttttgccaatgccctagcaatggagtttctctccgggcattgtcttaccttgggggaaggaaacaaaaccaatgggaaaacagtttctgtaaataataaaccttgaaagacaaatgctca

SEQ ID NO: 13189 - DNA, 2317 bp, Homo sapiens
attcttagtcacatatatgccaagcttggtaggtttggggaaattacctgggcctttttggcatgggggcatctcggttctagatttggggtctgagggagactgtgatatacgtaagttctaaagacttggacaaaaactaaagcaggcggttccaccgcttcgatgtgaagaggaacgggcaaaccagcacgttctcacacccgttcagtgggcaccgtcacaggtggccaagcattcgccggatctgttgtaaaataaggagccaccttgaaaaatttacaattggaaaagtcatttgtgtcttgataatgcttctcatgtttacctttagtatcagaaaatgctcatttacacattaaaatgggaggaggttctctatgctttttctacaatctgactttgtttactattatggttcaatactaagtaaatcgaaagtaaatgttctatagtccttttagtagttttattccatgcagttccaactgggtactgttcatatacattcatgaaaagaagggggcgggatttgttttaatattcagcttcgtgccattttaaaggatgatggcagtagaagaaccaagccccaaaatgggttgtctaatctagaaataagctcagtcttagcctgagttgcctggattacttgttaaccgtatttcctctaactccaatttatcttttacttctcaaacaggacggaataagaatatgaatttgagtgggcgaccgtatcgacatattggtgtccttggaacctctaaactatatgtgattaggaaccaaatctttacttttacaccccaggtgaggagagcaggccaacgagcatcttttttttaagttctctttgctgtctggtaagcttttctcctgtgaatatgacagaattctgcatgcataggttcaaatagagacatatgaaatgataccaagagcctagtacaagtctgcccgtagtaggtgctcggtaaatgctttttgagacaggcgtgccatcacttccagtcatgaatattagtgaaattcagactgctttagaagtttgctgttgacatgtcacttgactcacagcccttgtgcccctaatcacaatcatctctgacccttgtgcaagctgtcatcagaccctctgtgtaacacacagccaggctgattttctggccacaccctcgcttactgggatactgaatgtactcatggaacttactggagagctttggtttccaaagaaaactagtcctgtggaagtacatagaaaatatttttcacccatttgggcagctagaaagaccaacagtgggatcgctttggcagtgcagggcacaatccctgcttacctgggcacagggttggtcatggggtcttgggtcaagctgctgtttcatcctagcccctgctgctcacagaaagcttgtgagctatttcccttagtagcaaatttcagtccagagctgagcatgcactagtccagaggccaagagaacagtttgatttgttctcaacatcaggcagcagtgtctttagttgacattaaccaaagccatcaatcaggtaaacagagtgtccacctcccacctgctcacagtgcccccacttggaaagcatcttcgaacccatagccctggaaggatcaggaattaaggagttattgatttgctttcagagacagcagtgttgggcaagatgcttaaatccccatctgaggagctggaaataaatctagcagtgcacctttcccttccaccctacagcgacagctcccgggcaggcagcagactgatttgtctgatcttgagcagggcagccccatgactgggtggattgaaacgagtactgagcctcttgcctggcaataaaaccccaggattagtgctgacctgagttgtcagctggtgtttccaggtaaagaaagggtggccgtttacccagcctcctctgactttcagttcaccgaccagcatcacttctacctggccctcgacaatgagatgatcgtggagatgctaaggatcgagctggcctacctgtgcacctgctggaggatgacgggcagacccacactcaccttccccatcagtcgcaccatgctcagtaactccagggatttcagcaggctccctcctgccccaggggtggtttgggctcttacaaatgtttaaaatggctcccatggccagaactaagcactgaaggggcttcttagcagtttggtttcttatctcgggaatcttctatgccagaaatattttaattagatggtgttgatgaaaatgtttcagtgcataacggaaaaaaagtctgcccagac

SEQ ID NO: 13190 - DNA, 500 bp, Homo sapiens
attcttagtcacatatatgccaagcttggacggaataagaatatgaatttgagtgggcgaccgtatcgacatattggtgtccttggaacctctaaactatatgtgattaggaaccaaatctttacttttacaccccagttcaccgaccagcatcacttctacctggccctcgacaatgagatgatcgtggagatgctaaggatcgagctggcctacctgtgcacctgctggaggatgacgggcagacccacactcaccttccccatcagtcgcaccatgctcagtaactccagggatttcagcaggctccctcctgccccaggggtggtttgggctcttacaaatgtttaaaatggctcccatggccagaactaagcactgaaggggcttcttagcagtttggtttcttatctcgggaatcttctatgccagaaatattttaattagatggtgttgatgaaaatgtttcagtgcataacggaaaaaaagtctgcccagac

SEQ ID NO: 13191 - DNA, 5197 bp, Homo sapiens
ttaagataaagcccagtgccaagaatagggaaagccggaaatgggattgcaaagggtgggtggatggaccctgatctgcgaggtcctcgccactaaacgcgggcttcactgtttgtcttcccccgtgtcatgtattgccttctctgtggttcctgtcctgtggaaacgtgtctgtcacttctctgtggcactgcagcaatgaagtgggcactatggagtttgtctccctgagccatggatgcctgctccgagggcccgttgtcaccctcaaagctctcccactgcagtggcacaggcgccacgtgcgggtgacagctgcccctcatgggcacttagcgcacactaggtatgcctcaggggcttctgtgtctccacgtggtgaaggcttccgggcagctctttataggatgcctgactgtgtccccactgtgcagatgagactgaggcccagaatcagtgttcatggcagggccagacggcctcgggtgtgtccttggcaccgctggcattgagtggggattagcactccggcagtctgacccccaagcccgtgctcgccctgttcggcctcctccttatgggttctagctttgggggtgggactgcctctcggggggcagggcagagtgcaacatggaatgaagtgatcaacccaaagtatgcgagtcatctcacatgaggaaacagacaaggtggactggaggaaccgtgttcctctctggcgagtggtgttctggcatttgtgcctaggtcgcagggccgcccttcgagatggcgcactttccctggggcacctgctgcgtggcttctgaggccccaagctgtctgtcttgcagaggtccagcaccccatcctcgcccactggcacgtcatcctcagactcgggaggacatcacatcggctggggtgagcggcagggccagtggctgcgcaggagaaggctggatggggccatcaacagggtccccgtgggattctaccagagggtgtggaagatcctccagaaggtaagccgagacgcgagctcctggggaagtgaaccgtccccttactgtcctggcaaggcatggtggcacctccaggcgagcaaacacacagccctgaggatggcttctctgcctcagcgctgttggcacctggggccgaggcattctctgctagggggcctgtgcgtggtaggatgtctacagcatccctggcctctacccgccagatgccagcagccatctcttctccccaccccacccccgtgtgacaactaaaagtgtctccaggcattatcaaacatcccgtgggaggcagatcaacccagttgagaaccacagcaagtaagacaaggtggcagtctaggttgtggttgtgtgggaccaacttggacgtattttaggaacatagaagaacagggaaaggctgggaggcttcagatgaaaaccctgtaaaaccacccagagcagcacctacaggcctggaacctggaatgacagttcaggaggggcctggagtaggccagccccccagcctcccgcacatccaggcaggagtagtgtccctgctgttcagcgatgtgactgagccccaccctcccagggtacctgccgtgttcagtcccaaggtgtacagaggtggagagcttccagtttagccccaggtcctgtgtgccctgaaggcacaatctccctcacaccctggggccccactcccctcagccagccggctgttgcgcttcccatctgcctggggccgttcacgtctccccagctgttgtccctgggaactgtggtgcctgtacctgagcacaggagcacctccctgagcgcctgttgtcaaggaggggggcagcattctctgtacccccccagtgtctcccttctgcatcagcccgagagagtttatgcagctccctgggctgcaccaggccctccctgtcttttcccttgaatggaaggacagtgtgcctcgcttaaaagctgtgcaaaccaagacatttttttccccccagaactattttttagttcatttcacagtgggagagaagagaaaaaataatcccagtgacagcatacaacagcccccttcccaaagccatggcaccacttgctcaaggttctttctgtaacaggggcccctgtgcttcatgggccccaaggtattcctcacggccaccgcagagggatgtgaggaggtcggagcaggccctgcccgagcagctggactcctgggacccaggcaggatcctgcaggggctcatggtgcttgctccacttcccgcctctcttaagggggtgggagtgtccactgctgttctgccctcagcccactggggacgctccaggccggggtgctgggatttagaaggtggccagttagactagaacaagctgttcctagaaaatttccccactcttcctggggcatcacatgcttccgctcggactcactggcgcaataccaagatatttctattatgaaaaagcattttgtgttgagctggcactcgatatttatatacatgggtgtgcatgtgcatgtctgtgcatgtgctggaggcttttgtgattggtgcttattatagaaatctcaaaaatagatgcctgcaaaggcacagaagcatcccttccccagcaggagccatgaaaatccccctttattatggcaccaaaggggcctcgcagccgcccgggcccagttgccaagtacaatgcggagcctcccgggaggactcggcagccccctagggcattgttcgggggagatctgaaagatgcctgctgggttccctagaattgttccatcgaaaacacagcctgtgggcagtgagaacaagctctctaaaaataactctgacagtctggcgtgtcccagccctcatatgggtttccagggcagagggtgctgtgtgtgcatgcacgcctgtgtgtgcatgcatgtgcttatcccattctggaatctgactgaaatgcgctctattctgcctccagtgccacggtctctccatcgatggttatgtcctcccatcctcgacgacccgagaggtacgatgagaaaaacgcagaggcgggcccctctgtgggttcacaataagggcttcattgcatggactctgacctcttgtgctccttttgggctcattctaattgacaggccatttgtagctctgagctgtctagccccttcaccctcatatttggcaaaaatgtctttccagcatttattggcatcagcctttttcttcacctgagactcagcatttctgggctagcaagctctttgcatttgccagacaccccttagaaccctggtgaaagaaaggagccaatctccatgccaccctggcctgccccatgggcagccttctcggcccttttctccaactaaaaacagtaatcgtccctaggtgatttgtcattctttttaacatggatttttttttagttttaccccacccaaagcaccatgcttcatgctggaaggaataatgaagaggaaagagaaaccagaaatggtccctgctccctggaagctgtagtcgatggggggaagggtagataaatcaggcgaggacaggctggctcctggaggcatactccagcctcctgctctgagggccactgccagcaggatccagggagtggccagaaaaggggcagcagtggcgctgagccccgagcccaggcactgctacggtcacccttggttactcggtgattgattgatagggctgcatctgtcctctcactggtggttgcctgcctgtccctttggtagatgaccccgcatgagatcaagtttgctgtccatgtcgaatcggtgctgaaccgcgtgccgcagcccgagtaccggcagctgctggtggaagccatcatggtgctgacgctgctctcggacacggagatgaccagcatcgggggcatcatccacgtggaccagatcgtgcagatggccagtcagctgttcttgcaggaccaggtgggggtgccagggagctgggttggctggcatttatctctgttgaggctggagattctgtgtccaataggaaagaatatactcgaaccaagaaaatgtcatcacagatgatggggaaaaaatgtcaaccacttgcttagaaaatggtacagtggccacttgggaaatctcaagacctttggggatggataggcctgtctcaatgcaggttttcgtccaaacaccaccacttgcaacacatgtgaccatgggtgaaccccttaccctgtacacaaagtcaagttcaacagagtagtcctcattatagtcaggagctacaaactagggtgcgtgataacagagtgcagtgcccagagaggtagggcattccccctggcagcgctggcttcgtgccctcatgccctcagaattggagcctctcagaaggccaaggctctactagagcaaccctcacccctgcccatgttgacccgctgccaccaccacgcagaagcgtgacggggagtgggggctccgcttattgtcccctctgccctttcctactgcaggtgtcaattggtgccatggacaccctggagaaagaccaagccacaggaatctgccacttcttttatgacagcgctccgagtggggcttatgggacgatgacctacctaacaagagcagtggcttcttatttgcaggaattgttgcccaattcgggctgccagatgcaatagggtctcacctggaaacatgatcacactctcaatctgtcacgtgccccctagccttactgggaaccttctgtcccccaagatcccctgtgctatcaggaaagcatgtcccatcagaaacactctcggggggcaatggtagcactcaccctgaaactgatgtatgttaaagccacagagatagagctgaggagtcctgtgttcccccgcaaggagcaccccgggatcattttctaggttcatttctctggaacatttgctgtagcatctggtctcacggactctgaggaggaattggaaattggtctcttttgagtgcagagggaactgagacgccagcttaaattggctcttgcagagagttacagaaatagtttcgatgagctagtgacacatcctaaagatgcaaagatcctcctggcggcagtagccttgacaagggccacctcttcacaggatgcagtctgtctgtgcaccaaactcttcaccaaatagaacacttgtgtctctctgtg

SEQ ID NO: 13192 - DNA, 1945 bp, Homo sapiens
ttaagataaagcccagtgccaagaatagggaaagccggaaatgggattgcaaagggtgggtggatggaccctgatctgcgaggtcctcgccactaaacgcgggcttcactgtttgtcttcccccgtgtcatgtattgccttctctgtggttcctgtcctgtggaaacgtgtctgtcacttctctgtggcactgcagcaatgaagtgggcactatggagtttgtctccctgagccatggatgcctgctccgagggcccgttgtcaccctcaaagctctcccactgcagtggcacaggcgccacgtgcgggtgacagctgcccctcatgggcacttagcgcacactaggtatgcctcaggggcttctgtgtctccacgtggtgaaggcttccgggcagctctttataggatgcctgactgtgtccccactgtgcagatgagactgaggcccagaatcagtgttcatggcagggccagacggcctcgggtgtgtccttggcaccgctggcattgagtggggattagcactccggcagtctgacccccaagcccgtgctcgccctgttcggcctcctccttatgggttctagctttgggggtgggactgcctctcggggggcagggcagagtgcaacatggaatgaagtgatcaacccaaagtatgcgagtcatctcacatgaggaaacagacaaggtggactggaggaaccgtgttcctctctggcgagtggtgttctggcatttgtgcctaggtcgcagggccgcccttcgagatggcgcactttccctggggcacctgctgcgtggcttctgaggccccaagctgtctgtcttgcagaggtccagcaccccatcctcgcccactggcacgtcatcctcagactcgggaggacatcacatcggctggggtgagcggcagggccagtggctgcgcaggagaaggctggatggggccatcaacagggtccccgtgggattctaccagagggtgtggaagatcctccagaagtgccacggtctctccatcgatggttatgtcctcccatcctcgacgacccgagagatgaccccgcatgagatcaagtttgctgtccatgtcgaatcggtgctgaaccgcgtgccgcagcccgagtaccggcagctgctggtggaagccatcatggtgctgacgctgctctcggacacggagatgaccagcatcgggggcatcatccacgtggaccagatcgtgcagatggccagtcagctgttcttgcaggaccaggtgtcaattggtgccatggacaccctggagaaagaccaagccacaggaatctgccacttcttttatgacagcgctccgagtggggcttatgggacgatgacctacctaacaagagcagtggcttcttatttgcaggaattgttgcccaattcgggctgccagatgcaatagggtctcacctggaaacatgatcacactctcaatctgtcacgtgccccctagccttactgggaaccttctgtcccccaagatcccctgtgctatcaggaaagcatgtcccatcagaaacactctcggggggcaatggtagcactcaccctgaaactgatgtatgttaaagccacagagatagagctgaggagtcctgtgttcccccgcaaggagcaccccgggatcattttctaggttcatttctctggaacatttgctgtagcatctggtctcacggactctgaggaggaattggaaattggtctcttttgagtgcagagggaactgagacgccagcttaaattggctcttgcagagagttacagaaatagtttcgatgagctagtgacacatcctaaagatgcaaagatcctcctggcggcagtagccttgacaagggccacctcttcacaggatgcagtctgtctgtgcaccaaactcttcaccaaatagaacacttgtgtctctctgtg

SEQ ID NO: 13193 - DNA, 11657 bp, Homo sapiens
agaggagctcacaaaactcatctacgaggccagtgggcaggacatcagcattgccgtcctcacgcaggtctggggctggtgtgggaggggtcgggccacagccttcctcagagtggaggggacccttcagccactcaccctgtctctgaaaccctatctccgtgtgtgtctgcctcaggagattgtggtttacctggccatgtatgtcagggcgcagcccagcctctttgtggagatgctgagactccggattggactgatcattcaggtgatggccacggagctggcacggagcctgaactgctcaggtgagatgcccgcagctcctgcagctcccgccgcaccccaccccaaccacccggccacggcctccactctcaggggaagaactgcttaggttatctcgaacccagcatccaagcctgtggcaagctcaggccttaccagcttctctcatttagatggaactcccatccatgcggcatagagctgaagttcataagtcagggagaatggggctctggtgatgtttaccattatagcctcaaaggcgatgtggaatcttccgccctgtacccgacatctaagctccttcctggatgcccttgctatgagatgtcacccccattttataacaccttcactgggagaaaccctaccaatttgaatataaaaatccatcatgagacatccaacgttggggatcatacattgtgaaacatcatgtgtctaagaattaagcagatacatgatttaaacggcagcatttagaatccccacggaacagtgcatttcagccccaaagcaatagtgaggttctcctgaacagggggacctgccatggcatctgctatcacctccctccccacccacgtccacctgaccctacctttacccgccaccagccctgtgtttgggacacttacaagatatttgtttttaggagaagaggcttctgaaagtttgatgaacctcagccctttcgatatgaaaaatctcctgcaccatattctaagtgggaaagagtttggcgttgaaagaagtggtaagttccatgctcctgttaacgtcttcagggagctgcctcctttacatgcagcagacattagaaccagcactgtggggcatagcgaatgtgggaagagaaggctcctacctgaaggagatggacagagtcctaggctcaagcttcctgctttgggggctttgagacttgctcgcagtgtgctgggcgagcttttcttgcccaggttggcacagcatgtgggtgtggtataccgcctcctgtagtcgtaagcacctggcaccatcacttacgcaaaagtgttggctgggctcggtggctaacgcctgtaatcccagcactttgggaggctgaggtgggcggatgacgaggtcaggagtttgagaccagcctgaccaacgtggtgaaaccccgtcactactaaaaatacaaaaaaaattagtcaggcgtggtggcgcgcgcctgtaatcccaggtactcaggaggctgaggcaggagaattgcttcaacccgggaggtggaggttacagtgagctgagatcgcgccactgcgctccagcctgggcgacagagcaaaactctgttctcaaaaaaaagtgttagaagtgtgggggaccccgaatgccagggtgaaagggctgtcctttcacaccacctgagcatcctgccctttggtttgggtaaaaacattctcaacccggcctcacatcaccctccacagggcagggaggagacccctctgtgacctcagcatgctcgagctaacttattttgctttgtcctgcctcgctcactctgtttttatctgaaccggaaccctgcttgcagtgctgggaaacataatcacccaagtcctggcgtgattcttgttctcaaatgttccctaattataattgaagcaattatcatttctcctcctcataaaaaagctaaatgatttgcaggcacgttggtgaatttatttcatcaagccaaagaaatgcactgtgggctatcattcctttattatttaataagaaggacattgggtactttgtatgtttcctgagcatgtgctggctgcaaacaaagacagcatcgtgcagtcagatgtgttttggtggtttttctcctttcccgaaggaggggtgctcagaatgcttttgcaaaagtaatttccagttctttccaaggcagagtccttgaaatggtaatgtacgagataaatatttaatgtgttctgctcatcattatagtattcatggcttgacacagataattactaaaaatttgtcattagatgtacagctatagatgctatgaaactaggaactgagtaatgtcatttgaaagtcataaatatgtgcgattgcaagcaagagcagaagacatgctgtctttttaacatataacatcatttgttagctgtcctttgtaattgctcaatttttgtaaattaggaagcccaaataggcttagaattttgattaaatcctgagatgtctgagataaatgtttccagcgaacacccaccccagacagcccctcttgtagcttccagacccttctccttctgttttccactttcctgggtctgtcctccctccccagctcatcactgagtctcccttatgggctcctgcctctctgctgtcctttaaatgttcttgtccccaagttccttatttgtcactactcctcctgcacagtgccctccactcccatggctccattggggtcaggtgggatggtgaggcttgcaggggatgctgcccgaggaggtgacctttgagctgggcctggccttccagcacaggcagatgcccagtgcggtgcaggtggccgggagttgaggggaggtagggctcgagttggtagagtttcaggtgatgctgggaggactgtttggcctttgtcctgaagacagctagacctgggaggctttggagtgggcagtgatacgatcacacttgccttttagaatgattgctgttaccacagcacagaggccaggcttgtgggtggtggggctagggaccggtttgagccccgaggctggtgcgataggttgggagtgagaggtggtggcctggtgcagtgcatcagtggcctctggttgcctccacctccagcccctggcagcctggctttcctagcacttccccctccagcccgaggcccttctccagctgccaccttcatttcatttggcaccttgccctcaggcctgggcatgggctctcctccagaccccgctgtggcactgaattctcctgcattcacacctgcatctgctgcccagacagggcctggcaccaggaggccctctggatcatccagcccacggccacagctgcccggggtgccagcccctcgggcccacagcagttttgtcattttccaggggcattccgagagtcacacgggactggggacagagcccagcaaggtccatgtgggtcctacacattagtcatgacgaaccctttagaaaaatattaatacaaataggattgggtatattgttgaccagtcaacactcaccagatcaaactccatgcggtcatgaaacatgatgtgatagaatatttaatgccagggagagacattcacgatacaagtacaaaaaggcaggtcacagaaccataccacagaatgtatgtatccatctcatgtttctgtatctatacgtatgtatgtgatggtactgttttgttagttaaaaacatacacagtcatagggaaaaaaactggaagaatcatgactaaaatatcaagagatgttagttctagcttctgtagttcagtggtctcagttttctacaaggaaggtgtgctttgggttttttttaaatttttgtttatttatttatttctaattaaatatagatacgaggtctcaccatgctgcccaggctggtcttgaactcctgggctcaagcagtcttcccacctcggcctcccaaagtgctgggattacaggtgtgagccaccgtgcctggcctcgggtatgttttttgtttgtttgtgtattttttgagacggagtttggctcttgttgcccaggctggggtgcaatggcacgatctcagctcatcgcaacctccatctcccaggttcaagcaattctcctgcctcagcctcccgagtagctgggattacaggcatgtgccaccacgcccagctaattttgtttttttagtagagacagggtttttccatgttggtcaggctggtctcgaaatcccggcctcaggtgatctgcccgcctcggcctcccaaagtgctggaattacaggtgtgagccaccgcgcctggccgggtatgttttattagaataattttttacttatccaaaagcaagggtgggcacggtggttcatgcctgtaatcccagcactttgggaggctgaggcgggcagatcgcttgagcccaggagctcaagaccagcctgggcaacatggcaaaaccctgtcttcacaaaacatacaaaaaattagccaggtatggtggcgcacacctgtggtcctagctacttgggaggctgaagcggaaggatcgcctgagcccaggaggcagaggttgcagtgagccaagatcgcacactccagcctcgggaacagagcaagactctgtctcaaaaaaaataaaaaaacatggctggttgcagtggctcacgcctgtaatcccagcactttgggaggtcaaggtgggcggatcacaaggtcaggagtttgagaccagcctggccaatatggtgaaaccctgcctctactaaaaatacaaaaattagccgggcgtgatggcgggcgcatgtaatcccagttactcgggaggctgaggcaggagaatgtcttgaacccaggaagtggaggttgcagtgagccgagatcatgccactgcagtccagcctgggcgacagagtgagactccgtctcggaaaaaaaaaaaacatatctcactgtgtcggggcttcctggccactgtgttataatggtgcttaagtactctgcacacttccgtttactcctttaagagctgagtgctgcacctgtgctgctctcggtgctggagacacagcgctggccaggcagagaaggccctcattgtcaagtgggggagacaggggcagatcctgcctcgggttggatgctgtagagttcctgagaaccacgtgtgtgtgtttcccacccagtgcgccctatccactcctccacatccagccctaccatctccatccacgaggtgggccataccggagtcaccaaaactgagaggagtggcattaacagactgaggagtgaaatgaaacaggtaagaacacctcagtggcagcgagggatgagtggtggtctccctacctgggcttaccccagaaagcgacagaaacctagggcatgaggctgcagcccactgtctgtagagtgggaggtcccttctgtctgggatctgaacacacccctgtccccagatagatattccagagccggtcatgcgcacccttacccactcatccttaaccttaacgtgatgttctcatgaacgttccagaaaatacccttgtccatgtttgcctctgttcccgagaaccactcttaggagtgggccacagccattgaaaaagtagagtcatgcaaaaagtcaccgaatcatctgtgtccttcaaacgaaatagcaagagggctctggaaatagaccagaatgcccatgatacttggattctccaccagccacaggggtctcttttcttagttcacctttaattcctggtaaaaaaaaaaaaaaaaaaaatccttttgaactgaccgcacagggccacagctcaacatcggagtcttaacgtgctgggtgctgtgctaggccttgcccaggatccatgctgggaaagagtttccctctgaccatgagaaatgcactcgaattttctgctccattttaaatgctgttcatgacccactaaatggagtccatgatgcactcatgggtcaccccctgcggtttgaccaacacggccctggattaagagagagggcaatagaagaagcacgcgttcttggctcaaagctggttttgatttcctgatgtatttttgctttcagatgactaggcggtttagtgctgatgaacaggtgacacccctttgccttgttcgtcctttacttcctgttctttctggcttgaatgtggaaagtgaggctgtgactccgcagcgtgtgaatgtgtagagggcggctctatccagcaaacgggctggggcacaggcagagagcaggactcgagggcaggagagacgaccttgccccatgcctttaaaaataatctgtttctcaaactcttgggctttgtagggtactttgtgaaagagatcatccaggctctgcctcagtgggagtttctattcaaaaagagggaactaaatagaaaactaaatgggggggaaatgcggtcattggttatatcagtagaaagaatgctgctattcctgtcctcagatcgcctggggggacttaaccctggaaggaaaaacatgtaagggtgctcttcttttatatcaccctggtgacatatgttctccacccccctctgggacactggagtcgcatttctaatattttgatgtgtattaccacaagagcctagagacatcttaatgacatgtaaaggccgattccacatgttgcccagaggtaaaacatgctttatctctcctagtttatgctgtttccaagtagggaactgccttttcaaacatcttcccttgccagccactcggtggcaccgtccctctgtccccgcatcccgatggcctgaccgtgggtgaatctgagtggttccttccgcctctatttcatgctgttcttgcgtgttacggggatgaagtgatcacctctgttctttgctgggcttagagtcacctagctagtacaaactttgaccacttacgtcaaggaacatattatttgttccaaaaatgtaataggtgttatggtattttcaatctctagtctcttttgtaagaataccttgtagatagcacactgtacccttgcaaattaagggtacattctagattttagacgaggaaatacttatgtggccaaaggtatcagcccgatcatcatattcattcatttaatgaatatctactgaatgttaggtgcagcatgttagtgtcagctgtaggtatttggttcatctgtagattttcacaattcttaccataaaatgtgagcatttcatggctgtgagtttggaaaataaatagtgtcctaacttgatgatgcaccctccacatatgacaggaacatttaatgtttacattcaatggtaacagttcatgtttttaaaaagagcagttagtaagtttcacgtggagtcgaagcccagagcggtgcttgcaggtgcccctgcacctgagcttgcctatgtgcgttgctgtggcaccttctctgcgcccgcattctctgctgctgctttctgtgggtgtttcggatgctgctccatgaccctcctctctgctgtgtctcttggtgtcattgctgtcaactgagtggattctttttgttttgtagttcttttctgtgggccaggccgcgtccagcagtgcgcattcctccaagtctgcggtaacagtgcctcgggattattgtgtccgtccccgctcctcctcgcgtccttcctcatgctcccacctcatgcccaacttctgaggattcgagcagggctgaagtgttttcagcgggatgctcacaggctcctccaactggaattctgaggagggtagaaagaaggccccaaagtgcttgccctgagctttgttctccgtcttaagctctcagttctctgcctgtgctccttggcacagtgtgggtgaggagtttccttctcaccaattcccagagcttctggaaacttcggggcattagttccatgcctctttatggagccaggatggtgagcccttgcccacatgtgccaactagcactctgcacctgccatgccccagatctcgtgcagggctcggattgagctcaccgcagagcagaggctgaatcttcctcctgaaactggagggcccggatcagctgagtcattgaggagtgcagctgtaattacttttatttgtgtctaattgttgccttaagtggcagtaatgagcccaatggaataacccagccgaactgccttttcaaaataagatctgttgaaatccaactgctgcagaaaggagagctccacctcctgccctgctagcacacttcaggatttcactttaaccctttacatttgactgtgcacatttgatgtgtggcactatcgagaaacaaaagtgccagatagtcccaggcaaagagatgtgtgagagtgaaggttatcccttctcgacctggaggtctcgaagctagaagccccgcagggcaagacagaaggctgggagctttgccgcagggaggggatgcgcccccactcacagaggcccgccccgccagcggtggggagcctctcagacagtgtccccctctggagcctgaatcagtccagccaatgttgaggtgggaaggagatggcgccctcttccctcacttcagcaaagtcagccccagttcagaggcagccattgccccaaattaagataaagcccagtgccaagaatagggaaagccggaaatgggattgcaaagggtgggtggatggaccctgatctgcgaggtcctcgccactaaacgcgggcttcactgtttgtcttcccccgtgtcatgtattgccttctctgtggttcctgtcctgtggaaacgtgtctgtcacttctctgtggcactgcagcaatgaagtgggcactatggagtttgtctccctgagccatggatgcctgctccgagggcccgttgtcaccctcaaagctctcccactgcagtggcacaggcgccacgtgcgggtgacagctgcccctcatgggcacttagcgcacactaggtatgcctcaggggcttctgtgtctccacgtggtgaaggcttccgggcagctctttataggatgcctgactgtgtccccactgtgcagatgagactgaggcccagaatcagtgttcatggcagggccagacggcctcgggtgtgtccttggcaccgctggcattgagtggggattagcactccggcagtctgacccccaagcccgtgctcgccctgttcggcctcctccttatgggttctagctttgggggtgggactgcctctcggggggcagggcagagtgcaacatggaatgaagtgatcaacccaaagtatgcgagtcatctcacatgaggaaacagacaaggtggactggaggaaccgtgttcctctctggcgagtggtgttctggcatttgtgcctaggtcgcagggccgcccttcgagatggcgcactttccctggggcacctgctgcgtggcttctgaggccccaagctgtctgtcttgcagaggtccagcaccccatcctcgcccactggcacgtcatcctcagactcgggaggacatcacatcggctggggtgagcggcagggccagtggctgcgcaggagaaggctggatggggccatcaacagggtccccgtgggattctaccagagggtgtggaagatcctccagaaggtaagccgagacgcgagctcctggggaagtgaaccgtccccttactgtcctggcaaggcatggtggcacctccaggcgagcaaacacacagccctgaggatggcttctctgcctcagcgctgttggcacctggggccgaggcattctctgctagggggcctgtgcgtggtaggatgtctacagcatccctggcctctacccgccagatgccagcagccatctcttctccccaccccacccccgtgtgacaactaaaagtgtctccaggcattatcaaacatcccgtgggaggcagatcaacccagttgagaaccacagcaagtaagacaaggtggcagtctaggttgtggttgtgtgggaccaacttggacgtattttaggaacatagaagaacagggaaaggctgggaggcttcagatgaaaaccctgtaaaaccacccagagcagcacctacaggcctggaacctggaatgacagttcaggaggggcctggagtaggccagccccccagcctcccgcacatccaggcaggagtagtgtccctgctgttcagcgatgtgactgagccccaccctcccagggtacctgccgtgttcagtcccaaggtgtacagaggtggagagcttccagtttagccccaggtcctgtgtgccctgaaggcacaatctccctcacaccctggggccccactcccctcagccagccggctgttgcgcttcccatctgcctggggccgttcacgtctccccagctgttgtccctgggaactgtggtgcctgtacctgagcacaggagcacctccctgagcgcctgttgtcaaggaggggggcagcattctctgtacccccccagtgtctcccttctgcatcagcccgagagagtttatgcagctccctgggctgcaccaggccctccctgtcttttcccttgaatggaaggacagtgtgcctcgcttaaaagctgtgcaaaccaagacatttttttccccccagaactattttttagttcatttcacagtgggagagaagagaaaaaataatcccagtgacagcatacaacagcccccttcccaaagccatggcaccacttgctcaaggttctttctgtaacaggggcccctgtgcttcatgggccccaaggtattcctcacggccaccgcagagggatgtgaggaggtcggagcaggccctgcccgagcagctggactcctgggacccaggcaggatcctgcaggggctcatggtgcttgctccacttcccgcctctcttaagggggtgggagtgtccactgctgttctgccctcagcccactggggacgctccaggccggggtgctgggatttagaaggtggccagttagactagaacaagctgttcctagaaaatttccccactcttcctggggcatcacatgcttccgctcggactcactggcgcaataccaagatatttctattatgaaaaagcattttgtgttgagctggcactcgatatttatatacatgggtgtgcatgtgcatgtctgtgcatgtgctggaggcttttgtgattggtgcttattatagaaatctcaaaaatagatgcctgcaaaggcacagaagcatcccttccccagcaggagccatgaaaatccccctttattatggcaccaaaggggcctcgcagccgcccgggcccagttgccaagtacaatgcggagcctcccgggaggactcggcagccccctagggcattgttcgggggagatctgaaagatgcctgctgggttccctagaattgttccatcgaaaacacagcctgtgggcagtgagaacaagctctctaaaaataactctgacagtctggcgtgtcccagccctcatatgggtttccagggcagagggtgctgtgtgtgcatgcacgcctgtgtgtgcatgcatgtgcttatcccattctggaatctgactgaaatgcgctctattctgcctccagtgccacggtctctccatcgatggttatgtcctcccatcctcgacga

SEQ ID NO: 13194 - DNA, 728 bp, Homo sapiens
agaggagctcacaaaactcatctacgaggccagtgggcaggacatcagcattgccgtcctcacgcaggagattgtggtttacctggccatgtatgtcagggcgcagcccagcctctttgtggagatgctgagactccggattggactgatcattcaggtgatggccacggagctggcacggagcctgaactgctcaggagaagaggcttctgaaagtttgatgaacctcagccctttcgatatgaaaaatctcctgcaccatattctaagtgggaaagagtttggcgttgaaagaagtgatacgaggtctcaccatgctgcccaggctggtcttgaactcctgggctcaagcagtcttcccacctcggcctcccaaagtgctgggattacagtgcgccctatccactcctccacatccagccctaccatctccatccacgaggtgggccataccggagtcaccaaaactgagaggagtggcattaacagactgaggagtgaaatgaaacagaggtccagcaccccatcctcgcccactggcacgtcatcctcagactcgggaggacatcacatcggctggggtgagcggcagggccagtggctgcgcaggagaaggctggatggggccatcaacagggtccccgtgggattctaccagagggtgtggaagatcctccagaagtgccacggtctctccatcgatggttatgtcctcccatcctcgacga

SEQ ID NO: 13195 - DNA, 1795 bp, Homo sapiens
tgcttatcccattctggaatctgactgaaatgcgctctattctgcctccagtgccacggtctctccatcgatggttatgtcctcccatcctcgacgacccgagaggtacgatgagaaaaacgcagaggcgggcccctctgtgggttcacaataagggcttcattgcatggactctgacctcttgtgctccttttgggctcattctaattgacaggccatttgtagctctgagctgtctagccccttcaccctcatatttggcaaaaatgtctttccagcatttattggcatcagcctttttcttcacctgagactcagcatttctgggctagcaagctctttgcatttgccagacaccccttagaaccctggtgaaagaaaggagccaatctccatgccaccctggcctgccccatgggcagccttctcggcccttttctccaactaaaaacagtaatcgtccctaggtgatttgtcattctttttaacatggatttttttttagttttaccccacccaaagcaccatgcttcatgctggaaggaataatgaagaggaaagagaaaccagaaatggtccctgctccctggaagctgtagtcgatggggggaagggtagataaatcaggcgaggacaggctggctcctggaggcatactccagcctcctgctctgagggccactgccagcaggatccagggagtggccagaaaaggggcagcagtggcgctgagccccgagcccaggcactgctacggtcacccttggttactcggtgattgattgatagggctgcatctgtcctctcactggtggttgcctgcctgtccctttggtagatgaccccgcatgagatcaagtttgctgtccatgtcgaatcggtgctgaaccgcgtgccgcagcccgagtaccggcagctgctggtggaagccatcatggtgctgacgctgctctcggacacggagatgaccagcatcgggggcatcatccacgtggaccagatcgtgcagatggccagtcagctgttcttgcaggaccaggtgggggtgccagggagctgggttggctggcatttatctctgttgaggctggagattctgtgtccaataggaaagaatatactcgaaccaagaaaatgtcatcacagatgatggggaaaaaatgtcaaccacttgcttagaaaatggtacagtggccacttgggaaatctcaagacctttggggatggataggcctgtctcaatgcaggttttcgtccaaacaccaccacttgcaacacatgtgaccatgggtgaaccccttaccctgtacacaaagtcaagttcaacagagtagtcctcattatagtcaggagctacaaactagggtgcgtgataacagagtgcagtgcccagagaggtagggcattccccctggcagcgctggcttcgtgccctcatgccctcagaattggagcctctcagaaggccaaggctctactagagcaaccctcacccctgcccatgttgacccgctgccaccaccacgcagaagcgtgacggggagtgggggctccgcttattgtcccctctgccctttcctactgcaggtgtcaattggtgccatggacaccctggagaaagaccaagccacaggaatctgccacttcttttatgacagcgctccgagtggggcttatgggacgatgacctacctaacaagagcagtggcttcttatttgcaggaattgttgcccaattcgggctgccagatgcaatagggtctcacctggaaacatgatcacactctcaatctgt

SEQ ID NO: 13196 - DNA, 514 bp, Homo sapiens
tgcttatcccattctggaatctgactgaaatgcgctctattctgcctccagtgccacggtctctccatcgatggttatgtcctcccatcctcgacgacccgagagatgaccccgcatgagatcaagtttgctgtccatgtcgaatcggtgctgaaccgcgtgccgcagcccgagtaccggcagctgctggtggaagccatcatggtgctgacgctgctctcggacacggagatgaccagcatcgggggcatcatccacgtggaccagatcgtgcagatggccagtcagctgttcttgcaggaccaggtgtcaattggtgccatggacaccctggagaaagaccaagccacaggaatctgccacttcttttatgacagcgctccgagtggggcttatgggacgatgacctacctaacaagagcagtggcttcttatttgcaggaattgttgcccaattcgggctgccagatgcaatagggtctcacctggaaacatgatcacactctcaatctgt

SEQ ID NO: 13197 - DNA, 7522 bp, Homo sapiens
tgcgccctatccactcctccacatccagccctaccatctccatccacgaggtgggccataccggagtcaccaaaactgagaggagtggcattaacagactgaggagtgaaatgaaacaggtaagaacacctcagtggcagcgagggatgagtggtggtctccctacctgggcttaccccagaaagcgacagaaacctagggcatgaggctgcagcccactgtctgtagagtgggaggtcccttctgtctgggatctgaacacacccctgtccccagatagatattccagagccggtcatgcgcacccttacccactcatccttaaccttaacgtgatgttctcatgaacgttccagaaaatacccttgtccatgtttgcctctgttcccgagaaccactcttaggagtgggccacagccattgaaaaagtagagtcatgcaaaaagtcaccgaatcatctgtgtccttcaaacgaaatagcaagagggctctggaaatagaccagaatgcccatgatacttggattctccaccagccacaggggtctcttttcttagttcacctttaattcctggtaaaaaaaaaaaaaaaaaaaatccttttgaactgaccgcacagggccacagctcaacatcggagtcttaacgtgctgggtgctgtgctaggccttgcccaggatccatgctgggaaagagtttccctctgaccatgagaaatgcactcgaattttctgctccattttaaatgctgttcatgacccactaaatggagtccatgatgcactcatgggtcaccccctgcggtttgaccaacacggccctggattaagagagagggcaatagaagaagcacgcgttcttggctcaaagctggttttgatttcctgatgtatttttgctttcagatgactaggcggtttagtgctgatgaacaggtgacacccctttgccttgttcgtcctttacttcctgttctttctggcttgaatgtggaaagtgaggctgtgactccgcagcgtgtgaatgtgtagagggcggctctatccagcaaacgggctggggcacaggcagagagcaggactcgagggcaggagagacgaccttgccccatgcctttaaaaataatctgtttctcaaactcttgggctttgtagggtactttgtgaaagagatcatccaggctctgcctcagtgggagtttctattcaaaaagagggaactaaatagaaaactaaatgggggggaaatgcggtcattggttatatcagtagaaagaatgctgctattcctgtcctcagatcgcctggggggacttaaccctggaaggaaaaacatgtaagggtgctcttcttttatatcaccctggtgacatatgttctccacccccctctgggacactggagtcgcatttctaatattttgatgtgtattaccacaagagcctagagacatcttaatgacatgtaaaggccgattccacatgttgcccagaggtaaaacatgctttatctctcctagtttatgctgtttccaagtagggaactgccttttcaaacatcttcccttgccagccactcggtggcaccgtccctctgtccccgcatcccgatggcctgaccgtgggtgaatctgagtggttccttccgcctctatttcatgctgttcttgcgtgttacggggatgaagtgatcacctctgttctttgctgggcttagagtcacctagctagtacaaactttgaccacttacgtcaaggaacatattatttgttccaaaaatgtaataggtgttatggtattttcaatctctagtctcttttgtaagaataccttgtagatagcacactgtacccttgcaaattaagggtacattctagattttagacgaggaaatacttatgtggccaaaggtatcagcccgatcatcatattcattcatttaatgaatatctactgaatgttaggtgcagcatgttagtgtcagctgtaggtatttggttcatctgtagattttcacaattcttaccataaaatgtgagcatttcatggctgtgagtttggaaaataaatagtgtcctaacttgatgatgcaccctccacatatgacaggaacatttaatgtttacattcaatggtaacagttcatgtttttaaaaagagcagttagtaagtttcacgtggagtcgaagcccagagcggtgcttgcaggtgcccctgcacctgagcttgcctatgtgcgttgctgtggcaccttctctgcgcccgcattctctgctgctgctttctgtgggtgtttcggatgctgctccatgaccctcctctctgctgtgtctcttggtgtcattgctgtcaactgagtggattctttttgttttgtagttcttttctgtgggccaggccgcgtccagcagtgcgcattcctccaagtctgcggtaacagtgcctcgggattattgtgtccgtccccgctcctcctcgcgtccttcctcatgctcccacctcatgcccaacttctgaggattcgagcagggctgaagtgttttcagcgggatgctcacaggctcctccaactggaattctgaggagggtagaaagaaggccccaaagtgcttgccctgagctttgttctccgtcttaagctctcagttctctgcctgtgctccttggcacagtgtgggtgaggagtttccttctcaccaattcccagagcttctggaaacttcggggcattagttccatgcctctttatggagccaggatggtgagcccttgcccacatgtgccaactagcactctgcacctgccatgccccagatctcgtgcagggctcggattgagctcaccgcagagcagaggctgaatcttcctcctgaaactggagggcccggatcagctgagtcattgaggagtgcagctgtaattacttttatttgtgtctaattgttgccttaagtggcagtaatgagcccaatggaataacccagccgaactgccttttcaaaataagatctgttgaaatccaactgctgcagaaaggagagctccacctcctgccctgctagcacacttcaggatttcactttaaccctttacatttgactgtgcacatttgatgtgtggcactatcgagaaacaaaagtgccagatagtcccaggcaaagagatgtgtgagagtgaaggttatcccttctcgacctggaggtctcgaagctagaagccccgcagggcaagacagaaggctgggagctttgccgcagggaggggatgcgcccccactcacagaggcccgccccgccagcggtggggagcctctcagacagtgtccccctctggagcctgaatcagtccagccaatgttgaggtgggaaggagatggcgccctcttccctcacttcagcaaagtcagccccagttcagaggcagccattgccccaaattaagataaagcccagtgccaagaatagggaaagccggaaatgggattgcaaagggtgggtggatggaccctgatctgcgaggtcctcgccactaaacgcgggcttcactgtttgtcttcccccgtgtcatgtattgccttctctgtggttcctgtcctgtggaaacgtgtctgtcacttctctgtggcactgcagcaatgaagtgggcactatggagtttgtctccctgagccatggatgcctgctccgagggcccgttgtcaccctcaaagctctcccactgcagtggcacaggcgccacgtgcgggtgacagctgcccctcatgggcacttagcgcacactaggtatgcctcaggggcttctgtgtctccacgtggtgaaggcttccgggcagctctttataggatgcctgactgtgtccccactgtgcagatgagactgaggcccagaatcagtgttcatggcagggccagacggcctcgggtgtgtccttggcaccgctggcattgagtggggattagcactccggcagtctgacccccaagcccgtgctcgccctgttcggcctcctccttatgggttctagctttgggggtgggactgcctctcggggggcagggcagagtgcaacatggaatgaagtgatcaacccaaagtatgcgagtcatctcacatgaggaaacagacaaggtggactggaggaaccgtgttcctctctggcgagtggtgttctggcatttgtgcctaggtcgcagggccgcccttcgagatggcgcactttccctggggcacctgctgcgtggcttctgaggccccaagctgtctgtcttgcagaggtccagcaccccatcctcgcccactggcacgtcatcctcagactcgggaggacatcacatcggctggggtgagcggcagggccagtggctgcgcaggagaaggctggatggggccatcaacagggtccccgtgggattctaccagagggtgtggaagatcctccagaaggtaagccgagacgcgagctcctggggaagtgaaccgtccccttactgtcctggcaaggcatggtggcacctccaggcgagcaaacacacagccctgaggatggcttctctgcctcagcgctgttggcacctggggccgaggcattctctgctagggggcctgtgcgtggtaggatgtctacagcatccctggcctctacccgccagatgccagcagccatctcttctccccaccccacccccgtgtgacaactaaaagtgtctccaggcattatcaaacatcccgtgggaggcagatcaacccagttgagaaccacagcaagtaagacaaggtggcagtctaggttgtggttgtgtgggaccaacttggacgtattttaggaacatagaagaacagggaaaggctgggaggcttcagatgaaaaccctgtaaaaccacccagagcagcacctacaggcctggaacctggaatgacagttcaggaggggcctggagtaggccagccccccagcctcccgcacatccaggcaggagtagtgtccctgctgttcagcgatgtgactgagccccaccctcccagggtacctgccgtgttcagtcccaaggtgtacagaggtggagagcttccagtttagccccaggtcctgtgtgccctgaaggcacaatctccctcacaccctggggccccactcccctcagccagccggctgttgcgcttcccatctgcctggggccgttcacgtctccccagctgttgtccctgggaactgtggtgcctgtacctgagcacaggagcacctccctgagcgcctgttgtcaaggaggggggcagcattctctgtacccccccagtgtctcccttctgcatcagcccgagagagtttatgcagctccctgggctgcaccaggccctccctgtcttttcccttgaatggaaggacagtgtgcctcgcttaaaagctgtgcaaaccaagacatttttttccccccagaactattttttagttcatttcacagtgggagagaagagaaaaaataatcccagtgacagcatacaacagcccccttcccaaagccatggcaccacttgctcaaggttctttctgtaacaggggcccctgtgcttcatgggccccaaggtattcctcacggccaccgcagagggatgtgaggaggtcggagcaggccctgcccgagcagctggactcctgggacccaggcaggatcctgcaggggctcatggtgcttgctccacttcccgcctctcttaagggggtgggagtgtccactgctgttctgccctcagcccactggggacgctccaggccggggtgctgggatttagaaggtggccagttagactagaacaagctgttcctagaaaatttccccactcttcctggggcatcacatgcttccgctcggactcactggcgcaataccaagatatttctattatgaaaaagcattttgtgttgagctggcactcgatatttatatacatgggtgtgcatgtgcatgtctgtgcatgtgctggaggcttttgtgattggtgcttattatagaaatctcaaaaatagatgcctgcaaaggcacagaagcatcccttccccagcaggagccatgaaaatccccctttattatggcaccaaaggggcctcgcagccgcccgggcccagttgccaagtacaatgcggagcctcccgggaggactcggcagccccctagggcattgttcgggggagatctgaaagatgcctgctgggttccctagaattgttccatcgaaaacacagcctgtgggcagtgagaacaagctctctaaaaataactctgacagtctggcgtgtcccagccctcatatgggtttccagggcagagggtgctgtgtgtgcatgcacgcctgtgtgtgcatgcatgtgcttatcccattctggaatctgactgaaatgcgctctattctgcctccagtgccacggtctctccatcgatggttatgtcctcccatcctcgacgacccgagaggtacgatgagaaaaacgcagaggcgggcccctctgtgggttcacaataagggcttcattgcatggactctgacctcttgtgctccttttgggctcattctaattgacaggccatttgtagctctgagctgtctagccccttcaccctcatatttggcaaaaatgtctttccagcatttattggcatcagcctttttcttcacctgagactcagcatttctgggctagcaagctctttgcatttgccagacaccccttagaaccctggtgaaagaaaggagccaatctccatgccaccctggcctgccccatgggcagccttctcggcccttttctccaactaaaaacagtaatcgtccctaggtgatttgtcattctttttaacatggatttttttttagttttaccccacccaaagcaccatgcttcatgctggaaggaataatgaagaggaaagagaaaccagaaatggtccctgctccctggaagctgtagtcgatggggggaagggtagataaatcaggcgaggacaggctggctcctggaggcatactccagcctcctgctctgagggccactgccagcaggatccagggagtggccagaaaaggggcagcagtggcgctgagccccgagcccaggcactgctacggtcacccttggttactcggtgattgattgatagggctgcatctgtcctctcactggtggttgcctgcctgtccctttggtagatgaccccgcatgagatcaagtttgctgtccatgtcgaatcggtgctgaaccgcgtgccgcagcccgagtaccggcagctgctggtggaagccatcatggtgctgacgctgctctcggacacggagatgaccagcatcgggggcatcatccacgtggaccagatcgtgcagatggccagtcagctgttcttgcaggaccaggtgggggtgccagggagctgggttggctggcatttatctctgttgaggctggagattctgtgtccaataggaaagaatatactcgaaccaagaaaatgtcatcacagatgatggggaaaaaa

SEQ ID NO: 13198 - DNA, 751 bp, Homo sapiens
tgcgccctatccactcctccacatccagccctaccatctccatccacgaggtgggccataccggagtcaccaaaactgagaggagtggcattaacagactgaggagtgaaatgaaacagatgactaggcggtttagtgctgatgaacagttcttttctgtgggccaggccgcgtccagcagtgcgcattcctccaagtctgcgaggtccagcaccccatcctcgcccactggcacgtcatcctcagactcgggaggacatcacatcggctggggtgagcggcagggccagtggctgcgcaggagaaggctggatggggccatcaacagggtccccgtgggattctaccagagggtgtggaagatcctccagaagtgccacggtctctccatcgatggttatgtcctcccatcctcgacgacccgagagatgaccccgcatgagatcaagtttgctgtccatgtcgaatcggtgctgaaccgcgtgccgcagcccgagtaccggcagctgctggtggaagccatcatggtgctgacgctgctctcggacacggagatgaccagcatcgggggcatcatccacgtggaccagatcgtgcagatggccagtcagctgttcttgcaggaccaggtgggggtgccagggagctgggttggctggcatttatctctgttgaggctggagattctgtgtccaataggaaagaatatactcgaaccaagaaaatgtcatcacagatgatggggaaaaaa

SEQ ID NO: 13199 - DNA, 3663 bp, Homo sapiens
caggagtagtgtccctgctgttcagcgatgtgactgagccccaccctcccagggtacctgccgtgttcagtcccaaggtgtacagaggtggagagcttccagtttagccccaggtcctgtgtgccctgaaggcacaatctccctcacaccctggggccccactcccctcagccagccggctgttgcgcttcccatctgcctggggccgttcacgtctccccagctgttgtccctgggaactgtggtgcctgtacctgagcacaggagcacctccctgagcgcctgttgtcaaggaggggggcagcattctctgtacccccccagtgtctcccttctgcatcagcccgagagagtttatgcagctccctgggctgcaccaggccctccctgtcttttcccttgaatggaaggacagtgtgcctcgcttaaaagctgtgcaaaccaagacatttttttccccccagaactattttttagttcatttcacagtgggagagaagagaaaaaataatcccagtgacagcatacaacagcccccttcccaaagccatggcaccacttgctcaaggttctttctgtaacaggggcccctgtgcttcatgggccccaaggtattcctcacggccaccgcagagggatgtgaggaggtcggagcaggccctgcccgagcagctggactcctgggacccaggcaggatcctgcaggggctcatggtgcttgctccacttcccgcctctcttaagggggtgggagtgtccactgctgttctgccctcagcccactggggacgctccaggccggggtgctgggatttagaaggtggccagttagactagaacaagctgttcctagaaaatttccccactcttcctggggcatcacatgcttccgctcggactcactggcgcaataccaagatatttctattatgaaaaagcattttgtgttgagctggcactcgatatttatatacatgggtgtgcatgtgcatgtctgtgcatgtgctggaggcttttgtgattggtgcttattatagaaatctcaaaaatagatgcctgcaaaggcacagaagcatcccttccccagcaggagccatgaaaatccccctttattatggcaccaaaggggcctcgcagccgcccgggcccagttgccaagtacaatgcggagcctcccgggaggactcggcagccccctagggcattgttcgggggagatctgaaagatgcctgctgggttccctagaattgttccatcgaaaacacagcctgtgggcagtgagaacaagctctctaaaaataactctgacagtctggcgtgtcccagccctcatatgggtttccagggcagagggtgctgtgtgtgcatgcacgcctgtgtgtgcatgcatgtgcttatcccattctggaatctgactgaaatgcgctctattctgcctccagtgccacggtctctccatcgatggttatgtcctcccatcctcgacgacccgagaggtacgatgagaaaaacgcagaggcgggcccctctgtgggttcacaataagggcttcattgcatggactctgacctcttgtgctccttttgggctcattctaattgacaggccatttgtagctctgagctgtctagccccttcaccctcatatttggcaaaaatgtctttccagcatttattggcatcagcctttttcttcacctgagactcagcatttctgggctagcaagctctttgcatttgccagacaccccttagaaccctggtgaaagaaaggagccaatctccatgccaccctggcctgccccatgggcagccttctcggcccttttctccaactaaaaacagtaatcgtccctaggtgatttgtcattctttttaacatggatttttttttagttttaccccacccaaagcaccatgcttcatgctggaaggaataatgaagaggaaagagaaaccagaaatggtccctgctccctggaagctgtagtcgatggggggaagggtagataaatcaggcgaggacaggctggctcctggaggcatactccagcctcctgctctgagggccactgccagcaggatccagggagtggccagaaaaggggcagcagtggcgctgagccccgagcccaggcactgctacggtcacccttggttactcggtgattgattgatagggctgcatctgtcctctcactggtggttgcctgcctgtccctttggtagatgaccccgcatgagatcaagtttgctgtccatgtcgaatcggtgctgaaccgcgtgccgcagcccgagtaccggcagctgctggtggaagccatcatggtgctgacgctgctctcggacacggagatgaccagcatcgggggcatcatccacgtggaccagatcgtgcagatggccagtcagctgttcttgcaggaccaggtgggggtgccagggagctgggttggctggcatttatctctgttgaggctggagattctgtgtccaataggaaagaatatactcgaaccaagaaaatgtcatcacagatgatggggaaaaaatgtcaaccacttgcttagaaaatggtacagtggccacttgggaaatctcaagacctttggggatggataggcctgtctcaatgcaggttttcgtccaaacaccaccacttgcaacacatgtgaccatgggtgaaccccttaccctgtacacaaagtcaagttcaacagagtagtcctcattatagtcaggagctacaaactagggtgcgtgataacagagtgcagtgcccagagaggtagggcattccccctggcagcgctggcttcgtgccctcatgccctcagaattggagcctctcagaaggccaaggctctactagagcaaccctcacccctgcccatgttgacccgctgccaccaccacgcagaagcgtgacggggagtgggggctccgcttattgtcccctctgccctttcctactgcaggtgtcaattggtgccatggacaccctggagaaagaccaagccacaggaatctgccacttcttttatgacagcgctccgagtggggcttatgggacgatgacctacctaacaagagcagtggcttcttatttgcaggaattgttgcccaattcgggctgccagatgcaatagggtctcacctggaaacatgatcacactctcaatctgtcacgtgccccctagccttactgggaaccttctgtcccccaagatcccctgtgctatcaggaaagcatgtcccatcagaaacactctcggggggcaatggtagcactcaccctgaaactgatgtatgttaaagccacagagatagagctgaggagtcctgtgttcccccgcaaggagcaccccgggatcattttctaggttcatttctctggaacatttgctgtagcatctggtctcacggactctgaggaggaattggaaattggtctcttttgagtgcagagggaactgagacgccagcttaaattggctcttgcagagagttacagaaatagtttcgatgagctagtgacacatcctaaagatgcaaagatcctcctggcggcagtagccttgacaagggccacctcttcacaggatgcagtctgtctgtgcaccaaactcttcaccaaatagaacacttgtgtctctctgtgg

SEQ ID NO: 13200 - DNA, 3115 bp, Homo sapiens
caggagtagtgtccctgctgttcagcgatgtgactgagccccaccctcccagggtacctgccgtgttcagtcccaaggtgtacagaggtggagagcttccagtttagccccaggtcctgtgtgccctgaaggcacaatctccctcacaccctggggccccactcccctcagccagccggctgttgcgcttcccatctgcctggggccgttcacgtctccccagctgttgtccctgggaactgtggtgcctgtacctgagcacaggagcacctccctgagcgcctgttgtcaaggaggggggcagcattctctgtacccccccagtgtctcccttctgcatcagcccgagagagtttatgcagctccctgggctgcaccaggccctccctgtcttttcccttgaatggaaggacagtgtgcctcgcttaaaagctgtgcaaaccaagacatttttttccccccagaactattttttagttcatttcacagtgggagagaagagaaaaaataatcccagtgacagcatacaacagcccccttcccaaagccatggcaccacttgctcaaggttctttctgtaacaggggcccctgtgcttcatgggccccaaggtattcctcacggccaccgcagagggatgtgaggaggtcggagcaggccctgcccgagcagctggactcctgggacccaggcaggatcctgcaggggctcatggtgcttgctccacttcccgcctctcttaagggggtgggagtgtccactgctgttctgccctcagcccactggggacgctccaggccggggtgctgggatttagaaggtggccagttagactagaacaagctgttcctagaaaatttccccactcttcctggggcatcacatgcttccgctcggactcactggcgcaataccaagatatttctattatgaaaaagcattttgtgttgagctggcactcgatatttatatacatgggtgtgcatgtgcatgtctgtgcatgtgctggaggcttttgtgattggtgcttattatagaaatctcaaaaatagatgcctgcaaaggcacagaagcatcccttccccagcaggagccatgaaaatccccctttattatggcaccaaaggggcctcgcagccgcccgggcccagttgccaagtacaatgcggagcctcccgggaggactcggcagccccctagggcattgttcgggggagatctgaaagatgcctgctgggttccctagaattgttccatcgaaaacacagcctgtgggcagtgagaacaagctctctaaaaataactctgacagtctggcgtgtcccagccctcatatgggtttccagggcagagggtgctgtgtgtgcatgcacgcctgtgtgtgcatgcatgtgcttatcccattctggaatctgactgaaatgcgctctattctgcctccagtgccacggtctctccatcgatggttatgtcctcccatcctcgacgacccgagaggtacgatgagaaaaacgcagaggcgggcccctctgtgggttcacaataagggcttcattgcatggactctgacctcttgtgctccttttgggctcattctaattgacaggccatttgtagctctgagctgtctagccccttcaccctcatatttggcaaaaatgtctttccagcatttattggcatcagcctttttcttcacctgagactcagcatttctgggctagcaagctctttgcatttgccagacaccccttagaaccctggtgaaagaaaggagccaatctccatgccaccctggcctgccccatgggcagccttctcggcccttttctccaactaaaaacagtaatcgtccctaggtgatttgtcattctttttaacatggatttttttttagttttaccccacccaaagcaccatgcttcatgctggaaggaataatgaagaggaaagagaaaccagaaatggtccctgctccctggaagctgtagtcgatggggggaagggtagataaatcaggcgaggacaggctggctcctggaggcatactccagcctcctgctctgagggccactgccagcaggatccagggagtggccagaaaaggggcagcagtggcgctgagccccgagcccaggcactgctacggtcacccttggttactcggtgattgattgatagggctgcatctgtcctctcactggtggttgcctgcctgtccctttggtagatgaccccgcatgagatcaagtttgctgtccatgtcgaatcggtgctgaaccgcgtgccgcagcccgagtaccggcagctgctggtggaagccatcatggtgctgacgctgctctcggacacggagatgaccagcatcgggggcatcatccacgtggaccagatcgtgcagatggccagtcagctgttcttgcaggaccaggtgtcaattggtgccatggacaccctggagaaagaccaagccacaggaatctgccacttcttttatgacagcgctccgagtggggcttatgggacgatgacctacctaacaagagcagtggcttcttatttgcaggaattgttgcccaattcgggctgccagatgcaatagggtctcacctggaaacatgatcacactctcaatctgtcacgtgccccctagccttactgggaaccttctgtcccccaagatcccctgtgctatcaggaaagcatgtcccatcagaaacactctcggggggcaatggtagcactcaccctgaaactgatgtatgttaaagccacagagatagagctgaggagtcctgtgttcccccgcaaggagcaccccgggatcattttctaggttcatttctctggaacatttgctgtagcatctggtctcacggactctgaggaggaattggaaattggtctcttttgagtgcagagggaactgagacgccagcttaaattggctcttgcagagagttacagaaatagtttcgatgagctagtgacacatcctaaagatgcaaagatcctcctggcggcagtagccttgacaagggccacctcttcacaggatgcagtctgtctgtgcaccaaactcttcaccaaatagaacacttgtgtctctctgtgg

SEQ ID NO: 13201 - DNA, 5137 bp, Homo sapiens
atgaaaaatctcctgcaccatattctaagtgggaaagagtttggcgttgaaagaagtggtaagttccatgctcctgttaacgtcttcagggagctgcctcctttacatgcagcagacattagaaccagcactgtggggcatagcgaatgtgggaagagaaggctcctacctgaaggagatggacagagtcctaggctcaagcttcctgctttgggggctttgagacttgctcgcagtgtgctgggcgagcttttcttgcccaggttggcacagcatgtgggtgtggtataccgcctcctgtagtcgtaagcacctggcaccatcacttacgcaaaagtgttggctgggctcggtggctaacgcctgtaatcccagcactttgggaggctgaggtgggcggatgacgaggtcaggagtttgagaccagcctgaccaacgtggtgaaaccccgtcactactaaaaatacaaaaaaaattagtcaggcgtggtggcgcgcgcctgtaatcccaggtactcaggaggctgaggcaggagaattgcttcaacccgggaggtggaggttacagtgagctgagatcgcgccactgcgctccagcctgggcgacagagcaaaactctgttctcaaaaaaaagtgttagaagtgtgggggaccccgaatgccagggtgaaagggctgtcctttcacaccacctgagcatcctgccctttggtttgggtaaaaacattctcaacccggcctcacatcaccctccacagggcagggaggagacccctctgtgacctcagcatgctcgagctaacttattttgctttgtcctgcctcgctcactctgtttttatctgaaccggaaccctgcttgcagtgctgggaaacataatcacccaagtcctggcgtgattcttgttctcaaatgttccctaattataattgaagcaattatcatttctcctcctcataaaaaagctaaatgatttgcaggcacgttggtgaatttatttcatcaagccaaagaaatgcactgtgggctatcattcctttattatttaataagaaggacattgggtactttgtatgtttcctgagcatgtgctggctgcaaacaaagacagcatcgtgcagtcagatgtgttttggtggtttttctcctttcccgaaggaggggtgctcagaatgcttttgcaaaagtaatttccagttctttccaaggcagagtccttgaaatggtaatgtacgagataaatatttaatgtgttctgctcatcattatagtattcatggcttgacacagataattactaaaaatttgtcattagatgtacagctatagatgctatgaaactaggaactgagtaatgtcatttgaaagtcataaatatgtgcgattgcaagcaagagcagaagacatgctgtctttttaacatataacatcatttgttagctgtcctttgtaattgctcaatttttgtaaattaggaagcccaaataggcttagaattttgattaaatcctgagatgtctgagataaatgtttccagcgaacacccaccccagacagcccctcttgtagcttccagacccttctccttctgttttccactttcctgggtctgtcctccctccccagctcatcactgagtctcccttatgggctcctgcctctctgctgtcctttaaatgttcttgtccccaagttccttatttgtcactactcctcctgcacagtgccctccactcccatggctccattggggtcaggtgggatggtgaggcttgcaggggatgctgcccgaggaggtgacctttgagctgggcctggccttccagcacaggcagatgcccagtgcggtgcaggtggccgggagttgaggggaggtagggctcgagttggtagagtttcaggtgatgctgggaggactgtttggcctttgtcctgaagacagctagacctgggaggctttggagtgggcagtgatacgatcacacttgccttttagaatgattgctgttaccacagcacagaggccaggcttgtgggtggtggggctagggaccggtttgagccccgaggctggtgcgataggttgggagtgagaggtggtggcctggtgcagtgcatcagtggcctctggttgcctccacctccagcccctggcagcctggctttcctagcacttccccctccagcccgaggcccttctccagctgccaccttcatttcatttggcaccttgccctcaggcctgggcatgggctctcctccagaccccgctgtggcactgaattctcctgcattcacacctgcatctgctgcccagacagggcctggcaccaggaggccctctggatcatccagcccacggccacagctgcccggggtgccagcccctcgggcccacagcagttttgtcattttccaggggcattccgagagtcacacgggactggggacagagcccagcaaggtccatgtgggtcctacacattagtcatgacgaaccctttagaaaaatattaatacaaataggattgggtatattgttgaccagtcaacactcaccagatcaaactccatgcggtcatgaaacatgatgtgatagaatatttaatgccagggagagacattcacgatacaagtacaaaaaggcaggtcacagaaccataccacagaatgtatgtatccatctcatgtttctgtatctatacgtatgtatgtgatggtactgttttgttagttaaaaacatacacagtcatagggaaaaaaactggaagaatcatgactaaaatatcaagagatgttagttctagcttctgtagttcagtggtctcagttttctacaaggaaggtgtgctttgggttttttttaaatttttgtttatttatttatttctaattaaatatagatacgaggtctcaccatgctgcccaggctggtcttgaactcctgggctcaagcagtcttcccacctcggcctcccaaagtgctgggattacaggtgtgagccaccgtgcctggcctcgggtatgttttttgtttgtttgtgtattttttgagacggagtttggctcttgttgcccaggctggggtgcaatggcacgatctcagctcatcgcaacctccatctcccaggttcaagcaattctcctgcctcagcctcccgagtagctgggattacaggcatgtgccaccacgcccagctaattttgtttttttagtagagacagggtttttccatgttggtcaggctggtctcgaaatcccggcctcaggtgatctgcccgcctcggcctcccaaagtgctggaattacaggtgtgagccaccgcgcctggccgggtatgttttattagaataattttttacttatccaaaagcaagggtgggcacggtggttcatgcctgtaatcccagcactttgggaggctgaggcgggcagatcgcttgagcccaggagctcaagaccagcctgggcaacatggcaaaaccctgtcttcacaaaacatacaaaaaattagccaggtatggtggcgcacacctgtggtcctagctacttgggaggctgaagcggaaggatcgcctgagcccaggaggcagaggttgcagtgagccaagatcgcacactccagcctcgggaacagagcaagactctgtctcaaaaaaaataaaaaaacatggctggttgcagtggctcacgcctgtaatcccagcactttgggaggtcaaggtgggcggatcacaaggtcaggagtttgagaccagcctggccaatatggtgaaaccctgcctctactaaaaatacaaaaattagccgggcgtgatggcgggcgcatgtaatcccagttactcgggaggctgaggcaggagaatgtcttgaacccaggaagtggaggttgcagtgagccgagatcatgccactgcagtccagcctgggcgacagagtgagactccgtctcggaaaaaaaaaaaacatatctcactgtgtcggggcttcctggccactgtgttataatggtgcttaagtactctgcacacttccgtttactcctttaagagctgagtgctgcacctgtgctgctctcggtgctggagacacagcgctggccaggcagagaaggccctcattgtcaagtgggggagacaggggcagatcctgcctcgggttggatgctgtagagttcctgagaaccacgtgtgtgtgtttcccacccagtgcgccctatccactcctccacatccagccctaccatctccatccacgaggtgggccataccggagtcaccaaaactgagaggagtggcattaacagactgaggagtgaaatgaaacaggtaagaacacctcagtggcagcgagggatgagtggtggtctccctacctgggcttaccccagaaagcgacagaaacctagggcatgaggctgcagcccactgtctgtagagtgggaggtcccttctgtctgggatctgaacacacccctgtccccagatagatattccagagccggtcatgcgcacccttacccactcatccttaaccttaacgtgatgttctcatgaacgttccagaaaatacccttgtccatgtttgcctctgttcccgagaaccactcttaggagtgggccacagccattgaaaaagtagagtcatgcaaaaagtcaccgaatcatctgtgtccttcaaacgaaatagcaagagggctctggaaatagaccagaatgcccatgatacttggattctccaccagccacaggggtctcttttcttagttcacctttaattcctggtaaaaaaaaaaaaaaaaaaaatccttttgaactgaccgcacagggccacagctcaacatcggagtcttaacgtgctgggtgctgtgctaggccttgcccaggatccatgctgggaaagagtttccctctgaccatgagaaatgcactcgaattttctgctccattttaaatgctgttcatgacccactaaatggagtccatgatgcactcatgggtcaccccctgcggtttgaccaacacggccctggattaagagagagggcaatagaagaagcacgcgttcttggctcaaagctggttttgatttcctgatgtatttttgctttcagatgactaggcggtttagtgct

SEQ ID NO: 13202 - DNA, 317 bp, Homo sapiens
atgaaaaatctcctgcaccatattctaagtgggaaagagtttggcgttgaaagaagtgatacgaggtctcaccatgctgcccaggctggtcttgaactcctgggctcaagcagtcttcccacctcggcctcccaaagtgctgggattacaggtgtgagccaccgtgcctggcctcggtgcgccctatccactcctccacatccagccctaccatctccatccacgaggtgggccataccggagtcaccaaaactgagaggagtggcattaacagactgaggagtgaaatgaaacagatgactaggcggtttagtgct

SEQ ID NO: 13203 - DNA, 6048 bp, Homo sapiens
aggcgccgagcgcccgctgagcagccaccctttgcgcgccgcctgcagcgcaggtacgcgccggcctgggcgggcggagggggcggcggggacacgtttgcttttgggaggctgggggccgttcccatccccgacgcccgggggatcccgagcctgcctcggggctggggcccgccccccacgccgtctgagcggtgcgcggtgcaccaccctccccagtggaccgaactggaaaggccgggagaggtttcctccggggctcacgaattggggtcccggccccaggaccccgaagctgcccaatggctcacgccccaggccctcacccttacacggccttccctgactttcggggcgcagtcacccccgcggtaggggagggtcacggccttcctggtaaaacggatgtaaatagaagggggactcatctccaggactggggaacagcccctatgacctcgcagctccacggctccattggccagatttccaggaccaggactgaagcctcactaccccggctttgctgctcatagcgaggtctccctgcccggtgctcctgcgagccatggcggtcccattccccaaccctctttccagtggtgacccaggcctccggggttcagggtgaccacaaggtctcccccactctgcagcccaggcccagatggcctggctctagagctccccactccatccagagtccctgtttccccaaagagaagggcccaccccggctcccgctcactcctcctcctgcctctgcagcttccccgggcgctgcctggacaggcctgcctgcgtgctgggacatgtctggcctccaaggaccgtcggtgggcgatggctgcaacggtggaggggccagagctggaggcagctgctgccgcaggagatgcttcagaggattcggacgcagggtccagggcgctgcctttcctgggcggcaaccggctgagcttggacctgtaccccgggggctgccagcagctgctgcacctgtgtgtccagcagcctctgcagctgctgcaggtggaattcttgcgtctgagcactcacgaggaccctcagctgctggaggccaccctggcccagctgcctcagagcctgtcctgcctccgctccctggtcctcaaaggtgagttccacctgttctgggccctgtctccatctctcgctctgccctgcctctgctgcatgttctcaaaggcaaaccccagtcccagccccagctccaggccgcccctcccggctccccaggtgtgaactgttctgctcttggtcctgtccagccccatcgccatcctcggtgatcaccacccccagtgtggggctggctgggccctggctcctggaccctgacgctgcccagtgggggtctctccagaccacagtgcagatgttgttcctggggaaggttgtgggtgatggttgtcagctgagatgagccggtggtctccacccctgcctccttccatttgcgggcacctctccagtgtttctgtctgtctgtccctgtctggctggggtgggggtggggtgggaggtctgtgcctctcgagcagctgtttctctggctggcagggtcgatctgggacctcggaccctggctctgagggccacatccgcctccccccttcccaggagggcaacgccgggacacactgggtgcctgtctccggggtgccctgaccaacctgcccgctggtctgagtggcctggcccatctggcccacctggacctgagcttcaacagcctggagacactgccggcctgtgtcctgcagatgcgaggtctgggtgcgctcttgctgtctcacaactgcctctctgagctgcctgaggctctgggggccctccccgccctcaccttcctcacagtgacacacaaccgcctgcagacgctgcccccagcactgggggccctatccaccctgcagcgcctcgatctctctcagaatctgctggacacgctacctcctgagattggaggcctgggcagcctcctggagctcaacctggcctccaaccggctgcagagcctcccagcctctctgggtgagtagcccctgcgccccgacacactggccccacgggagggtccctgaagcctgcctgtcttctgcaggggcctctgcacccacaggcttggtccacagctgcctcttggttgtccctccacctccctggcctttgagactccctcagtggctttgtcagagttctctgagcccagctgtggaggagagtctgaaacagctgctctgggaggcggcagcaggagtgtcccagcgccgtgggctgggctggtgccaagcctaagccagcaactgcccgcagcgggacttcggtccttgcggctccttgtcctgcacagcaacctcctggcctctgtgccagctgacttggcccgccttccactcctcacccggctcgacctgagggacaaccagctccgggacctgccccctgagctgctagacgccccctttgtgcgcctgcaggggaaccccctgggtgaggcctcgccagacgccccgagttcaccaggtaggcttggtgctagaaggggcagacctgggataggacatgagtctcctcactgtcctgagcacatgtctgtcccctgcacagtggcagccctcattccagaaatgcccagactgttcctgacctcagatttggacaggtatggggtgggttgagggggctggaggggagtctgtctgcctgtcactctggcccctccgacaccttctccagagttcctgggtccaggctccaacacgtaggcccttctgggtctaacctgttgctcgctccttcctcactcagctttcctgtgacccctcaaggctgctcagtgaccctggcctgtggcgtccgcctgcagttcccagcgggagccaccgccacccccatcaccatccgctatcggctgctgctgccggagccaggcctcgtccccctgggtcctcatgacgccctgctcagccatgtgctggagctgcagccccatggggtggccttccagcaggcatggacagggcgtggcgggggcagtgtgtgggccagggcatggcaggggcagtgtgcgggcccgggcatggctccagtgctcacaccatccttgtctggcaggatgtggggctgtggctgctcttcaccccaccgcaggcccggcgctgccgtgaagtggtggtcaggacccggaatgacaacagctggggtgacctggagacctacctggaggaagaggcaccccaggtgagggccacccaggcctgccggtggcgagtggagagctgctgccctgagccgtgcacctctgcccagagcctcaccctggcaccttccaccctgccccgtccctcctggatcctgcttccctatgtccctggcaccttccaccccaccccgtccctcctggatcctgcttccctgtgtccctggcaacttccaccccaccccgtccctcctggatcctgctccctgtgtccctggcaccttccaccccgccccgtctctcctggatcctgctccctgtgtccctgactggctgtgccctgacccaggctcctgtgacctcctctctcccccatcccagcggctctgggctcactgccaggtgccccacttctcctggttccttgtggtttcccgccctgtgtccaatgcctgcctggtgccaccggaggggacactgctgtgctcctcgggtcatcctggggtcaaagtcatcttcccccctggggccactgaggagcctcgtcgagtctccatgcaggtatggccaggacagcactgagggtggcaggccgcgcctcagcccacaggcaggtgctcagggggcctgtctgccccaggtggtgcgcatggctggccgagagctgcaggccctcctgggagaaccagaggctgcagtgagccccctgctgtgcctgtcacagagcggtccccccagcttcctccaaccggtcaccgtgcagctgcctctgccctctggcatcacaggtgagaggcagccatggggcatacctggacctgtggccatagggtggagggggtctccggccaggaggcctcagctcgctgcccctcccatccccaggcctcagtctggaccgctcccgcctgcacctgttgtactgggcccctcctgcagccacctgggatgacatcacagctcaggtggtcctggagctcacccacctgtacgcacgcttccaggtcacacacttctcctggtcagtgccccccagctttctcagcccccctcccccagtctgtacagccctcctcacccccagctctcccaggtactggctctggtacaccaccaagaactgtgtgggaggcctggctcggaaggcctgggagcggctgcggctgcaccgtgtgaacctcatcgctctgcagcggcgccgggaccctgagcaggtcctgctgcagtgcctgccccgaaacaaggtgggggcacgggccggagggcagcagggtggtgaccagagggctggggtggggtgcagagctttgggtcctgagctgcacgggcttccccgcaggtggacgccacccttcggcggctgctggagcggtaccggggccccgagccctctgacacggtggagatgttcgagggcgaagagttctttgcggccttcgagcgcggcatcgacgtggatgctggtagggatgctggtggatgctccctgccctggagggggagccttaccgtcctccccgagccctccttgctcagcccacccctgtcccctagaccgccctgactgtgtggagggcagaatctgctttgtcttctactcgcacctgaagaatgtgaaggaggtatacgtgaccaccactctggaccgggaggctcaggctgtgcggggccaggtgggcgaggggagtgggtgaggggagaggccccccaggccgcttgggcagaggaccgaactccgaaccccattcgatgccccttcaggtgtccttctaccgtggcgcggtgcctgtgcgggtgcccgaggaggctgaggctgcccggcagaggaagggcgcagacgccctgtggatggccactctgcccatcaagctgccggtgggactgagggacagcagaggggcggggcaggaccgaggcccaggggtgaccagggtgacatggtggagttgggggtggagcccagggcttaatgcactttttccttccaacagagacttcgagggtccgaggggccacggcggggggctggcctctccttggcacccttgaatctgggagatgccgagaccggctttctgacgcagagcaacctgctgagtgtggctgggcgtctgggtctggactggccagccgtggccctgcacctgggggtgtcctaccgggaggtgcagcgcatccggcacgagttccggtgaggctcccactgcccgctggctgccagccccagggctgagccctggctgcctggagggcccacctgattctgacagaagtttcttccaggggaggtgggggaagggcaaacaccaggctggaaaggaaaggtctggccgcacctggccccaggagccgggaactcccccacactccgaggcagagtgtggtggggggtcctgggcaggtggacaggacccctctgtcgcccatcctctgcctgcagggatgatctggatgagcagatccgtcacatgctcttctcctgggctgagcgccaggctgggcagccaggggctgtggggctcctggtgcaggccctggagcagagtgaccggcaggacgtggctgaagaggtgcgcgcagtcttggagctcggccgccgcaagtaccaggacagcatccgacgcatgggcttggcccccaaggaccccgctctgcctggctcctcggctccacagcccccagagcctgcccaggcctaggccccacagacttttaggctggcccagatattccccagtggatgggcagagcccccaccttcaagtctctccagtgtgtggggacgggtccctgtgagcaacaaaactgcactgtttctttca

SEQ ID NO: 13204 - DNA, 2984 bp, Homo sapiens
aggcgccgagcgcccgctgagcagccaccctttgcgcgccgcctgcagcgcagcttccccgggcgctgcctggacaggcctgcctgcgtgctgggacatgtctggcctccaaggaccgtcggtgggcgatggctgcaacggtggaggggccagagctggaggcagctgctgccgcaggagatgcttcagaggattcggacgcagggtccagggcgctgcctttcctgggcggcaaccggctgagcttggacctgtaccccgggggctgccagcagctgctgcacctgtgtgtccagcagcctctgcagctgctgcaggtggaattcttgcgtctgagcactcacgaggaccctcagctgctggaggccaccctggcccagctgcctcagagcctgtcctgcctccgctccctggtcctcaaaggagggcaacgccgggacacactgggtgcctgtctccggggtgccctgaccaacctgcccgctggtctgagtggcctggcccatctggcccacctggacctgagcttcaacagcctggagacactgccggcctgtgtcctgcagatgcgaggtctgggtgcgctcttgctgtctcacaactgcctctctgagctgcctgaggctctgggggccctccccgccctcaccttcctcacagtgacacacaaccgcctgcagacgctgcccccagcactgggggccctatccaccctgcagcgcctcgatctctctcagaatctgctggacacgctacctcctgagattggaggcctgggcagcctcctggagctcaacctggcctccaaccggctgcagagcctcccagcctctctggcgggacttcggtccttgcggctccttgtcctgcacagcaacctcctggcctctgtgccagctgacttggcccgccttccactcctcacccggctcgacctgagggacaaccagctccgggacctgccccctgagctgctagacgccccctttgtgcgcctgcaggggaaccccctgggtgaggcctcgccagacgccccgagttcaccagtggcagccctcattccagaaatgcccagactgttcctgacctcagatttggacagctttcctgtgacccctcaaggctgctcagtgaccctggcctgtggcgtccgcctgcagttcccagcgggagccaccgccacccccatcaccatccgctatcggctgctgctgccggagccaggcctcgtccccctgggtcctcatgacgccctgctcagccatgtgctggagctgcagccccatggggtggccttccagcaggatgtggggctgtggctgctcttcaccccaccgcaggcccggcgctgccgtgaagtggtggtcaggacccggaatgacaacagctggggtgacctggagacctacctggaggaagaggcaccccagcggctctgggctcactgccaggtgccccacttctcctggttccttgtggtttcccgccctgtgtccaatgcctgcctggtgccaccggaggggacactgctgtgctcctcgggtcatcctggggtcaaagtcatcttcccccctggggccactgaggagcctcgtcgagtctccatgcaggtggtgcgcatggctggccgagagctgcaggccctcctgggagaaccagaggctgcagtgagccccctgctgtgcctgtcacagagcggtccccccagcttcctccaaccggtcaccgtgcagctgcctctgccctctggcatcacaggcctcagtctggaccgctcccgcctgcacctgttgtactgggcccctcctgcagccacctgggatgacatcacagctcaggtggtcctggagctcacccacctgtacgcacgcttccaggtcacacacttctcctggtactggctctggtacaccaccaagaactgtgtgggaggcctggctcggaaggcctgggagcggctgcggctgcaccgtgtgaacctcatcgctctgcagcggcgccgggaccctgagcaggtcctgctgcagtgcctgccccgaaacaaggtggacgccacccttcggcggctgctggagcggtaccggggccccgagccctctgacacggtggagatgttcgagggcgaagagttctttgcggccttcgagcgcggcatcgacgtggatgctgaccgccctgactgtgtggagggcagaatctgctttgtcttctactcgcacctgaagaatgtgaaggaggtatacgtgaccaccactctggaccgggaggctcaggctgtgcggggccaggtgtccttctaccgtggcgcggtgcctgtgcgggtgcccgaggaggctgaggctgcccggcagaggaagggcgcagacgccctgtggatggccactctgcccatcaagctgccgagacttcgagggtccgaggggccacggcggggggctggcctctccttggcacccttgaatctgggagatgccgagaccggctttctgacgcagagcaacctgctgagtgtggctgggcgtctgggtctggactggccagccgtggccctgcacctgggggtgtcctaccgggaggtgcagcgcatccggcacgagttccgggatgatctggatgagcagatccgtcacatgctcttctcctgggctgagcgccaggctgggcagccaggggctgtggggctcctggtgcaggccctggagcagagtgaccggcaggacgtggctgaagaggtgcgcgcagtcttggagctcggccgccgcaagtaccaggacagcatccgacgcatgggcttggcccccaaggaccccgctctgcctggctcctcggctccacagcccccagagcctgcccaggcctaggccccacagacttttaggctggcccagatattccccagtggatgggcagagcccccaccttcaagtctctccagtgtgtggggacgggtccctgtgagcaacaaaactgcactgtttctttca

SEQ ID NO: 13205 - DNA, 5286 bp, Homo sapiens
ctgcagcttccccgggcgctgcctggacaggcctgcctgcgtgctgggacatgtctggcctccaaggaccgtcggtgggcgatggctgcaacggtggaggggccagagctggaggcagctgctgccgcaggagatgcttcagaggattcggacgcagggtccagggcgctgcctttcctgggcggcaaccggctgagcttggacctgtaccccgggggctgccagcagctgctgcacctgtgtgtccagcagcctctgcagctgctgcaggtggaattcttgcgtctgagcactcacgaggaccctcagctgctggaggccaccctggcccagctgcctcagagcctgtcctgcctccgctccctggtcctcaaaggtgagttccacctgttctgggccctgtctccatctctcgctctgccctgcctctgctgcatgttctcaaaggcaaaccccagtcccagccccagctccaggccgcccctcccggctccccaggtgtgaactgttctgctcttggtcctgtccagccccatcgccatcctcggtgatcaccacccccagtgtggggctggctgggccctggctcctggaccctgacgctgcccagtgggggtctctccagaccacagtgcagatgttgttcctggggaaggttgtgggtgatggttgtcagctgagatgagccggtggtctccacccctgcctccttccatttgcgggcacctctccagtgtttctgtctgtctgtccctgtctggctggggtgggggtggggtgggaggtctgtgcctctcgagcagctgtttctctggctggcagggtcgatctgggacctcggaccctggctctgagggccacatccgcctccccccttcccaggagggcaacgccgggacacactgggtgcctgtctccggggtgccctgaccaacctgcccgctggtctgagtggcctggcccatctggcccacctggacctgagcttcaacagcctggagacactgccggcctgtgtcctgcagatgcgaggtctgggtgcgctcttgctgtctcacaactgcctctctgagctgcctgaggctctgggggccctccccgccctcaccttcctcacagtgacacacaaccgcctgcagacgctgcccccagcactgggggccctatccaccctgcagcgcctcgatctctctcagaatctgctggacacgctacctcctgagattggaggcctgggcagcctcctggagctcaacctggcctccaaccggctgcagagcctcccagcctctctgggtgagtagcccctgcgccccgacacactggccccacgggagggtccctgaagcctgcctgtcttctgcaggggcctctgcacccacaggcttggtccacagctgcctcttggttgtccctccacctccctggcctttgagactccctcagtggctttgtcagagttctctgagcccagctgtggaggagagtctgaaacagctgctctgggaggcggcagcaggagtgtcccagcgccgtgggctgggctggtgccaagcctaagccagcaactgcccgcagcgggacttcggtccttgcggctccttgtcctgcacagcaacctcctggcctctgtgccagctgacttggcccgccttccactcctcacccggctcgacctgagggacaaccagctccgggacctgccccctgagctgctagacgccccctttgtgcgcctgcaggggaaccccctgggtgaggcctcgccagacgccccgagttcaccaggtaggcttggtgctagaaggggcagacctgggataggacatgagtctcctcactgtcctgagcacatgtctgtcccctgcacagtggcagccctcattccagaaatgcccagactgttcctgacctcagatttggacaggtatggggtgggttgagggggctggaggggagtctgtctgcctgtcactctggcccctccgacaccttctccagagttcctgggtccaggctccaacacgtaggcccttctgggtctaacctgttgctcgctccttcctcactcagctttcctgtgacccctcaaggctgctcagtgaccctggcctgtggcgtccgcctgcagttcccagcgggagccaccgccacccccatcaccatccgctatcggctgctgctgccggagccaggcctcgtccccctgggtcctcatgacgccctgctcagccatgtgctggagctgcagccccatggggtggccttccagcaggcatggacagggcgtggcgggggcagtgtgtgggccagggcatggcaggggcagtgtgcgggcccgggcatggctccagtgctcacaccatccttgtctggcaggatgtggggctgtggctgctcttcaccccaccgcaggcccggcgctgccgtgaagtggtggtcaggacccggaatgacaacagctggggtgacctggagacctacctggaggaagaggcaccccaggtgagggccacccaggcctgccggtggcgagtggagagctgctgccctgagccgtgcacctctgcccagagcctcaccctggcaccttccaccctgccccgtccctcctggatcctgcttccctatgtccctggcaccttccaccccaccccgtccctcctggatcctgcttccctgtgtccctggcaacttccaccccaccccgtccctcctggatcctgctccctgtgtccctggcaccttccaccccgccccgtctctcctggatcctgctccctgtgtccctgactggctgtgccctgacccaggctcctgtgacctcctctctcccccatcccagcggctctgggctcactgccaggtgccccacttctcctggttccttgtggtttcccgccctgtgtccaatgcctgcctggtgccaccggaggggacactgctgtgctcctcgggtcatcctggggtcaaagtcatcttcccccctggggccactgaggagcctcgtcgagtctccatgcaggtatggccaggacagcactgagggtggcaggccgcgcctcagcccacaggcaggtgctcagggggcctgtctgccccaggtggtgcgcatggctggccgagagctgcaggccctcctgggagaaccagaggctgcagtgagccccctgctgtgcctgtcacagagcggtccccccagcttcctccaaccggtcaccgtgcagctgcctctgccctctggcatcacaggtgagaggcagccatggggcatacctggacctgtggccatagggtggagggggtctccggccaggaggcctcagctcgctgcccctcccatccccaggcctcagtctggaccgctcccgcctgcacctgttgtactgggcccctcctgcagccacctgggatgacatcacagctcaggtggtcctggagctcacccacctgtacgcacgcttccaggtcacacacttctcctggtcagtgccccccagctttctcagcccccctcccccagtctgtacagccctcctcacccccagctctcccaggtactggctctggtacaccaccaagaactgtgtgggaggcctggctcggaaggcctgggagcggctgcggctgcaccgtgtgaacctcatcgctctgcagcggcgccgggaccctgagcaggtcctgctgcagtgcctgccccgaaacaaggtgggggcacgggccggagggcagcagggtggtgaccagagggctggggtggggtgcagagctttgggtcctgagctgcacgggcttccccgcaggtggacgccacccttcggcggctgctggagcggtaccggggccccgagccctctgacacggtggagatgttcgagggcgaagagttctttgcggccttcgagcgcggcatcgacgtggatgctggtagggatgctggtggatgctccctgccctggagggggagccttaccgtcctccccgagccctccttgctcagcccacccctgtcccctagaccgccctgactgtgtggagggcagaatctgctttgtcttctactcgcacctgaagaatgtgaaggaggtatacgtgaccaccactctggaccgggaggctcaggctgtgcggggccaggtgggcgaggggagtgggtgaggggagaggccccccaggccgcttgggcagaggaccgaactccgaaccccattcgatgccccttcaggtgtccttctaccgtggcgcggtgcctgtgcgggtgcccgaggaggctgaggctgcccggcagaggaagggcgcagacgccctgtggatggccactctgcccatcaagctgccggtgggactgagggacagcagaggggcggggcaggaccgaggcccaggggtgaccagggtgacatggtggagttgggggtggagcccagggcttaatgcactttttccttccaacagagacttcgagggtccgaggggccacggcggggggctggcctctccttggcacccttgaatctgggagatgccgagaccggctttctgacgcagagcaacctgctgagtgtggctgggcgtctgggtctggactggccagccgtggccctgcacctgggggtgtcctaccgggaggtgcagcgcatccggcacgagttccggtgaggctcccactgcccgctggctgccagccccagggctgagccctggctgcctggagggcccacctgattctgacagaagtttcttccaggggaggtgggggaagggcaaacaccaggctggaaaggaaaggtctggccgcacctggccccaggagccgggaactcccccacactccgaggcagagtgtggtggggggtcctgggcaggtggacaggacccctctgtcgcccatcctctgcctgcagggatgatctggatgagcagatccgtcacatgctcttctcctgggctgagcgccaggctgggcagccaggggctgtggggctcctggtgcaggccctggagcagagtgaccggcaggacgtggctgaagaggtgcgcgcagtcttggagctcggccgccgcaagtaccaggacagcatccgacgcatgggcttggcccccaaggaccccgctctgcctggctcctcggctccacagcccccagagcctgcccaggcctaggccccacagacttttaggctggcccagatattccccagtggatgggcagagcccccaccttcaagtctctccagtgtgtggggacgggtccctgtgagcaacaaaactgcactgtttctttca

SEQ ID NO: 13206 - DNA, 2886 bp, Homo sapiens
ctgcagcttccccgggcgctgcctggacaggcctgcctgcgtgctgggacatgtctggcctccaaggaccgtcggtgggcgatggctgcaacggtggaggggccagagctggaggcagctgctgccgcaggagatgcttcagaggattcggacgcagggtccagggcgctgcctttcctgggcggcaaccggctgagcttggacctgtaccccgggggctgccagcagctgctgcacctgtgtgtccagcagcctctgcagctgctgcaggtggaattcttgcgtctgagcactcacgaggaccctcagctgctggaggccaccctggcccagctgcctcagagcctgtcctgcctccgctccctggtcctcaaaggagggcaacgccgggacacactgggtgcctgtctccggggtgccctgaccaacctgcccgctggtctgagtggcctggcccatctggcccacctggacctgagcttcaacagcctggagacactgccggcctgtgtcctgcagatgcgaggtctgggtgcgctcttgctgtctcacaactgcctctctgagctgcctgaggctctgggggccctccccgccctcaccttcctcacagtgacacacaaccgcctgcagacgctgcccccagcactgggggccctatccaccctgcagcgcctcgatctctctcagaatctgctggacacgctacctcctgagattggaggcctgggcagcctcctggagctcaacctggcctccaaccggctgcagagcctcccagcctctctggcgggacttcggtccttgcggctccttgtcctgcacagcaacctcctggcctctgtgccagctgacttggcccgccttccactcctcacccggctcgacctgagggacaaccagctccgggacctgccccctgagctgctagacgccccctttgtgcgcctgcaggggaaccccctgggtgaggcctcgccagacgccccgagttcaccagtggcagccctcattccagaaatgcccagactgttcctgacctcagatttggacagctttcctgtgacccctcaaggctgctcagtgaccctggcctgtggcgtccgcctgcagttcccagcgggagccaccgccacccccatcaccatccgctatcggctgctgctgccggagccaggcctcgtccccctgggtcctcatgacgccctgctcagccatgtgctggagctgcagccccatggggtggccttccagcaggatgtggggctgtggctgctcttcaccccaccgcaggcccggcgctgccgtgaagtggtggtcaggacccggaatgacaacagctggggtgacctggagacctacctggaggaagaggcaccccagcggctctgggctcactgccaggtgccccacttctcctggttccttgtggtttcccgccctgtgtccaatgcctgcctggtgccaccggaggggacactgctgtgctcctcgggtcatcctggggtcaaagtcatcttcccccctggggccactgaggagcctcgtcgagtctccatgcaggtggtgcgcatggctggccgagagctgcaggccctcctgggagaaccagaggctgcagtgagccccctgctgtgcctgtcacagagcggtccccccagcttcctccaaccggtcaccgtgcagctgcctctgccctctggcatcacaggcctcagtctggaccgctcccgcctgcacctgttgtactgggcccctcctgcagccacctgggatgacatcacagctcaggtggtcctggagctcacccacctgtacgcacgcttccaggtcacacacttctcctggtactggctctggtacaccaccaagaactgtgtgggaggcctggctcggaaggcctgggagcggctgcggctgcaccgtgtgaacctcatcgctctgcagcggcgccgggaccctgagcaggtcctgctgcagtgcctgccccgaaacaaggtggacgccacccttcggcggctgctggagcggtaccggggccccgagccctctgacacggtggagatgttcgagggcgaagagttctttgcggccttcgagcgcggcatcgacgtggatgctgaccgccctgactgtgtggagggcagaatctgctttgtcttctactcgcacctgaagaatgtgaaggaggtgtccttctaccgtggcgcggtgcctgtgcgggtgcccgaggaggctgaggctgcccggcagaggaagggcgcagacgccctgtggatggccactctgcccatcaagctgccgagacttcgagggtccgaggggccacggcggggggctggcctctccttggcacccttgaatctgggagatgccgagaccggctttctgacgcagagcaacctgctgagtgtggctgggcgtctgggtctggactggccagccgtggccctgcacctgggggtgtcctaccgggaggtgcagcgcatccggcacgagttccgggatgatctggatgagcagatccgtcacatgctcttctcctgggctgagcgccaggctgggcagccaggggctgtggggctcctggtgcaggccctggagcagagtgaccggcaggacgtggctgaagaggtgcgcgcagtcttggagctcggccgccgcaagtaccaggacagcatccgacgcatgggcttggcccccaaggaccccgctctgcctggctcctcggctccacagcccccagagcctgcccaggcctaggccccacagacttttaggctggcccagatattccccagtggatgggcagagcccccaccttcaagtctctccagtgtgtggggacgggtccctgtgagcaacaaaactgcactgtttctttca

SEQ ID NO: 13207 - DNA, 5924 bp, Homo sapiens
ccccgacgcccgggggatcccgagcctgcctcggggctggggcccgccccccacgccgtctgagcggtgcgcggtgcaccaccctccccagtggaccgaactggaaaggccgggagaggtttcctccggggctcacgaattggggtcccggccccaggaccccgaagctgcccaatggctcacgccccaggccctcacccttacacggccttccctgactttcggggcgcagtcacccccgcggtaggggagggtcacggccttcctggtaaaacggatgtaaatagaagggggactcatctccaggactggggaacagcccctatgacctcgcagctccacggctccattggccagatttccaggaccaggactgaagcctcactaccccggctttgctgctcatagcgaggtctccctgcccggtgctcctgcgagccatggcggtcccattccccaaccctctttccagtggtgacccaggcctccggggttcagggtgaccacaaggtctcccccactctgcagcccaggcccagatggcctggctctagagctccccactccatccagagtccctgtttccccaaagagaagggcccaccccggctcccgctcactcctcctcctgcctctgcagcttccccgggcgctgcctggacaggcctgcctgcgtgctgggacatgtctggcctccaaggaccgtcggtgggcgatggctgcaacggtggaggggccagagctggaggcagctgctgccgcaggagatgcttcagaggattcggacgcagggtccagggcgctgcctttcctgggcggcaaccggctgagcttggacctgtaccccgggggctgccagcagctgctgcacctgtgtgtccagcagcctctgcagctgctgcaggtggaattcttgcgtctgagcactcacgaggaccctcagctgctggaggccaccctggcccagctgcctcagagcctgtcctgcctccgctccctggtcctcaaaggtgagttccacctgttctgggccctgtctccatctctcgctctgccctgcctctgctgcatgttctcaaaggcaaaccccagtcccagccccagctccaggccgcccctcccggctccccaggtgtgaactgttctgctcttggtcctgtccagccccatcgccatcctcggtgatcaccacccccagtgtggggctggctgggccctggctcctggaccctgacgctgcccagtgggggtctctccagaccacagtgcagatgttgttcctggggaaggttgtgggtgatggttgtcagctgagatgagccggtggtctccacccctgcctccttccatttgcgggcacctctccagtgtttctgtctgtctgtccctgtctggctggggtgggggtggggtgggaggtctgtgcctctcgagcagctgtttctctggctggcagggtcgatctgggacctcggaccctggctctgagggccacatccgcctccccccttcccaggagggcaacgccgggacacactgggtgcctgtctccggggtgccctgaccaacctgcccgctggtctgagtggcctggcccatctggcccacctggacctgagcttcaacagcctggagacactgccggcctgtgtcctgcagatgcgaggtctgggtgcgctcttgctgtctcacaactgcctctctgagctgcctgaggctctgggggccctccccgccctcaccttcctcacagtgacacacaaccgcctgcagacgctgcccccagcactgggggccctatccaccctgcagcgcctcgatctctctcagaatctgctggacacgctacctcctgagattggaggcctgggcagcctcctggagctcaacctggcctccaaccggctgcagagcctcccagcctctctgggtgagtagcccctgcgccccgacacactggccccacgggagggtccctgaagcctgcctgtcttctgcaggggcctctgcacccacaggcttggtccacagctgcctcttggttgtccctccacctccctggcctttgagactccctcagtggctttgtcagagttctctgagcccagctgtggaggagagtctgaaacagctgctctgggaggcggcagcaggagtgtcccagcgccgtgggctgggctggtgccaagcctaagccagcaactgcccgcagcgggacttcggtccttgcggctccttgtcctgcacagcaacctcctggcctctgtgccagctgacttggcccgccttccactcctcacccggctcgacctgagggacaaccagctccgggacctgccccctgagctgctagacgccccctttgtgcgcctgcaggggaaccccctgggtgaggcctcgccagacgccccgagttcaccaggtaggcttggtgctagaaggggcagacctgggataggacatgagtctcctcactgtcctgagcacatgtctgtcccctgcacagtggcagccctcattccagaaatgcccagactgttcctgacctcagatttggacaggtatggggtgggttgagggggctggaggggagtctgtctgcctgtcactctggcccctccgacaccttctccagagttcctgggtccaggctccaacacgtaggcccttctgggtctaacctgttgctcgctccttcctcactcagctttcctgtgacccctcaaggctgctcagtgaccctggcctgtggcgtccgcctgcagttcccagcgggagccaccgccacccccatcaccatccgctatcggctgctgctgccggagccaggcctcgtccccctgggtcctcatgacgccctgctcagccatgtgctggagctgcagccccatggggtggccttccagcaggcatggacagggcgtggcgggggcagtgtgtgggccagggcatggcaggggcagtgtgcgggcccgggcatggctccagtgctcacaccatccttgtctggcaggatgtggggctgtggctgctcttcaccccaccgcaggcccggcgctgccgtgaagtggtggtcaggacccggaatgacaacagctggggtgacctggagacctacctggaggaagaggcaccccaggtgagggccacccaggcctgccggtggcgagtggagagctgctgccctgagccgtgcacctctgcccagagcctcaccctggcaccttccaccctgccccgtccctcctggatcctgcttccctatgtccctggcaccttccaccccaccccgtccctcctggatcctgcttccctgtgtccctggcaacttccaccccaccccgtccctcctggatcctgctccctgtgtccctggcaccttccaccccgccccgtctctcctggatcctgctccctgtgtccctgactggctgtgccctgacccaggctcctgtgacctcctctctcccccatcccagcggctctgggctcactgccaggtgccccacttctcctggttccttgtggtttcccgccctgtgtccaatgcctgcctggtgccaccggaggggacactgctgtgctcctcgggtcatcctggggtcaaagtcatcttcccccctggggccactgaggagcctcgtcgagtctccatgcaggtatggccaggacagcactgagggtggcaggccgcgcctcagcccacaggcaggtgctcagggggcctgtctgccccaggtggtgcgcatggctggccgagagctgcaggccctcctgggagaaccagaggctgcagtgagccccctgctgtgcctgtcacagagcggtccccccagcttcctccaaccggtcaccgtgcagctgcctctgccctctggcatcacaggtgagaggcagccatggggcatacctggacctgtggccatagggtggagggggtctccggccaggaggcctcagctcgctgcccctcccatccccaggcctcagtctggaccgctcccgcctgcacctgttgtactgggcccctcctgcagccacctgggatgacatcacagctcaggtggtcctggagctcacccacctgtacgcacgcttccaggtcacacacttctcctggtcagtgccccccagctttctcagcccccctcccccagtctgtacagccctcctcacccccagctctcccaggtactggctctggtacaccaccaagaactgtgtgggaggcctggctcggaaggcctgggagcggctgcggctgcaccgtgtgaacctcatcgctctgcagcggcgccgggaccctgagcaggtcctgctgcagtgcctgccccgaaacaaggtgggggcacgggccggagggcagcagggtggtgaccagagggctggggtggggtgcagagctttgggtcctgagctgcacgggcttccccgcaggtggacgccacccttcggcggctgctggagcggtaccggggccccgagccctctgacacggtggagatgttcgagggcgaagagttctttgcggccttcgagcgcggcatcgacgtggatgctggtagggatgctggtggatgctccctgccctggagggggagccttaccgtcctccccgagccctccttgctcagcccacccctgtcccctagaccgccctgactgtgtggagggcagaatctgctttgtcttctactcgcacctgaagaatgtgaaggaggtatacgtgaccaccactctggaccgggaggctcaggctgtgcggggccaggtgggcgaggggagtgggtgaggggagaggccccccaggccgcttgggcagaggaccgaactccgaaccccattcgatgccccttcaggtgtccttctaccgtggcgcggtgcctgtgcgggtgcccgaggaggctgaggctgcccggcagaggaagggcgcagacgccctgtggatggccactctgcccatcaagctgccggtgggactgagggacagcagaggggcggggcaggaccgaggcccaggggtgaccagggtgacatggtggagttgggggtggagcccagggcttaatgcactttttccttccaacagagacttcgagggtccgaggggccacggcggggggctggcctctccttggcacccttgaatctgggagatgccgagaccggctttctgacgcagagcaacctgctgagtgtggctgggcgtctgggtctggactggccagccgtggccctgcacctgggggtgtcctaccgggaggtgcagcgcatccggcacgagttccggtgaggctcccactgcccgctggctgccagccccagggctgagccctggctgcctggagggcccacctgattctgacagaagtttcttccaggggaggtgggggaagggcaaacaccaggctggaaaggaaaggtctggccgcacctggccccaggagccgggaactcccccacactccgaggcagagtgtggtggggggtcctgggcaggtggacaggacccctctgtcgcccatcctctgcctgcagggatgatctggatgagcagatccgtcacatgctcttctcctgggctgagcgccaggctgggcagccaggggctgtggggctcctggtgcaggccctggagcagagtgaccggcaggacgtggctgaagaggtgcgcgcagtcttggagctcggccgccgcaagtaccaggacagcatccgacgcatgggcttggcccccaaggaccccgctctgcctggctcctcggctccacagcccccagagcctgcccaggcctaggccccacagacttttaggctggcccagatattccccagtggatgggcagagcccccaccttcaagtctctccagtgtgtggggacgggtccctgtgagcaacaaaactgcactgtttctttcacctc

SEQ ID NO: 13208 - DNA, 3917 bp, Homo sapiens
ccccgacgcccgggggatcccgagcctgcctcggggctggggcccgccccccacgccgtctgagcggtgcgcggtgcaccaccctccccagtggaccgaactggaaaggccgggagaggtttcctccggggctcacgaattggggtcccggccccaggaccccgaagctgcccaatggctcacgccccaggccctcacccttacacggccttccctgactttcggggcgcagtcacccccgcggtaggggagggtcacggccttcctggtaaaacggatgtaaatagaagggggactcatctccaggactggggaacagcccctatgacctcgcagctccacggctccattggccagatttccaggaccaggactgaagcctcactaccccggctttgctgctcatagcgaggtctccctgcccggtgctcctgcgagccatggcggtcccattccccaaccctctttccagtggtgacccaggcctccggggttcagggtgaccacaaggtctcccccactctgcagcccaggcccagatggcctggctctagagctccccactccatccagagtccctgtttccccaaagagaagggcccaccccggctcccgctcactcctcctcctgcctctgcagcttccccgggcgctgcctggacaggcctgcctgcgtgctgggacatgtctggcctccaaggaccgtcggtgggcgatggctgcaacggtggaggggccagagctggaggcagctgctgccgcaggagatgcttcagaggattcggacgcagggtccagggcgctgcctttcctgggcggcaaccggctgagcttggacctgtaccccgggggctgccagcagctgctgcacctgtgtgtccagcagcctctgcagctgctgcaggtggaattcttgcgtctgagcactcacgaggaccctcagctgctggaggccaccctggcccagctgcctcagagcctgtcctgcctccgctccctggtcctcaaagggtcgatctgggacctcggaccctggctctgagggccacatccgcctccccccttcccaggagggcaacgccgggacacactgggtgcctgtctccggggtgccctgaccaacctgcccgctggtctgagtggcctggcccatctggcccacctggacctgagcttcaacagcctggagacactgccggcctgtgtcctgcagatgcgaggtctgggtgcgctcttgctgtctcacaactgcctctctgagctgcctgaggctctgggggccctccccgccctcaccttcctcacagtgacacacaaccgcctgcagacgctgcccccagcactgggggccctatccaccctgcagcgcctcgatctctctcagaatctgctggacacgctacctcctgagattggaggcctgggcagcctcctggagctcaacctggcctccaaccggctgcagagcctcccagcctctctgggtgagtagcccctgcgccccgacacactggccccacgggagggtccctgaagcctgcctgtcttctgcaggggcctctgcacccacaggcttggtccacagctgcctcttggttgtccctccacctccctggcctttgagactccctcagtggctttgtcagagttctctgagcccagctgtggaggagagtctgaaacagctgctctgggaggcggcagcaggagtgtcccagcgccgtgggctgggctggtgccaagcctaagccagcaactgcccgcagcgggacttcggtccttgcggctccttgtcctgcacagcaacctcctggcctctgtgccagctgacttggcccgccttccactcctcacccggctcgacctgagggacaaccagctccgggacctgccccctgagctgctagacgccccctttgtgcgcctgcaggggaaccccctgggtgaggcctcgccagacgccccgagttcaccagtggcagccctcattccagaaatgcccagactgttcctgacctcagatttggacagctttcctgtgacccctcaaggctgctcagtgaccctggcctgtggcgtccgcctgcagttcccagcgggagccaccgccacccccatcaccatccgctatcggctgctgctgccggagccaggcctcgtccccctgggtcctcatgacgccctgctcagccatgtgctggagctgcagccccatggggtggccttccagcaggatgtggggctgtggctgctcttcaccccaccgcaggcccggcgctgccgtgaagtggtggtcaggacccggaatgacaacagctggggtgacctggagacctacctggaggaagaggcaccccagcggctctgggctcactgccaggtgccccacttctcctggttccttgtggtttcccgccctgtgtccaatgcctgcctggtgccaccggaggggacactgctgtgctcctcgggtcatcctggggtcaaagtcatcttcccccctggggccactgaggagcctcgtcgagtctccatgcaggtggtgcgcatggctggccgagagctgcaggccctcctgggagaaccagaggctgcagtgagccccctgctgtgcctgtcacagagcggtccccccagcttcctccaaccggtcaccgtgcagctgcctctgccctctggcatcacaggcctcagtctggaccgctcccgcctgcacctgttgtactgggcccctcctgcagccacctgggatgacatcacagctcaggtggtcctggagctcacccacctgtacgcacgcttccaggtcacacacttctcctggtactggctctggtacaccaccaagaactgtgtgggaggcctggctcggaaggcctgggagcggctgcggctgcaccgtgtgaacctcatcgctctgcagcggcgccgggaccctgagcaggtcctgctgcagtgcctgccccgaaacaaggtggacgccacccttcggcggctgctggagcggtaccggggccccgagccctctgacacggtggagatgttcgagggcgaagagttctttgcggccttcgagcgcggcatcgacgtggatgctgaccgccctgactgtgtggagggcagaatctgctttgtcttctactcgcacctgaagaatgtgaaggaggtatacgtgaccaccactctggaccgggaggctcaggctgtgcggggccaggtgtccttctaccgtggcgcggtgcctgtgcgggtgcccgaggaggctgaggctgcccggcagaggaagggcgcagacgccctgtggatggccactctgcccatcaagctgccgagacttcgagggtccgaggggccacggcggggggctggcctctccttggcacccttgaatctgggagatgccgagaccggctttctgacgcagagcaacctgctgagtgtggctgggcgtctgggtctggactggccagccgtggccctgcacctgggggtgtcctaccgggaggtgcagcgcatccggcacgagttccgggatgatctggatgagcagatccgtcacatgctcttctcctgggctgagcgccaggctgggcagccaggggctgtggggctcctggtgcaggccctggagcagagtgaccggcaggacgtggctgaagaggtgcgcgcagtcttggagctcggccgccgcaagtaccaggacagcatccgacgcatgggcttggcccccaaggaccccgctctgcctggctcctcggctccacagcccccagagcctgcccaggcctaggccccacagacttttaggctggcccagatattccccagtggatgggcagagcccccaccttcaagtctctccagtgtgtggggacgggtccctgtgagcaacaaaactgcactgtttctttcacctc

SEQ ID NO: 13209 - DNA, 5497 bp, Homo sapiens
ctcctgcgagccatggcggtcccattccccaaccctctttccagtggtgacccaggcctccggggttcagggtgaccacaaggtctcccccactctgcagcccaggcccagatggcctggctctagagctccccactccatccagagtccctgtttccccaaagagaagggcccaccccggctcccgctcactcctcctcctgcctctgcagcttccccgggcgctgcctggacaggcctgcctgcgtgctgggacatgtctggcctccaaggaccgtcggtgggcgatggctgcaacggtggaggggccagagctggaggcagctgctgccgcaggagatgcttcagaggattcggacgcagggtccagggcgctgcctttcctgggcggcaaccggctgagcttggacctgtaccccgggggctgccagcagctgctgcacctgtgtgtccagcagcctctgcagctgctgcaggtggaattcttgcgtctgagcactcacgaggaccctcagctgctggaggccaccctggcccagctgcctcagagcctgtcctgcctccgctccctggtcctcaaaggtgagttccacctgttctgggccctgtctccatctctcgctctgccctgcctctgctgcatgttctcaaaggcaaaccccagtcccagccccagctccaggccgcccctcccggctccccaggtgtgaactgttctgctcttggtcctgtccagccccatcgccatcctcggtgatcaccacccccagtgtggggctggctgggccctggctcctggaccctgacgctgcccagtgggggtctctccagaccacagtgcagatgttgttcctggggaaggttgtgggtgatggttgtcagctgagatgagccggtggtctccacccctgcctccttccatttgcgggcacctctccagtgtttctgtctgtctgtccctgtctggctggggtgggggtggggtgggaggtctgtgcctctcgagcagctgtttctctggctggcagggtcgatctgggacctcggaccctggctctgagggccacatccgcctccccccttcccaggagggcaacgccgggacacactgggtgcctgtctccggggtgccctgaccaacctgcccgctggtctgagtggcctggcccatctggcccacctggacctgagcttcaacagcctggagacactgccggcctgtgtcctgcagatgcgaggtctgggtgcgctcttgctgtctcacaactgcctctctgagctgcctgaggctctgggggccctccccgccctcaccttcctcacagtgacacacaaccgcctgcagacgctgcccccagcactgggggccctatccaccctgcagcgcctcgatctctctcagaatctgctggacacgctacctcctgagattggaggcctgggcagcctcctggagctcaacctggcctccaaccggctgcagagcctcccagcctctctgggtgagtagcccctgcgccccgacacactggccccacgggagggtccctgaagcctgcctgtcttctgcaggggcctctgcacccacaggcttggtccacagctgcctcttggttgtccctccacctccctggcctttgagactccctcagtggctttgtcagagttctctgagcccagctgtggaggagagtctgaaacagctgctctgggaggcggcagcaggagtgtcccagcgccgtgggctgggctggtgccaagcctaagccagcaactgcccgcagcgggacttcggtccttgcggctccttgtcctgcacagcaacctcctggcctctgtgccagctgacttggcccgccttccactcctcacccggctcgacctgagggacaaccagctccgggacctgccccctgagctgctagacgccccctttgtgcgcctgcaggggaaccccctgggtgaggcctcgccagacgccccgagttcaccaggtaggcttggtgctagaaggggcagacctgggataggacatgagtctcctcactgtcctgagcacatgtctgtcccctgcacagtggcagccctcattccagaaatgcccagactgttcctgacctcagatttggacaggtatggggtgggttgagggggctggaggggagtctgtctgcctgtcactctggcccctccgacaccttctccagagttcctgggtccaggctccaacacgtaggcccttctgggtctaacctgttgctcgctccttcctcactcagctttcctgtgacccctcaaggctgctcagtgaccctggcctgtggcgtccgcctgcagttcccagcgggagccaccgccacccccatcaccatccgctatcggctgctgctgccggagccaggcctcgtccccctgggtcctcatgacgccctgctcagccatgtgctggagctgcagccccatggggtggccttccagcaggcatggacagggcgtggcgggggcagtgtgtgggccagggcatggcaggggcagtgtgcgggcccgggcatggctccagtgctcacaccatccttgtctggcaggatgtggggctgtggctgctcttcaccccaccgcaggcccggcgctgccgtgaagtggtggtcaggacccggaatgacaacagctggggtgacctggagacctacctggaggaagaggcaccccaggtgagggccacccaggcctgccggtggcgagtggagagctgctgccctgagccgtgcacctctgcccagagcctcaccctggcaccttccaccctgccccgtccctcctggatcctgcttccctatgtccctggcaccttccaccccaccccgtccctcctggatcctgcttccctgtgtccctggcaacttccaccccaccccgtccctcctggatcctgctccctgtgtccctggcaccttccaccccgccccgtctctcctggatcctgctccctgtgtccctgactggctgtgccctgacccaggctcctgtgacctcctctctcccccatcccagcggctctgggctcactgccaggtgccccacttctcctggttccttgtggtttcccgccctgtgtccaatgcctgcctggtgccaccggaggggacactgctgtgctcctcgggtcatcctggggtcaaagtcatcttcccccctggggccactgaggagcctcgtcgagtctccatgcaggtatggccaggacagcactgagggtggcaggccgcgcctcagcccacaggcaggtgctcagggggcctgtctgccccaggtggtgcgcatggctggccgagagctgcaggccctcctgggagaaccagaggctgcagtgagccccctgctgtgcctgtcacagagcggtccccccagcttcctccaaccggtcaccgtgcagctgcctctgccctctggcatcacaggtgagaggcagccatggggcatacctggacctgtggccatagggtggagggggtctccggccaggaggcctcagctcgctgcccctcccatccccaggcctcagtctggaccgctcccgcctgcacctgttgtactgggcccctcctgcagccacctgggatgacatcacagctcaggtggtcctggagctcacccacctgtacgcacgcttccaggtcacacacttctcctggtcagtgccccccagctttctcagcccccctcccccagtctgtacagccctcctcacccccagctctcccaggtactggctctggtacaccaccaagaactgtgtgggaggcctggctcggaaggcctgggagcggctgcggctgcaccgtgtgaacctcatcgctctgcagcggcgccgggaccctgagcaggtcctgctgcagtgcctgccccgaaacaaggtgggggcacgggccggagggcagcagggtggtgaccagagggctggggtggggtgcagagctttgggtcctgagctgcacgggcttccccgcaggtggacgccacccttcggcggctgctggagcggtaccggggccccgagccctctgacacggtggagatgttcgagggcgaagagttctttgcggccttcgagcgcggcatcgacgtggatgctggtagggatgctggtggatgctccctgccctggagggggagccttaccgtcctccccgagccctccttgctcagcccacccctgtcccctagaccgccctgactgtgtggagggcagaatctgctttgtcttctactcgcacctgaagaatgtgaaggaggtatacgtgaccaccactctggaccgggaggctcaggctgtgcggggccaggtgggcgaggggagtgggtgaggggagaggccccccaggccgcttgggcagaggaccgaactccgaaccccattcgatgccccttcaggtgtccttctaccgtggcgcggtgcctgtgcgggtgcccgaggaggctgaggctgcccggcagaggaagggcgcagacgccctgtggatggccactctgcccatcaagctgccggtgggactgagggacagcagaggggcggggcaggaccgaggcccaggggtgaccagggtgacatggtggagttgggggtggagcccagggcttaatgcactttttccttccaacagagacttcgagggtccgaggggccacggcggggggctggcctctccttggcacccttgaatctgggagatgccgagaccggctttctgacgcagagcaacctgctgagtgtggctgggcgtctgggtctggactggccagccgtggccctgcacctgggggtgtcctaccgggaggtgcagcgcatccggcacgagttccggtgaggctcccactgcccgctggctgccagccccagggctgagccctggctgcctggagggcccacctgattctgacagaagtttcttccaggggaggtgggggaagggcaaacaccaggctggaaaggaaaggtctggccgcacctggccccaggagccgggaactcccccacactccgaggcagagtgtggtggggggtcctgggcaggtggacaggacccctctgtcgcccatcctctgcctgcagggatgatctggatgagcagatccgtcacatgctcttctcctgggctgagcgccaggctgggcagccaggggctgtggggctcctggtgcaggccctggagcagagtgaccggcaggacgtggctgaagaggtgcgcgcagtcttggagctcggccgccgcaagtaccaggacagcatccgacgcatgggcttggcccccaaggaccccgctctgcctggctcctcggctccacagcccccagagcctgcccaggcctaggccccacagacttttaggctggcccagatattccccagtggatgggcagagcccccaccttcaagtctctccagtgtgtggggacgggtccctgtgagcaacaaaactgcactgtttctttcacctca

SEQ ID NO: 13210 - DNA, 3175 bp, Homo sapiens
ctcctgcgagccatggcggtcccattccccaaccctctttccagtggtgacccaggcctccggggttcagggtgaccacaaggtctcccccactctgcagcccaggcccagatggcctggctctagagctccccactccatccagagtccctgtttccccaaagagaagggcccaccccggctcccgctcactcctcctcctgcctctgcagcttccccgggcgctgcctggacaggcctgcctgcgtgctgggacatgtctggcctccaaggaccgtcggtgggcgatggctgcaacggtggaggggccagagctggaggcagctgctgccgcaggagatgcttcagaggattcggacgcagggtccagggcgctgcctttcctgggcggcaaccggctgagcttggacctgtaccccgggggctgccagcagctgctgcacctgtgtgtccagcagcctctgcagctgctgcaggtggaattcttgcgtctgagcactcacgaggaccctcagctgctggaggccaccctggcccagctgcctcagagcctgtcctgcctccgctccctggtcctcaaagggtcgatctgggacctcggaccctggctctgagggccacatccgcctccccccttcccaggagggcaacgccgggacacactgggtgcctgtctccggggtgccctgaccaacctgcccgctggtctgagtggcctggcccatctggcccacctggacctgagcttcaacagcctggagacactgccggcctgtgtcctgcagatgcgaggtctgggtgcgctcttgctgtctcacaactgcctctctgagctgcctgaggctctgggggccctccccgccctcaccttcctcacagtgacacacaaccgcctgcagacgctgcccccagcactgggggccctatccaccctgcagcgcctcgatctctctcagaatctgctggacacgctacctcctgagattggaggcctgggcagcctcctggagctcaacctggcctccaaccggctgcagagcctcccagcctctctggcgggacttcggtccttgcggctccttgtcctgcacagcaacctcctggcctctgtgccagctgacttggcccgccttccactcctcacccggctcgacctgagggacaaccagctccgggacctgccccctgagctgctagacgccccctttgtgcgcctgcaggggaaccccctgggtgaggcctcgccagacgccccgagttcaccagtggcagccctcattccagaaatgcccagactgttcctgacctcagatttggacagctttcctgtgacccctcaaggctgctcagtgaccctggcctgtggcgtccgcctgcagttcccagcgggagccaccgccacccccatcaccatccgctatcggctgctgctgccggagccaggcctcgtccccctgggtcctcatgacgccctgctcagccatgtgctggagctgcagccccatggggtggccttccagcaggatgtggggctgtggctgctcttcaccccaccgcaggcccggcgctgccgtgaagtggtggtcaggacccggaatgacaacagctggggtgacctggagacctacctggaggaagaggcaccccagcggctctgggctcactgccaggtgccccacttctcctggttccttgtggtttcccgccctgtgtccaatgcctgcctggtgccaccggaggggacactgctgtgctcctcgggtcatcctggggtcaaagtcatcttcccccctggggccactgaggagcctcgtcgagtctccatgcaggtggtgcgcatggctggccgagagctgcaggccctcctgggagaaccagaggctgcagtgagccccctgctgtgcctgtcacagagcggtccccccagcttcctccaaccggtcaccgtgcagctgcctctgccctctggcatcacaggcctcagtctggaccgctcccgcctgcacctgttgtactgggcccctcctgcagccacctgggatgacatcacagctcaggtggtcctggagctcacccacctgtactggctctggtacaccaccaagaactgtgtgggaggcctggctcggaaggcctgggagcggctgcggctgcaccgtgtgaacctcatcgctctgcagcggcgccgggaccctgagcaggtcctgctgcagtgcctgccccgaaacaaggtggacgccacccttcggcggctgctggagcggtaccggggccccgagccctctgacacggtggagatgttcgagggcgaagagttctttgcggccttcgagcgcggcatcgacgtggatgctgaccgccctgactgtgtggagggcagaatctgctttgtcttctactcgcacctgaagaatgtgaaggaggtatacgtgaccaccactctggaccgggaggctcaggctgtgcggggccaggtgtccttctaccgtggcgcggtgcctgtgcgggtgcccgaggaggctgaggctgcccggcagaggaagggcgcagacgccctgtggatggccactctgcccatcaagctgccgagacttcgagggtccgaggggccacggcggggggctggcctctccttggcacccttgaatctgggagatgccgagaccggctttctgacgcagagcaacctgctgagtgtggctgggcgtctgggtctggactggccagccgtggccctgcacctgggggtgtcctaccgggaggtgcagcgcatccggcacgagttccgggatgatctggatgagcagatccgtcacatgctcttctcctgggctgagcgccaggctgggcagccaggggctgtggggctcctggtgcaggccctggagcagagtgaccggcaggacgtggctgaagaggtgcgcgcagtcttggagctcggccgccgcaagtaccaggacagcatccgacgcatgggcttggcccccaaggaccccgctctgcctggctcctcggctccacagcccccagagcctgcccaggcctaggccccacagacttttaggctggcccagatattccccagtggatgggcagagcccccaccttcaagtctctccagtgtgtggggacgggtccctgtgagcaacaaaactgcactgtttctttcacctca

SEQ ID NO: 13211 - DNA, 6046 bp, Homo sapiens
ggcgccgagcgcccgctgagcagccaccctttgcgcgccgcctgcagcgcaggtacgcgccggcctgggcgggcggagggggcggcggggacacgtttgcttttgggaggctgggggccgttcccatccccgacgcccgggggatcccgagcctgcctcggggctggggcccgccccccacgccgtctgagcggtgcgcggtgcaccaccctccccagtggaccgaactggaaaggccgggagaggtttcctccggggctcacgaattggggtcccggccccaggaccccgaagctgcccaatggctcacgccccaggccctcacccttacacggccttccctgactttcggggcgcagtcacccccgcggtaggggagggtcacggccttcctggtaaaacggatgtaaatagaagggggactcatctccaggactggggaacagcccctatgacctcgcagctccacggctccattggccagatttccaggaccaggactgaagcctcactaccccggctttgctgctcatagcgaggtctccctgcccggtgctcctgcgagccatggcggtcccattccccaaccctctttccagtggtgacccaggcctccggggttcagggtgaccacaaggtctcccccactctgcagcccaggcccagatggcctggctctagagctccccactccatccagagtccctgtttccccaaagagaagggcccaccccggctcccgctcactcctcctcctgcctctgcagcttccccgggcgctgcctggacaggcctgcctgcgtgctgggacatgtctggcctccaaggaccgtcggtgggcgatggctgcaacggtggaggggccagagctggaggcagctgctgccgcaggagatgcttcagaggattcggacgcagggtccagggcgctgcctttcctgggcggcaaccggctgagcttggacctgtaccccgggggctgccagcagctgctgcacctgtgtgtccagcagcctctgcagctgctgcaggtggaattcttgcgtctgagcactcacgaggaccctcagctgctggaggccaccctggcccagctgcctcagagcctgtcctgcctccgctccctggtcctcaaaggtgagttccacctgttctgggccctgtctccatctctcgctctgccctgcctctgctgcatgttctcaaaggcaaaccccagtcccagccccagctccaggccgcccctcccggctccccaggtgtgaactgttctgctcttggtcctgtccagccccatcgccatcctcggtgatcaccacccccagtgtggggctggctgggccctggctcctggaccctgacgctgcccagtgggggtctctccagaccacagtgcagatgttgttcctggggaaggttgtgggtgatggttgtcagctgagatgagccggtggtctccacccctgcctccttccatttgcgggcacctctccagtgtttctgtctgtctgtccctgtctggctggggtgggggtggggtgggaggtctgtgcctctcgagcagctgtttctctggctggcagggtcgatctgggacctcggaccctggctctgagggccacatccgcctccccccttcccaggagggcaacgccgggacacactgggtgcctgtctccggggtgccctgaccaacctgcccgctggtctgagtggcctggcccatctggcccacctggacctgagcttcaacagcctggagacactgccggcctgtgtcctgcagatgcgaggtctgggtgcgctcttgctgtctcacaactgcctctctgagctgcctgaggctctgggggccctccccgccctcaccttcctcacagtgacacacaaccgcctgcagacgctgcccccagcactgggggccctatccaccctgcagcgcctcgatctctctcagaatctgctggacacgctacctcctgagattggaggcctgggcagcctcctggagctcaacctggcctccaaccggctgcagagcctcccagcctctctgggtgagtagcccctgcgccccgacacactggccccacgggagggtccctgaagcctgcctgtcttctgcaggggcctctgcacccacaggcttggtccacagctgcctcttggttgtccctccacctccctggcctttgagactccctcagtggctttgtcagagttctctgagcccagctgtggaggagagtctgaaacagctgctctgggaggcggcagcaggagtgtcccagcgccgtgggctgggctggtgccaagcctaagccagcaactgcccgcagcgggacttcggtccttgcggctccttgtcctgcacagcaacctcctggcctctgtgccagctgacttggcccgccttccactcctcacccggctcgacctgagggacaaccagctccgggacctgccccctgagctgctagacgccccctttgtgcgcctgcaggggaaccccctgggtgaggcctcgccagacgccccgagttcaccaggtaggcttggtgctagaaggggcagacctgggataggacatgagtctcctcactgtcctgagcacatgtctgtcccctgcacagtggcagccctcattccagaaatgcccagactgttcctgacctcagatttggacaggtatggggtgggttgagggggctggaggggagtctgtctgcctgtcactctggcccctccgacaccttctccagagttcctgggtccaggctccaacacgtaggcccttctgggtctaacctgttgctcgctccttcctcactcagctttcctgtgacccctcaaggctgctcagtgaccctggcctgtggcgtccgcctgcagttcccagcgggagccaccgccacccccatcaccatccgctatcggctgctgctgccggagccaggcctcgtccccctgggtcctcatgacgccctgctcagccatgtgctggagctgcagccccatggggtggccttccagcaggcatggacagggcgtggcgggggcagtgtgtgggccagggcatggcaggggcagtgtgcgggcccgggcatggctccagtgctcacaccatccttgtctggcaggatgtggggctgtggctgctcttcaccccaccgcaggcccggcgctgccgtgaagtggtggtcaggacccggaatgacaacagctggggtgacctggagacctacctggaggaagaggcaccccaggtgagggccacccaggcctgccggtggcgagtggagagctgctgccctgagccgtgcacctctgcccagagcctcaccctggcaccttccaccctgccccgtccctcctggatcctgcttccctatgtccctggcaccttccaccccaccccgtccctcctggatcctgcttccctgtgtccctggcaacttccaccccaccccgtccctcctggatcctgctccctgtgtccctggcaccttccaccccgccccgtctctcctggatcctgctccctgtgtccctgactggctgtgccctgacccaggctcctgtgacctcctctctcccccatcccagcggctctgggctcactgccaggtgccccacttctcctggttccttgtggtttcccgccctgtgtccaatgcctgcctggtgccaccggaggggacactgctgtgctcctcgggtcatcctggggtcaaagtcatcttcccccctggggccactgaggagcctcgtcgagtctccatgcaggtatggccaggacagcactgagggtggcaggccgcgcctcagcccacaggcaggtgctcagggggcctgtctgccccaggtggtgcgcatggctggccgagagctgcaggccctcctgggagaaccagaggctgcagtgagccccctgctgtgcctgtcacagagcggtccccccagcttcctccaaccggtcaccgtgcagctgcctctgccctctggcatcacaggtgagaggcagccatggggcatacctggacctgtggccatagggtggagggggtctccggccaggaggcctcagctcgctgcccctcccatccccaggcctcagtctggaccgctcccgcctgcacctgttgtactgggcccctcctgcagccacctgggatgacatcacagctcaggtggtcctggagctcacccacctgtacgcacgcttccaggtcacacacttctcctggtcagtgccccccagctttctcagcccccctcccccagtctgtacagccctcctcacccccagctctcccaggtactggctctggtacaccaccaagaactgtgtgggaggcctggctcggaaggcctgggagcggctgcggctgcaccgtgtgaacctcatcgctctgcagcggcgccgggaccctgagcaggtcctgctgcagtgcctgccccgaaacaaggtgggggcacgggccggagggcagcagggtggtgaccagagggctggggtggggtgcagagctttgggtcctgagctgcacgggcttccccgcaggtggacgccacccttcggcggctgctggagcggtaccggggccccgagccctctgacacggtggagatgttcgagggcgaagagttctttgcggccttcgagcgcggcatcgacgtggatgctggtagggatgctggtggatgctccctgccctggagggggagccttaccgtcctccccgagccctccttgctcagcccacccctgtcccctagaccgccctgactgtgtggagggcagaatctgctttgtcttctactcgcacctgaagaatgtgaaggaggtatacgtgaccaccactctggaccgggaggctcaggctgtgcggggccaggtgggcgaggggagtgggtgaggggagaggccccccaggccgcttgggcagaggaccgaactccgaaccccattcgatgccccttcaggtgtccttctaccgtggcgcggtgcctgtgcgggtgcccgaggaggctgaggctgcccggcagaggaagggcgcagacgccctgtggatggccactctgcccatcaagctgccggtgggactgagggacagcagaggggcggggcaggaccgaggcccaggggtgaccagggtgacatggtggagttgggggtggagcccagggcttaatgcactttttccttccaacagagacttcgagggtccgaggggccacggcggggggctggcctctccttggcacccttgaatctgggagatgccgagaccggctttctgacgcagagcaacctgctgagtgtggctgggcgtctgggtctggactggccagccgtggccctgcacctgggggtgtcctaccgggaggtgcagcgcatccggcacgagttccggtgaggctcccactgcccgctggctgccagccccagggctgagccctggctgcctggagggcccacctgattctgacagaagtttcttccaggggaggtgggggaagggcaaacaccaggctggaaaggaaaggtctggccgcacctggccccaggagccgggaactcccccacactccgaggcagagtgtggtggggggtcctgggcaggtggacaggacccctctgtcgcccatcctctgcctgcagggatgatctggatgagcagatccgtcacatgctcttctcctgggctgagcgccaggctgggcagccaggggctgtggggctcctggtgcaggccctggagcagagtgaccggcaggacgtggctgaagaggtgcgcgcagtcttggagctcggccgccgcaagtaccaggacagcatccgacgcatgggcttggcccccaaggaccccgctctgcctggctcctcggctccacagcccccagagcctgcccaggcctaggccccacagacttttaggctggcccagatattccccagtggatgggcagagcccccaccttcaagtctctccagtgtgtggggacgggtccctgtgagcaacaaaactgcactgtttctttc

SEQ ID NO: 13212 - DNA, 4496 bp, Homo sapiens
ggcgccgagcgcccgctgagcagccaccctttgcgcgccgcctgcagcgcagcttccccgggcgctgcctggacaggcctgcctgcgtgctgggacatgtctggcctccaaggaccgtcggtgggcgatggctgcaacggtggaggggccagagctggaggcagctgctgccgcaggagatgcttcagaggattcggacgcagggtccagggcgctgcctttcctgggcggcaaccggctgagcttggacctgtaccccgggggctgccagcagctgctgcacctgtgtgtccagcagcctctgcagctgctgcaggtggaattcttgcgtctgagcactcacgaggaccctcagctgctggaggccaccctggcccagctgcctcagagcctgtcctgcctccgctccctggtcctcaaaggtgagttccacctgttctgggccctgtctccatctctcgctctgccctgcctctgctgcatgttctcaaaggcaaaccccagtcccagccccagctccaggccgcccctcccggctccccaggtgtgaactgttctgctcttggtcctgtccagccccatcgccatcctcggtgatcaccacccccagtgtggggctggctgggccctggctcctggaccctgacgctgcccagtgggggtctctccagaccacagtgcagatgttgttcctggggaaggttgtgggtgatggttgtcagctgagatgagccggtggtctccacccctgcctccttccatttgcgggcacctctccagtgtttctgtctgtctgtccctgtctggctggggtgggggtggggtgggaggtctgtgcctctcgagcagctgtttctctggctggcagggtcgatctgggacctcggaccctggctctgagggccacatccgcctccccccttcccaggagggcaacgccgggacacactgggtgcctgtctccggggtgccctgaccaacctgcccgctggtctgagtggcctggcccatctggcccacctggacctgagcttcaacagcctggagacactgccggcctgtgtcctgcagatgcgaggtctgggtgcgctcttgctgtctcacaactgcctctctgagctgcctgaggctctgggggccctccccgccctcaccttcctcacagtgacacacaaccgcctgcagacgctgcccccagcactgggggccctatccaccctgcagcgcctcgatctctctcagaatctgctggacacgctacctcctgagattggaggcctgggcagcctcctggagctcaacctggcctccaaccggctgcagagcctcccagcctctctgggtgagtagcccctgcgccccgacacactggccccacgggagggtccctgaagcctgcctgtcttctgcaggggcctctgcacccacaggcttggtccacagctgcctcttggttgtccctccacctccctggcctttgagactccctcagtggctttgtcagagttctctgagcccagctgtggaggagagtctgaaacagctgctctgggaggcggcagcaggagtgtcccagcgccgtgggctgggctggtgccaagcctaagccagcaactgcccgcagcgggacttcggtccttgcggctccttgtcctgcacagcaacctcctggcctctgtgccagctgacttggcccgccttccactcctcacccggctcgacctgagggacaaccagctccgggacctgccccctgagctgctagacgccccctttgtgcgcctgcaggggaaccccctgggtgaggcctcgccagacgccccgagttcaccagtggcagccctcattccagaaatgcccagactgttcctgacctcagatttggacagctttcctgtgacccctcaaggctgctcagtgaccctggcctgtggcgtccgcctgcagttcccagcgggagccaccgccacccccatcaccatccgctatcggctgctgctgccggagccaggcctcgtccccctgggtcctcatgacgccctgctcagccatgtgctggagctgcagccccatggggtggccttccagcaggatgtggggctgtggctgctcttcaccccaccgcaggcccggcgctgccgtgaagtggtggtcaggacccggaatgacaacagctggggtgacctggagacctacctggaggaagaggcaccccaggtgagggccacccaggcctgccggtggcgagtggagagctgctgccctgagccgtgcacctctgcccagagcctcaccctggcaccttccaccctgccccgtccctcctggatcctgcttccctatgtccctggcaccttccaccccaccccgtccctcctggatcctgcttccctgtgtccctggcaacttccaccccaccccgtccctcctggatcctgctccctgtgtccctggcaccttccaccccgccccgtctctcctggatcctgctccctgtgtccctgactggctgtgccctgacccaggctcctgtgacctcctctctcccccatcccagcggctctgggctcactgccaggtgccccacttctcctggttccttgtggtttcccgccctgtgtccaatgcctgcctggtgccaccggaggggacactgctgtgctcctcgggtcatcctggggtcaaagtcatcttcccccctggggccactgaggagcctcgtcgagtctccatgcaggtggtgcgcatggctggccgagagctgcaggccctcctgggagaaccagaggctgcagtgagccccctgctgtgcctgtcacagagcggtccccccagcttcctccaaccggtcaccgtgcagctgcctctgccctctggcatcacaggcctcagtctggaccgctcccgcctgcacctgttgtactgggcccctcctgcagccacctgggatgacatcacagctcaggtggtcctggagctcacccacctgtacgcacgcttccaggtcacacacttctcctggtcagtgccccccagctttctcagcccccctcccccagtctgtacagccctcctcacccccagctctcccaggtactggctctggtacaccaccaagaactgtgtgggaggcctggctcggaaggcctgggagcggctgcggctgcaccgtgtgaacctcatcgctctgcagcggcgccgggaccctgagcaggtcctgctgcagtgcctgccccgaaacaaggtggacgccacccttcggcggctgctggagcggtaccggggccccgagccctctgacacggtggagatgttcgagggcgaagagttctttgcggccttcgagcgcggcatcgacgtggatgctgaccgccctgactgtgtggagggcagaatctgctttgtcttctactcgcacctgaagaatgtgaaggaggtgtccttctaccgtggcgcggtgcctgtgcgggtgcccgaggaggctgaggctgcccggcagaggaagggcgcagacgccctgtggatggccactctgcccatcaagctgccggtgggactgagggacagcagaggggcggggcaggaccgaggcccaggggtgaccagggtgacatggtggagttgggggtggagcccagggcttaatgcactttttccttccaacagagacttcgagggtccgaggggccacggcggggggctggcctctccttggcacccttgaatctgggagatgccgagaccggctttctgacgcagagcaacctgctgagtgtggctgggcgtctgggtctggactggccagccgtggccctgcacctgggggtgtcctaccgggaggtgcagcgcatccggcacgagttccggtgaggctcccactgcccgctggctgccagccccagggctgagccctggctgcctggagggcccacctgattctgacagaagtttcttccaggggaggtgggggaagggcaaacaccaggctggaaaggaaaggtctggccgcacctggccccaggagccgggaactcccccacactccgaggcagagtgtggtggggggtcctgggcaggtggacaggacccctctgtcgcccatcctctgcctgcagggatgatctggatgagcagatccgtcacatgctcttctcctgggctgagcgccaggctgggcagccaggggctgtggggctcctggtgcaggccctggagcagagtgaccggcaggacgtggctgaagaggtgcgcgcagtcttggagctcggccgccgcaagtaccaggacagcatccgacgcatgggcttggcccccaaggaccccgctctgcctggctcctcggctccacagcccccagagcctgcccaggcctaggccccacagacttttaggctggcccagatattccccagtggatgggcagagcccccaccttcaagtctctccagtgtgtggggacgggtccctgtgagcaacaaaactgcactgtttctttc

SEQ ID NO: 13213 - DNA, 2761 bp, Homo sapiens
tggggctgtggctgctcttcaccccaccgcaggcccggcgctgccgtgaagtggtggtcaggacccggaatgacaacagctggggtgacctggagacctacctggaggaagaggcaccccaggtgagggccacccaggcctgccggtggcgagtggagagctgctgccctgagccgtgcacctctgcccagagcctcaccctggcaccttccaccctgccccgtccctcctggatcctgcttccctatgtccctggcaccttccaccccaccccgtccctcctggatcctgcttccctgtgtccctggcaacttccaccccaccccgtccctcctggatcctgctccctgtgtccctggcaccttccaccccgccccgtctctcctggatcctgctccctgtgtccctgactggctgtgccctgacccaggctcctgtgacctcctctctcccccatcccagcggctctgggctcactgccaggtgccccacttctcctggttccttgtggtttcccgccctgtgtccaatgcctgcctggtgccaccggaggggacactgctgtgctcctcgggtcatcctggggtcaaagtcatcttcccccctggggccactgaggagcctcgtcgagtctccatgcaggtatggccaggacagcactgagggtggcaggccgcgcctcagcccacaggcaggtgctcagggggcctgtctgccccaggtggtgcgcatggctggccgagagctgcaggccctcctgggagaaccagaggctgcagtgagccccctgctgtgcctgtcacagagcggtccccccagcttcctccaaccggtcaccgtgcagctgcctctgccctctggcatcacaggtgagaggcagccatggggcatacctggacctgtggccatagggtggagggggtctccggccaggaggcctcagctcgctgcccctcccatccccaggcctcagtctggaccgctcccgcctgcacctgttgtactgggcccctcctgcagccacctgggatgacatcacagctcaggtggtcctggagctcacccacctgtacgcacgcttccaggtcacacacttctcctggtcagtgccccccagctttctcagcccccctcccccagtctgtacagccctcctcacccccagctctcccaggtactggctctggtacaccaccaagaactgtgtgggaggcctggctcggaaggcctgggagcggctgcggctgcaccgtgtgaacctcatcgctctgcagcggcgccgggaccctgagcaggtcctgctgcagtgcctgccccgaaacaaggtgggggcacgggccggagggcagcagggtggtgaccagagggctggggtggggtgcagagctttgggtcctgagctgcacgggcttccccgcaggtggacgccacccttcggcggctgctggagcggtaccggggccccgagccctctgacacggtggagatgttcgagggcgaagagttctttgcggccttcgagcgcggcatcgacgtggatgctggtagggatgctggtggatgctccctgccctggagggggagccttaccgtcctccccgagccctccttgctcagcccacccctgtcccctagaccgccctgactgtgtggagggcagaatctgctttgtcttctactcgcacctgaagaatgtgaaggaggtatacgtgaccaccactctggaccgggaggctcaggctgtgcggggccaggtgggcgaggggagtgggtgaggggagaggccccccaggccgcttgggcagaggaccgaactccgaaccccattcgatgccccttcaggtgtccttctaccgtggcgcggtgcctgtgcgggtgcccgaggaggctgaggctgcccggcagaggaagggcgcagacgccctgtggatggccactctgcccatcaagctgccggtgggactgagggacagcagaggggcggggcaggaccgaggcccaggggtgaccagggtgacatggtggagttgggggtggagcccagggcttaatgcactttttccttccaacagagacttcgagggtccgaggggccacggcggggggctggcctctccttggcacccttgaatctgggagatgccgagaccggctttctgacgcagagcaacctgctgagtgtggctgggcgtctgggtctggactggccagccgtggccctgcacctgggggtgtcctaccgggaggtgcagcgcatccggcacgagttccggtgaggctcccactgcccgctggctgccagccccagggctgagccctggctgcctggagggcccacctgattctgacagaagtttcttccaggggaggtgggggaagggcaaacaccaggctggaaaggaaaggtctggccgcacctggccccaggagccgggaactcccccacactccgaggcagagtgtggtggggggtcctgggcaggtggacaggacccctctgtcgcccatcctctgcctgcagggatgatctggatgagcagatccgtcacatgctcttctcctgggctgagcgccaggctgggcagccaggggctgtggggctcctggtgcaggccctggagcagagtgaccggcaggacgtggctgaagaggtgcgcgcagtcttggagctcggccgccgcaagtaccaggacagcatccgacgcatgggcttggcccccaaggaccccgctctgcctggctcctcggctccacagccccc

SEQ ID NO: 13214 - DNA, 481 bp, Homo sapiens
tggggctgtggctgctcttcaccccaccgcaggcccggcgctgccgtgaagtggtggtcaggacccggaatgacaacagctggggtgacctggagacctacctggaggaagaggcaccccagcggctctgggctcactgccaggtgccccacttctcctggttccttgtggtttcccgccctgtgtccaatgcctgcctggtgccaccggaggggacactgctgtgctcctcgggtcatcctggggtcaaagtcatcttcccccctggggccactgaggagcctcgtcgagtctccatgcaggtggtgcgcatggctggccgagagctgcaggccctggagcagagtgaccggcaggacgtggctgaagaggtgcgcgcagtcttggagctcggccgccgcaagtaccaggacagcatccgacgcatgggcttggcccccaaggaccccgctctgcctggctcctcggctccacagccccc

SEQ ID NO: 13215 - DNA, 827 bp, Homo sapiens
cactggccccacgggagggtccctgaagcctgcctgtcttctgcaggggcctctgcacccacaggcttggtccacagctgcctcttggttgtccctccacctccctggcctttgagactccctcagtggctttgtcagagttctctgagcccagctgtggaggagagtctgaaacagctgctctgggaggcggcagcaggagtgtcccagcgccgtgggctgggctggtgccaagcctaagccagcaactgcccgcagcgggacttcggtccttgcggctccttgtcctgcacagcaacctcctggcctctgtgccagctgacttggcccgccttccactcctcacccggctcgacctgagggacaaccagctccgggacctgccccctgagctgctagacgccccctttgtgcgcctgcaggggaaccccctgggtgaggcctcgccagacgccccgagttcaccaggtaggcttggtgctagaaggggcagacctgggataggacatgagtctcctcactgtcctgagcacatgtctgtcccctgcacagtggcagccctcattccagaaatgcccagactgttcctgacctcagatttggacaggtatggggtgggttgagggggctggaggggagtctgtctgcctgtcactctggcccctccgacaccttctccagagttcctgggtccaggctccaacacgtaggcccttctgggtctaacctgttgctcgctccttcctcactcagctttcctgtgacccctcaaggctgctcagtgaccctggcctgtggcgtccgcctgcagttcccagcgggagcca

SEQ ID NO: 13216 - DNA, 577 bp, Homo sapiens
cactggccccacgggagggtccctgaagcctgcctgtcttctgcaggggcctctgcacccacaggcttggtccacagctgcctcttggttgtccctccacctccctggcctttgagactccctcagtggctttgtcagagttctctgagcccagctgtggaggagagtctgaaacagctgctctgggaggcggcagcaggagtgtcccagcgccgtgggctgggctggtgccaagcctaagccagcaactgcccgcagcgggacttcggtccttgcggctccttgtcctgcacagcaacctcctggcctctgtgccagctgacttggcccgccttccactcctcacccggctcgacctgagggacaaccagctccgggacctgccccctgagctgctagacgccccctttgtgcgcctgcaggggaaccccctgggtgaggcctcgccagacgccccgagttcaccagtggcagccctcattccagaaatgcccagactgttcctgacctcagatttggacaggctgctcagtgaccctggcctgtggcgtccgcctgcagttcccagcgggagcca

SEQ ID NO: 13217 - DNA, 3977 bp, Homo sapiens
gctcttatagcgtggggcgaagggccaccgaaactcgtgggggcgttggacgaagcgagtccaaagggacggcatctgccttcggtacctagcacccccagcatgccacgcggcgcctacagctcccaacatggagcgcggccgccacgcccgggactcaacctttgccagcgaactgcaagtcccatggtgcaccgctgccggaagtggcctgcgccgcgggcctacccggaacggcgcgtgggcccgggcagaagctgctggcggtaggctcgccttgactccttggtggttccctggccgcggcgaccggtggtcccacgtccagccgggctcagtgaggtgagccagccgcctcggacttagcgactgcggccctatctgggaggccgcccccgcactgcggtgtcagggcatcctgtcagaggacgagcgcgggccttggagggcaggacaatgacgtgaggcagcgtcgcccgctcacccctgcgaggagtgaggtctgagtggtcagcccctgcgctggccgctttggcccggaactgacctcggtgtccatgtggacatcagcacctcagggaccccgctacattctcgggtcctgggagggaacagggttggccctgcctcctaaggacttgagttcttgtgcgaggacgcaggaggtgaatagggaggcgatccgaaggacagggacagagggagacttggtcctctgggcagcctgagaaagcttgagctgagagatgagaaggagccatccctgccaatatcccgggcgagcaccaggaacagggtcagatgcaggtatctaccgtgttagcaggcagcgccagctcccgttgggctctaacagcagtgcaaaccctggggtgtgtatacgtcaagcactggaactcgacttcacagtcgccttctgtggcctcgttatcattacccccattttatagatgaggcagttgggtacagaaaggtttttttgctcagggtcacacatctggggtaaaggcgggaaaccatcttgggaacaatgggacttttcttattttgtaatttttgagactgggccccattctgtcgcccagcctggagtgcagtggctcgatcacagctcgctgcagcctcaacttcctgggctcaggtgatcctcccacctcagcctcctagcggagaccacaggcgtgtgccaccacacccggctaaaattttttggtagagacagcgttgtccaacatgggctcaagcgatcctcccacctgggcctcccaaagtgctgggattacaggcgtgagctaccgcgcccggccccaacttttttttttctttttttctgaggagtcccactgttccccaggttggagtgcactggtgagatcttggctcactgcaacctctgcctcctgggttcaagcgattctcctgcctcagtctcctgagtagctgggattacaggcacccactaccatgcccggctaatttttgtatttttagtacagacggggtttcaccatgttggccaggctggtctcaaactcctgacttcaagtgatcttcccacttccgcctcccaaagtgctgggattacaggcacgagccactgtgcccagccccatctcactttttttttattatcccaaacaaactctgtacctattaaagtccctattccctgctcccccacccttgataaacacattctactttctcttcctatgattttgacaactgtagcaccccgtaagactgaaataatacagtattttgccttttgtgtctggcttttttcattcagtgtattttcagatttcaagtacctacctaaaaggtagatgctaagacaaatttaatataaatacagagtagtttatgtgggccaggcttgaggattgcgtcctgggaacatagattcaagttgccctgaatttacactttgaggagcagcagttataagtggattctatttatttatttatttttgagactgagtcttgctctgccgcccaggctggagtgcagtcgcgtgatcttggctcactgcaacctctgcctcccaggttcatgccactctcctgcttcagcctcccaagtagctgggactacaggcgcctgctaccgcgcccggctaagtttttgtgtttttagtggagacggggtttcaccgtgttagccaagatggtctcgatctcctgacctcgtgatctaccctcctcggcctcccaaagtgctgggattagaggcgtgagccaccacgcccggcctatttttttatttttttgagacggagtattgctctgtagcccaggctggagtgcagtggcgcaatctcagctcactgcaagctccgcctcccgggttcacaccattctcctgcctcagcctcccgagtagctgggactacaggcgcccgccaccacgcccagctaattttttagtagagacagggtttcaccttgttagccaggatggtctcgatctcctgacctgatccacccgcctcggcctcccaaagtgctggaattacagatgcgagccacagcgcccagcctgtttttttttttttttttgagagggagtctcactctcacccaagctggagtgcagtgccgagatctcagctcaccgcaacctccgcctcccgcgttcaagccattctcgtgcctcagcctccccagtagctgggattacaggcgcctgccaccacacctgggtaatttttgtatttttaatagacacacggtttcaccatattggccagactgggcttgaactcctgacctcaagtgatgcgcccacctcagcctcacaaaatgttgggattactggcgtaagccacagcatcaggcctgtggttggtttttaaaaagatctcttggccgggtgcggtggctcaaacctgtaatcccagcactttgggaggccgaggcgggtggatcacgaggtcaggagttcgagaacatcctaggtaacacggtgaaaccccgtctctactaaaaatacaaaaaaattagccgggcgtggtggtgggcgcctgtagtcccagctactcaggaggctgaggcaggagaacggtgtgaaccctggaggtggagcttgcagtgagccgagatcacgccactgcactccagcctctgggacacagccagactccatctcaaagaaaaaaaaaaaaaagatccctccaggccctacatggaaggggctggggtgaatggaagcagggaggcctggaagagacctgcctgtcccagagggagggatggtggtagctgggaaatggaaggaagaaggagccgccgatatgacctcaggaaagaagcaggcatagctggtggtgtctgttccctccctaaacacctgctctcctgggcgaggaagctggtgaataaagcacaggcccgctcgggggtatcatgttggtggggaaggaggagccgctgatatgacctcaggaaagaagcaggcatagctggtggtgtctgttccctccctaagtacctgttctcctgggcgaggaagctggtgaataaagcacaggcccgctcgggggtatcatgttggtggggaaggcggacagggcagatttcaggttcttggctttgaccctcaccagctacagggcctcgggcaatatctgattttttttttttttttttttcagacggagtcttgctctgtctcccaggctggagtgcagtggcaccatctcggctcactacaacctccgcctcccgggttcacgccattcttctgcctcagcctcctgagtagctgggactacaggcgcgcatcaccacgcccggctaatttttgtatttttagtagagacggggtttcaccatgttggccaggctggtctcaaactcctgacctcgtgatccacccgcctcggcctcccaaagtgctgggattacaggcgtcagccaccgcgcccgctcaatattttatctcttaacgcctccttctcccctgcgcgattg

SEQ ID NO: 13218 - DNA, 661 bp, Homo sapiens
gctcttatagcgtggggcgaagggccaccgaaactcgtgggggcgttggacgaagcgagtccaaagggacggcatctgccttcggtacctagcacccccagcatgccacgcggcgcctacagctcccaacatggagcgcggccgccacgcccgggactcaacctttgccagcgaactgcaagtcccatggtgcaccgctgccggaagtggcctgcgccgcgggcctacccggaacggcgcgtgggcccgggcagaagctgctggcggtaggctcgccttgactccttggtggttccctggccgcggcgaccggtggtcccacgtccagccgggctcagtgagacggagtcttgctctgtctcccaggctggagtgcagtggcaccatctcggctcactacaacctccgcctcccgggttcacgccattcttctgcctcagcctcctgagtagctgggactacaggcgcgcatcaccacgcccggctaatttttgtatttttagtagagacggggtttcaccatgttggccaggctggtctcaaactcctgacctcgtgatccacccgcctcggcctcccaaagtgctgggattacaggcgtcagccaccgcgcccgctcaatattttatctcttaacgcctccttctcccctgcgcgattg

SEQ ID NO: 13219 - DNA, 3566 bp, Homo sapiens
acgccccctttgtgcgcctgcaggggaaccccctgggtgaggcctcgccagacgccccgagttcaccaggtaggcttggtgctagaaggggcagacctgggataggacatgagtctcctcactgtcctgagcacatgtctgtcccctgcacagtggcagccctcattccagaaatgcccagactgttcctgacctcagatttggacaggtatggggtgggttgagggggctggaggggagtctgtctgcctgtcactctggcccctccgacaccttctccagagttcctgggtccaggctccaacacgtaggcccttctgggtctaacctgttgctcgctccttcctcactcagctttcctgtgacccctcaaggctgctcagtgaccctggcctgtggcgtccgcctgcagttcccagcgggagccaccgccacccccatcaccatccgctatcggctgctgctgccggagccaggcctcgtccccctgggtcctcatgacgccctgctcagccatgtgctggagctgcagccccatggggtggccttccagcaggcatggacagggcgtggcgggggcagtgtgtgggccagggcatggcaggggcagtgtgcgggcccgggcatggctccagtgctcacaccatccttgtctggcaggatgtggggctgtggctgctcttcaccccaccgcaggcccggcgctgccgtgaagtggtggtcaggacccggaatgacaacagctggggtgacctggagacctacctggaggaagaggcaccccaggtgagggccacccaggcctgccggtggcgagtggagagctgctgccctgagccgtgcacctctgcccagagcctcaccctggcaccttccaccctgccccgtccctcctggatcctgcttccctatgtccctggcaccttccaccccaccccgtccctcctggatcctgcttccctgtgtccctggcaacttccaccccaccccgtccctcctggatcctgctccctgtgtccctggcaccttccaccccgccccgtctctcctggatcctgctccctgtgtccctgactggctgtgccctgacccaggctcctgtgacctcctctctcccccatcccagcggctctgggctcactgccaggtgccccacttctcctggttccttgtggtttcccgccctgtgtccaatgcctgcctggtgccaccggaggggacactgctgtgctcctcgggtcatcctggggtcaaagtcatcttcccccctggggccactgaggagcctcgtcgagtctccatgcaggtatggccaggacagcactgagggtggcaggccgcgcctcagcccacaggcaggtgctcagggggcctgtctgccccaggtggtgcgcatggctggccgagagctgcaggccctcctgggagaaccagaggctgcagtgagccccctgctgtgcctgtcacagagcggtccccccagcttcctccaaccggtcaccgtgcagctgcctctgccctctggcatcacaggtgagaggcagccatggggcatacctggacctgtggccatagggtggagggggtctccggccaggaggcctcagctcgctgcccctcccatccccaggcctcagtctggaccgctcccgcctgcacctgttgtactgggcccctcctgcagccacctgggatgacatcacagctcaggtggtcctggagctcacccacctgtacgcacgcttccaggtcacacacttctcctggtcagtgccccccagctttctcagcccccctcccccagtctgtacagccctcctcacccccagctctcccaggtactggctctggtacaccaccaagaactgtgtgggaggcctggctcggaaggcctgggagcggctgcggctgcaccgtgtgaacctcatcgctctgcagcggcgccgggaccctgagcaggtcctgctgcagtgcctgccccgaaacaaggtgggggcacgggccggagggcagcagggtggtgaccagagggctggggtggggtgcagagctttgggtcctgagctgcacgggcttccccgcaggtggacgccacccttcggcggctgctggagcggtaccggggccccgagccctctgacacggtggagatgttcgagggcgaagagttctttgcggccttcgagcgcggcatcgacgtggatgctggtagggatgctggtggatgctccctgccctggagggggagccttaccgtcctccccgagccctccttgctcagcccacccctgtcccctagaccgccctgactgtgtggagggcagaatctgctttgtcttctactcgcacctgaagaatgtgaaggaggtatacgtgaccaccactctggaccgggaggctcaggctgtgcggggccaggtgggcgaggggagtgggtgaggggagaggccccccaggccgcttgggcagaggaccgaactccgaaccccattcgatgccccttcaggtgtccttctaccgtggcgcggtgcctgtgcgggtgcccgaggaggctgaggctgcccggcagaggaagggcgcagacgccctgtggatggccactctgcccatcaagctgccggtgggactgagggacagcagaggggcggggcaggaccgaggcccaggggtgaccagggtgacatggtggagttgggggtggagcccagggcttaatgcactttttccttccaacagagacttcgagggtccgaggggccacggcggggggctggcctctccttggcacccttgaatctgggagatgccgagaccggctttctgacgcagagcaacctgctgagtgtggctgggcgtctgggtctggactggccagccgtggccctgcacctgggggtgtcctaccgggaggtgcagcgcatccggcacgagttccggtgaggctcccactgcccgctggctgccagccccagggctgagccctggctgcctggagggcccacctgattctgacagaagtttcttccaggggaggtgggggaagggcaaacaccaggctggaaaggaaaggtctggccgcacctggccccaggagccgggaactcccccacactccgaggcagagtgtggtggggggtcctgggcaggtggacaggacccctctgtcgcccatcctctgcctgcagggatgatctggatgagcagatccgtcacatgctcttctcctgggctgagcgccaggctgggcagccaggggctgtggggctcctggtgcaggccctggagcagagtgaccggcaggacgtggctgaagaggtgcgcgcagtcttggagctcggccgccgcaagtaccaggacagcatccgacgcatgggcttggcccccaaggaccccgctctgcctggctcctcggctccacagcccccagagcctgcccaggcctaggccccacagacttttaggctggcccagatattccccagtggatgggcagagcccccaccttcaagtctctccagtgtgtggggacgggtccctgtgagcaacaaaactgcactgtttctttc

SEQ ID NO: 13220 - DNA, 1937 bp, Homo sapiens
acgccccctttgtgcgcctgcaggggaaccccctgggtgaggcctcgccagacgccccgagttcaccagtggcagccctcattccagaaatgcccagactgttcctgacctcagatttggacagctttcctgtgacccctcaaggctgctcagtgaccctggcctgtggcgtccgcctgcagttcccagcgggagccaccgccacccccatcaccatccgctatcggctgctgctgccggagccaggcctcgtccccctgggtcctcatgacgccctgctcagccatgtgctggagctgcagccccatggggtggccttccagcaggatgtggggctgtggctgctcttcaccccaccgcaggcccggcgctgccgtgaagtggtggtcaggacccggaatgacaacagctggggtgacctggagacctacctggaggaagaggcaccccagcggctctgggctcactgccaggtgccccacttctcctggttccttgtggtttcccgccctgtgtccaatgcctgcctggtgccaccggaggggacactgctgtgctcctcgggtcatcctggggtcaaagtcatcttcccccctggggccactgaggagcctcgtcgagtctccatgcaggtggtgcgcatggctggccgagagctgcaggccctcctgggagaaccagaggctgcagtgagccccctgctgtgcctgtcacagagcggtccccccagcttcctccaaccggtcaccgtgcagctgcctctgccctctggcatcacaggcctcagtctggaccgctcccgcctgcacctgttgtactgggcccctcctgcagccacctgggatgacatcacagctcaggtggtcctggagctcacccacctgtacgcacgcttccaggtactggctctggtacaccaccaagaactgtgtgggaggcctggctcggaaggcctgggagcggctgcggctgcaccgtgtgaacctcatcgctctgcagcggcgccgggaccctgagcaggtcctgctgcagtgcctgccccgaaacaaggtggacgccacccttcggcggctgctggagcggtaccggggccccgagccctctgacacggtggagatgttcgagggcgaagagttctttgcggccttcgagcgcggcatcgacgtggatgctgaccgccctgactgtgtggagggcagaatctgctttgtcttctactcgcacctgaagaatgtgaaggaggtgtccttctaccgtggcgcggtgcctgtgcgggtgcccgaggaggctgaggctgcccggcagaggaagggcgcagacgccctgtggatggccactctgcccatcaagctgccgagacttcgagggtccgaggggccacggcggggggctggcctctccttggcacccttgaatctgggagatgccgagaccggctttctgacgcagagcaacctgctgagtgtggctgggcgtctgggtctggactggccagccgtggccctgcacctgggggtgtcctaccgggaggtgcagcgcatccggcacgagttccgggatgatctggatgagcagatccgtcacatgctcttctcctgggctgagcgccaggctgggcagccaggggctgtggggctcctggtgcaggccctggagcagagtgaccggcaggacgtggctgaagaggtgcgcgcagtcttggagctcggccgccgcaagtaccaggacagcatccgacgcatgggcttggcccccaaggaccccgctctgcctggctcctcggctccacagcccccagagcctgcccaggcctaggccccacagacttttaggctggcccagatattccccagtggatgggcagagcccccaccttcaagtctctccagtgtgtggggacgggtccctgtgagcaacaaaactgcactgtttctttc

SEQ ID NO: 13221 - DNA, 10315 bp, Homo sapiens
aagctgctggcggtaggctcgccttgactccttggtggttccctggccgcggcgaccggtggtcccacgtccagccgggctcagtgaggtgagccagccgcctcggacttagcgactgcggccctatctgggaggccgcccccgcactgcggtgtcagggcatcctgtcagaggacgagcgcgggccttggagggcaggacaatgacgtgaggcagcgtcgcccgctcacccctgcgaggagtgaggtctgagtggtcagcccctgcgctggccgctttggcccggaactgacctcggtgtccatgtggacatcagcacctcagggaccccgctacattctcgggtcctgggagggaacagggttggccctgcctcctaaggacttgagttcttgtgcgaggacgcaggaggtgaatagggaggcgatccgaaggacagggacagagggagacttggtcctctgggcagcctgagaaagcttgagctgagagatgagaaggagccatccctgccaatatcccgggcgagcaccaggaacagggtcagatgcaggtatctaccgtgttagcaggcagcgccagctcccgttgggctctaacagcagtgcaaaccctggggtgtgtatacgtcaagcactggaactcgacttcacagtcgccttctgtggcctcgttatcattacccccattttatagatgaggcagttgggtacagaaaggtttttttgctcagggtcacacatctggggtaaaggcgggaaaccatcttgggaacaatgggacttttcttattttgtaatttttgagactgggccccattctgtcgcccagcctggagtgcagtggctcgatcacagctcgctgcagcctcaacttcctgggctcaggtgatcctcccacctcagcctcctagcggagaccacaggcgtgtgccaccacacccggctaaaattttttggtagagacagcgttgtccaacatgggctcaagcgatcctcccacctgggcctcccaaagtgctgggattacaggcgtgagctaccgcgcccggccccaacttttttttttctttttttctgaggagtcccactgttccccaggttggagtgcactggtgagatcttggctcactgcaacctctgcctcctgggttcaagcgattctcctgcctcagtctcctgagtagctgggattacaggcacccactaccatgcccggctaatttttgtatttttagtacagacggggtttcaccatgttggccaggctggtctcaaactcctgacttcaagtgatcttcccacttccgcctcccaaagtgctgggattacaggcacgagccactgtgcccagccccatctcactttttttttattatcccaaacaaactctgtacctattaaagtccctattccctgctcccccacccttgataaacacattctactttctcttcctatgattttgacaactgtagcaccccgtaagactgaaataatacagtattttgccttttgtgtctggcttttttcattcagtgtattttcagatttcaagtacctacctaaaaggtagatgctaagacaaatttaatataaatacagagtagtttatgtgggccaggcttgaggattgcgtcctgggaacatagattcaagttgccctgaatttacactttgaggagcagcagttataagtggattctatttatttatttatttttgagactgagtcttgctctgccgcccaggctggagtgcagtcgcgtgatcttggctcactgcaacctctgcctcccaggttcatgccactctcctgcttcagcctcccaagtagctgggactacaggcgcctgctaccgcgcccggctaagtttttgtgtttttagtggagacggggtttcaccgtgttagccaagatggtctcgatctcctgacctcgtgatctaccctcctcggcctcccaaagtgctgggattagaggcgtgagccaccacgcccggcctatttttttatttttttgagacggagtattgctctgtagcccaggctggagtgcagtggcgcaatctcagctcactgcaagctccgcctcccgggttcacaccattctcctgcctcagcctcccgagtagctgggactacaggcgcccgccaccacgcccagctaattttttagtagagacagggtttcaccttgttagccaggatggtctcgatctcctgacctgatccacccgcctcggcctcccaaagtgctggaattacagatgcgagccacagcgcccagcctgtttttttttttttttttgagagggagtctcactctcacccaagctggagtgcagtgccgagatctcagctcaccgcaacctccgcctcccgcgttcaagccattctcgtgcctcagcctccccagtagctgggattacaggcgcctgccaccacacctgggtaatttttgtatttttaatagacacacggtttcaccatattggccagactgggcttgaactcctgacctcaagtgatgcgcccacctcagcctcacaaaatgttgggattactggcgtaagccacagcatcaggcctgtggttggtttttaaaaagatctcttggccgggtgcggtggctcaaacctgtaatcccagcactttgggaggccgaggcgggtggatcacgaggtcaggagttcgagaacatcctaggtaacacggtgaaaccccgtctctactaaaaatacaaaaaaattagccgggcgtggtggtgggcgcctgtagtcccagctactcaggaggctgaggcaggagaacggtgtgaaccctggaggtggagcttgcagtgagccgagatcacgccactgcactccagcctctgggacacagccagactccatctcaaagaaaaaaaaaaaaaagatccctccaggccctacatggaaggggctggggtgaatggaagcagggaggcctggaagagacctgcctgtcccagagggagggatggtggtagctgggaaatggaaggaagaaggagccgccgatatgacctcaggaaagaagcaggcatagctggtggtgtctgttccctccctaaacacctgctctcctgggcgaggaagctggtgaataaagcacaggcccgctcgggggtatcatgttggtggggaaggaggagccgctgatatgacctcaggaaagaagcaggcatagctggtggtgtctgttccctccctaagtacctgttctcctgggcgaggaagctggtgaataaagcacaggcccgctcgggggtatcatgttggtggggaaggcggacagggcagatttcaggttcttggctttgaccctcaccagctacagggcctcgggcaatatctgattttttttttttttttttttcagacggagtcttgctctgtctcccaggctggagtgcagtggcaccatctcggctcactacaacctccgcctcccgggttcacgccattcttctgcctcagcctcctgagtagctgggactacaggcgcgcatcaccacgcccggctaatttttgtatttttagtagagacggggtttcaccatgttggccaggctggtctcaaactcctgacctcgtgatccacccgcctcggcctcccaaagtgctgggattacaggcgtcagccaccgcgcccgctcaatattttatctcttaacgcctccttctcccctgcgcgattgaaggagacagtgccaggaggctcactgcttctggcccagagtgatggctcgaaaggaagggtctttgcaggcccagagaggaggtcctggcaggcttcccggaggaggccgtttgggctggtttggaaaggacactgcaattgttccggcttgtagcaggggtgggtgcggggcagcggcaagagtacccccgtcaccccggcctgggaacgcacctggggccgggtctgcctcggagcggcccggggccccgagaacctcggaaagggcgggtttcgtggccttccgggcgggggaggctgtacggctccgaccccgcggactaacaggaagccgagcgctgctgcgcgggcggctcggcagatggacgggtcgcgtccgcgtctccggggctgcgacaggcggagggaaggcgggtcggggaggagccgggagacctcccccgtggaccccagcccggcggagggggcgcgtcccgagggggcggggcccaaggggcggggtctgcagtccccgcccacccagaaacgcgccggcgggatcccaggcgccgagcgcccgctgagcagccaccctttgcgcgccgcctgcagcgcaggtacgcgccggcctgggcgggcggagggggcggcggggacacgtttgcttttgggaggctgggggccgttcccatccccgacgcccgggggatcccgagcctgcctcggggctggggcccgccccccacgccgtctgagcggtgcgcggtgcaccaccctccccagtggaccgaactggaaaggccgggagaggtttcctccggggctcacgaattggggtcccggccccaggaccccgaagctgcccaatggctcacgccccaggccctcacccttacacggccttccctgactttcggggcgcagtcacccccgcggtaggggagggtcacggccttcctggtaaaacggatgtaaatagaagggggactcatctccaggactggggaacagcccctatgacctcgcagctccacggctccattggccagatttccaggaccaggactgaagcctcactaccccggctttgctgctcatagcgaggtctccctgcccggtgctcctgcgagccatggcggtcccattccccaaccctctttccagtggtgacccaggcctccggggttcagggtgaccacaaggtctcccccactctgcagcccaggcccagatggcctggctctagagctccccactccatccagagtccctgtttccccaaagagaagggcccaccccggctcccgctcactcctcctcctgcctctgcagcttccccgggcgctgcctggacaggcctgcctgcgtgctgggacatgtctggcctccaaggaccgtcggtgggcgatggctgcaacggtggaggggccagagctggaggcagctgctgccgcaggagatgcttcagaggattcggacgcagggtccagggcgctgcctttcctgggcggcaaccggctgagcttggacctgtaccccgggggctgccagcagctgctgcacctgtgtgtccagcagcctctgcagctgctgcaggtggaattcttgcgtctgagcactcacgaggaccctcagctgctggaggccaccctggcccagctgcctcagagcctgtcctgcctccgctccctggtcctcaaaggtgagttccacctgttctgggccctgtctccatctctcgctctgccctgcctctgctgcatgttctcaaaggcaaaccccagtcccagccccagctccaggccgcccctcccggctccccaggtgtgaactgttctgctcttggtcctgtccagccccatcgccatcctcggtgatcaccacccccagtgtggggctggctgggccctggctcctggaccctgacgctgcccagtgggggtctctccagaccacagtgcagatgttgttcctggggaaggttgtgggtgatggttgtcagctgagatgagccggtggtctccacccctgcctccttccatttgcgggcacctctccagtgtttctgtctgtctgtccctgtctggctggggtgggggtggggtgggaggtctgtgcctctcgagcagctgtttctctggctggcagggtcgatctgggacctcggaccctggctctgagggccacatccgcctccccccttcccaggagggcaacgccgggacacactgggtgcctgtctccggggtgccctgaccaacctgcccgctggtctgagtggcctggcccatctggcccacctggacctgagcttcaacagcctggagacactgccggcctgtgtcctgcagatgcgaggtctgggtgcgctcttgctgtctcacaactgcctctctgagctgcctgaggctctgggggccctccccgccctcaccttcctcacagtgacacacaaccgcctgcagacgctgcccccagcactgggggccctatccaccctgcagcgcctcgatctctctcagaatctgctggacacgctacctcctgagattggaggcctgggcagcctcctggagctcaacctggcctccaaccggctgcagagcctcccagcctctctgggtgagtagcccctgcgccccgacacactggccccacgggagggtccctgaagcctgcctgtcttctgcaggggcctctgcacccacaggcttggtccacagctgcctcttggttgtccctccacctccctggcctttgagactccctcagtggctttgtcagagttctctgagcccagctgtggaggagagtctgaaacagctgctctgggaggcggcagcaggagtgtcccagcgccgtgggctgggctggtgccaagcctaagccagcaactgcccgcagcgggacttcggtccttgcggctccttgtcctgcacagcaacctcctggcctctgtgccagctgacttggcccgccttccactcctcacccggctcgacctgagggacaaccagctccgggacctgccccctgagctgctagacgccccctttgtgcgcctgcaggggaaccccctgggtgaggcctcgccagacgccccgagttcaccaggtaggcttggtgctagaaggggcagacctgggataggacatgagtctcctcactgtcctgagcacatgtctgtcccctgcacagtggcagccctcattccagaaatgcccagactgttcctgacctcagatttggacaggtatggggtgggttgagggggctggaggggagtctgtctgcctgtcactctggcccctccgacaccttctccagagttcctgggtccaggctccaacacgtaggcccttctgggtctaacctgttgctcgctccttcctcactcagctttcctgtgacccctcaaggctgctcagtgaccctggcctgtggcgtccgcctgcagttcccagcgggagccaccgccacccccatcaccatccgctatcggctgctgctgccggagccaggcctcgtccccctgggtcctcatgacgccctgctcagccatgtgctggagctgcagccccatggggtggccttccagcaggcatggacagggcgtggcgggggcagtgtgtgggccagggcatggcaggggcagtgtgcgggcccgggcatggctccagtgctcacaccatccttgtctggcaggatgtggggctgtggctgctcttcaccccaccgcaggcccggcgctgccgtgaagtggtggtcaggacccggaatgacaacagctggggtgacctggagacctacctggaggaagaggcaccccaggtgagggccacccaggcctgccggtggcgagtggagagctgctgccctgagccgtgcacctctgcccagagcctcaccctggcaccttccaccctgccccgtccctcctggatcctgcttccctatgtccctggcaccttccaccccaccccgtccctcctggatcctgcttccctgtgtccctggcaacttccaccccaccccgtccctcctggatcctgctccctgtgtccctggcaccttccaccccgccccgtctctcctggatcctgctccctgtgtccctgactggctgtgccctgacccaggctcctgtgacctcctctctcccccatcccagcggctctgggctcactgccaggtgccccacttctcctggttccttgtggtttcccgccctgtgtccaatgcctgcctggtgccaccggaggggacactgctgtgctcctcgggtcatcctggggtcaaagtcatcttcccccctggggccactgaggagcctcgtcgagtctccatgcaggtatggccaggacagcactgagggtggcaggccgcgcctcagcccacaggcaggtgctcagggggcctgtctgccccaggtggtgcgcatggctggccgagagctgcaggccctcctgggagaaccagaggctgcagtgagccccctgctgtgcctgtcacagagcggtccccccagcttcctccaaccggtcaccgtgcagctgcctctgccctctggcatcacaggtgagaggcagccatggggcatacctggacctgtggccatagggtggagggggtctccggccaggaggcctcagctcgctgcccctcccatccccaggcctcagtctggaccgctcccgcctgcacctgttgtactgggcccctcctgcagccacctgggatgacatcacagctcaggtggtcctggagctcacccacctgtacgcacgcttccaggtcacacacttctcctggtcagtgccccccagctttctcagcccccctcccccagtctgtacagccctcctcacccccagctctcccaggtactggctctggtacaccaccaagaactgtgtgggaggcctggctcggaaggcctgggagcggctgcggctgcaccgtgtgaacctcatcgctctgcagcggcgccgggaccctgagcaggtcctgctgcagtgcctgccccgaaacaaggtgggggcacgggccggagggcagcagggtggtgaccagagggctggggtggggtgcagagctttgggtcctgagctgcacgggcttccccgcaggtggacgccacccttcggcggctgctggagcggtaccggggccccgagccctctgacacggtggagatgttcgagggcgaagagttctttgcggccttcgagcgcggcatcgacgtggatgctggtagggatgctggtggatgctccctgccctggagggggagccttaccgtcctccccgagccctccttgctcagcccacccctgtcccctagaccgccctgactgtgtggagggcagaatctgctttgtcttctactcgcacctgaagaatgtgaaggaggtatacgtgaccaccactctggaccgggaggctcaggctgtgcggggccaggtgggcgaggggagtgggtgaggggagaggccccccaggccgcttgggcagaggaccgaactccgaaccccattcgatgccccttcaggtgtccttctaccgtggcgcggtgcctgtgcgggtgcccgaggaggctgaggctgcccggcagaggaagggcgcagacgccctgtggatggccactctgcccatcaagctgccggtgggactgagggacagcagaggggcggggcaggaccgaggcccaggggtgaccagggtgacatggtggagttgggggtggagcccagggcttaatgcactttttccttccaacagagacttcgagggtccgaggggccacggcggggggctggcctctccttggcacccttgaatctgggagatgccgagaccggctttctgacgcagagcaacctgctgagtgtggctgggcgtctgggtctggactggccagccgtggccctgcacctgggggtgtcctaccgggaggtgcagcgcatccggcacgagttccggtgaggctcccactgcccgctggctgccagccccagggctgagccctggctgcctggagggcccacctgattctgacagaagtttcttccaggggaggtgggggaagggcaaacaccaggctggaaaggaaaggtctggccgcacctggccccaggagccgggaactcccccacactccgaggcagagtgtggtggggggtcctgggcaggtggacaggacccctctgtcgcccatcctctgcctgcagggatgatctggatgagcagatccgtcacatgctcttctcctgggctgagcgccaggctgggcagccaggggctgtggggctcctggtgcaggccctggagcagagtgaccggcaggacgtggctgaagaggtgcgcgcagtcttggagctcggccgccgcaagtaccaggacagcatccgacgcatgggcttggcccccaaggaccccgctctgcctggctcctcggctccacagcccccagagcctgcccaggcctaggccccacagacttttaggctggcccagatattccccagtggatgggcagagcccccaccttcaagtctctccagtgtgtggggacgggtccctgtgagcaacaaaactgcactgtttctttc

SEQ ID NO: 13222 - DNA, 3994 bp, Homo sapiens
aagctgctggcggtaggctcgccttgactccttggtggttccctggccgcggcgaccggtggtcccacgtccagccgggctcagtgagcttccccgggcgctgcctggacaggcctgcctgcgtgctgggacatgtctggcctccaaggaccgtcggtgggcgatggctgcaacggtggaggggccagagctggaggcagctgctgccgcaggagatgcttcagaggattcggacgcagggtccagggcgctgcctttcctgggcggcaaccggctgagcttggacctgtaccccgggggctgccagcagctgctgcacctgtgtgtccagcagcctctgcagctgctgcaggtggaattcttgcgtctgagcactcacgaggaccctcagctgctggaggccaccctggcccagctgcctcagagcctgtcctgcctccgctccctggtcctcaaaggtgagttccacctgttctgggccctgtctccatctctcgctctgccctgcctctgctgcatgttctcaaaggcaaaccccagtcccagccccagctccaggccgcccctcccggctccccaggtgtgaactgttctgctcttggtcctgtccagccccatcgccatcctcggtgatcaccacccccagtgtggggctggctgggccctggctcctggaccctgacgctgcccagtgggggtctctccagaccacagtgcagatgttgttcctggggaaggttgtgggtgatggttgtcagctgagatgagccggtggtctccacccctgcctccttccatttgcgggcacctctccagtgtttctgtctgtctgtccctgtctggctggggtgggggtggggtgggaggtctgtgcctctcgagcagctgtttctctggctggcagggtcgatctgggacctcggaccctggctctgagggccacatccgcctccccccttcccaggagggcaacgccgggacacactgggtgcctgtctccggggtgccctgaccaacctgcccgctggtctgagtggcctggcccatctggcccacctggacctgagcttcaacagcctggagacactgccggcctgtgtcctgcagatgcgaggtctgggtgcgctcttgctgtctcacaactgcctctctgagctgcctgaggctctgggggccctccccgccctcaccttcctcacagtgacacacaaccgcctgcagacgctgcccccagcactgggggccctatccaccctgcagcgcctcgatctctctcagaatctgctggacacgctacctcctgagattggaggcctgggcagcctcctggagctcaacctggcctccaaccggctgcagagcctcccagcctctctgggtgagtagcccctgcgccccgacacactggccccacgggagggtccctgaagcctgcctgtcttctgcaggggcctctgcacccacaggcttggtccacagctgcctcttggttgtccctccacctccctggcctttgagactccctcagtggctttgtcagagttctctgagcccagctgtggaggagagtctgaaacagctgctctgggaggcggcagcaggagtgtcccagcgccgtgggctgggctggtgccaagcctaagccagcaactgcccgcagcgggacttcggtccttgcggctccttgtcctgcacagcaacctcctggcctctgtgccagctgacttggcccgccttccactcctcacccggctcgacctgagggacaaccagctccgggacctgccccctgagctgctagacgccccctttgtgcgcctgcaggggaaccccctgggtgaggcctcgccagacgccccgagttcaccagtggcagccctcattccagaaatgcccagactgttcctgacctcagatttggacagctttcctgtgacccctcaaggctgctcagtgaccctggcctgtggcgtccgcctgcagttcccagcgggagccaccgccacccccatcaccatccgctatcggctgctgctgccggagccaggcctcgtccccctgggtcctcatgacgccctgctcagccatgtgctggagctgcagccccatggggtggccttccagcaggatgtggggctgtggctgctcttcaccccaccgcaggcccggcgctgccgtgaagtggtggtcaggacccggaatgacaacagctggggtgacctggagacctacctggaggaagaggcaccccagcggctctgggctcactgccaggtgccccacttctcctggttccttgtggtttcccgccctgtgtccaatgcctgcctggtgccaccggaggggacactgctgtgctcctcgggtcatcctggggtcaaagtcatcttcccccctggggccactgaggagcctcgtcgagtctccatgcaggtggtgcgcatggctggccgagagctgcaggccctcctgggagaaccagaggctgcagtgagccccctgctgtgcctgtcacagagcggtccccccagcttcctccaaccggtcaccgtgcagctgcctctgccctctggcatcacaggcctcagtctggaccgctcccgcctgcacctgttgtactgggcccctcctgcagccacctgggatgacatcacagctcaggtggtcctggagctcacccacctgtacgcacgcttccaggtcacacacttctcctggtcagtgccccccagctttctcagcccccctcccccagtctgtacagccctcctcacccccagctctcccaggtactggctctggtacaccaccaagaactgtgtgggaggcctggctcggaaggcctgggagcggctgcggctgcaccgtgtgaacctcatcgctctgcagcggcgccgggaccctgagcaggtcctgctgcagtgcctgccccgaaacaaggtggacgccacccttcggcggctgctggagcggtaccggggccccgagccctctgacacggtggagatgttcgagggcgaagagttctttgcggccttcgagcgcggcatcgacgtggatgctgaccgccctgactgtgtggagggcagaatctgctttgtcttctactcgcacctgaagaatgtgaaggaggtatacgtgaccaccactctggaccgggaggctcaggctgtgcggggccaggtgtccttctaccgtggcgcggtgcctgtgcgggtgcccgaggaggctgaggctgcccggcagaggaagggcgcagacgccctgtggatggccactctgcccatcaagctgccggtgggactgagggacagcagaggggcggggcaggaccgaggcccaggggtgaccagggtgacatggtggagttgggggtggagcccagggcttaatgcactttttccttccaacagagacttcgagggtccgaggggccacggcggggggctggcctctccttggcacccttgaatctgggagatgccgagaccggctttctgacgcagagcaacctgctgagtgtggctgggcgtctgggtctggactggccagccgtggccctgcacctgggggtgtcctaccgggaggtgcagcgcatccggcacgagttccgggatgatctggatgagcagatccgtcacatgctcttctcctgggctgagcgccaggctgggcagccaggggctgtggggctcctggtgcaggccctggagcagagtgaccggcaggacgtggctgaagaggtgcgcgcagtcttggagctcggccgccgcaagtaccaggacagcatccgacgcatgggcttggcccccaaggaccccgctctgcctggctcctcggctccacagcccccagagcctgcccaggcctaggccccacagacttttaggctggcccagatattccccagtggatgggcagagcccccaccttcaagtctctccagtgtgtggggacgggtccctgtgagcaacaaaactgcactgtttctttc

SEQ ID NO: 13223 - DNA, 6148 bp, Homo sapiens
ggaacggcgcgtgggcccgggcagaagctgctggcggtaggctcgccttgactccttggtggttccctggccgcggcgaccggtggtcccacgtccagccgggctcagtgaggtgagccagccgcctcggacttagcgactgcggccctatctgggaggccgcccccgcactgcggtgtcagggcatcctgtcagaggacgagcgcgggccttggagggcaggacaatgacgtgaggcagcgtcgcccgctcacccctgcgaggagtgaggtctgagtggtcagcccctgcgctggccgctttggcccggaactgacctcggtgtccatgtggacatcagcacctcagggaccccgctacattctcgggtcctgggagggaacagggttggccctgcctcctaaggacttgagttcttgtgcgaggacgcaggaggtgaatagggaggcgatccgaaggacagggacagagggagacttggtcctctgggcagcctgagaaagcttgagctgagagatgagaaggagccatccctgccaatatcccgggcgagcaccaggaacagggtcagatgcaggtatctaccgtgttagcaggcagcgccagctcccgttgggctctaacagcagtgcaaaccctggggtgtgtatacgtcaagcactggaactcgacttcacagtcgccttctgtggcctcgttatcattacccccattttatagatgaggcagttgggtacagaaaggtttttttgctcagggtcacacatctggggtaaaggcgggaaaccatcttgggaacaatgggacttttcttattttgtaatttttgagactgggccccattctgtcgcccagcctggagtgcagtggctcgatcacagctcgctgcagcctcaacttcctgggctcaggtgatcctcccacctcagcctcctagcggagaccacaggcgtgtgccaccacacccggctaaaattttttggtagagacagcgttgtccaacatgggctcaagcgatcctcccacctgggcctcccaaagtgctgggattacaggcgtgagctaccgcgcccggccccaacttttttttttctttttttctgaggagtcccactgttccccaggttggagtgcactggtgagatcttggctcactgcaacctctgcctcctgggttcaagcgattctcctgcctcagtctcctgagtagctgggattacaggcacccactaccatgcccggctaatttttgtatttttagtacagacggggtttcaccatgttggccaggctggtctcaaactcctgacttcaagtgatcttcccacttccgcctcccaaagtgctgggattacaggcacgagccactgtgcccagccccatctcactttttttttattatcccaaacaaactctgtacctattaaagtccctattccctgctcccccacccttgataaacacattctactttctcttcctatgattttgacaactgtagcaccccgtaagactgaaataatacagtattttgccttttgtgtctggcttttttcattcagtgtattttcagatttcaagtacctacctaaaaggtagatgctaagacaaatttaatataaatacagagtagtttatgtgggccaggcttgaggattgcgtcctgggaacatagattcaagttgccctgaatttacactttgaggagcagcagttataagtggattctatttatttatttatttttgagactgagtcttgctctgccgcccaggctggagtgcagtcgcgtgatcttggctcactgcaacctctgcctcccaggttcatgccactctcctgcttcagcctcccaagtagctgggactacaggcgcctgctaccgcgcccggctaagtttttgtgtttttagtggagacggggtttcaccgtgttagccaagatggtctcgatctcctgacctcgtgatctaccctcctcggcctcccaaagtgctgggattagaggcgtgagccaccacgcccggcctatttttttatttttttgagacggagtattgctctgtagcccaggctggagtgcagtggcgcaatctcagctcactgcaagctccgcctcccgggttcacaccattctcctgcctcagcctcccgagtagctgggactacaggcgcccgccaccacgcccagctaattttttagtagagacagggtttcaccttgttagccaggatggtctcgatctcctgacctgatccacccgcctcggcctcccaaagtgctggaattacagatgcgagccacagcgcccagcctgtttttttttttttttttgagagggagtctcactctcacccaagctggagtgcagtgccgagatctcagctcaccgcaacctccgcctcccgcgttcaagccattctcgtgcctcagcctccccagtagctgggattacaggcgcctgccaccacacctgggtaatttttgtatttttaatagacacacggtttcaccatattggccagactgggcttgaactcctgacctcaagtgatgcgcccacctcagcctcacaaaatgttgggattactggcgtaagccacagcatcaggcctgtggttggtttttaaaaagatctcttggccgggtgcggtggctcaaacctgtaatcccagcactttgggaggccgaggcgggtggatcacgaggtcaggagttcgagaacatcctaggtaacacggtgaaaccccgtctctactaaaaatacaaaaaaattagccgggcgtggtggtgggcgcctgtagtcccagctactcaggaggctgaggcaggagaacggtgtgaaccctggaggtggagcttgcagtgagccgagatcacgccactgcactccagcctctgggacacagccagactccatctcaaagaaaaaaaaaaaaaagatccctccaggccctacatggaaggggctggggtgaatggaagcagggaggcctggaagagacctgcctgtcccagagggagggatggtggtagctgggaaatggaaggaagaaggagccgccgatatgacctcaggaaagaagcaggcatagctggtggtgtctgttccctccctaaacacctgctctcctgggcgaggaagctggtgaataaagcacaggcccgctcgggggtatcatgttggtggggaaggaggagccgctgatatgacctcaggaaagaagcaggcatagctggtggtgtctgttccctccctaagtacctgttctcctgggcgaggaagctggtgaataaagcacaggcccgctcgggggtatcatgttggtggggaaggcggacagggcagatttcaggttcttggctttgaccctcaccagctacagggcctcgggcaatatctgattttttttttttttttttttcagacggagtcttgctctgtctcccaggctggagtgcagtggcaccatctcggctcactacaacctccgcctcccgggttcacgccattcttctgcctcagcctcctgagtagctgggactacaggcgcgcatcaccacgcccggctaatttttgtatttttagtagagacggggtttcaccatgttggccaggctggtctcaaactcctgacctcgtgatccacccgcctcggcctcccaaagtgctgggattacaggcgtcagccaccgcgcccgctcaatattttatctcttaacgcctccttctcccctgcgcgattgaaggagacagtgccaggaggctcactgcttctggcccagagtgatggctcgaaaggaagggtctttgcaggcccagagaggaggtcctggcaggcttcccggaggaggccgtttgggctggtttggaaaggacactgcaattgttccggcttgtagcaggggtgggtgcggggcagcggcaagagtacccccgtcaccccggcctgggaacgcacctggggccgggtctgcctcggagcggcccggggccccgagaacctcggaaagggcgggtttcgtggccttccgggcgggggaggctgtacggctccgaccccgcggactaacaggaagccgagcgctgctgcgcgggcggctcggcagatggacgggtcgcgtccgcgtctccggggctgcgacaggcggagggaaggcgggtcggggaggagccgggagacctcccccgtggaccccagcccggcggagggggcgcgtcccgagggggcggggcccaaggggcggggtctgcagtccccgcccacccagaaacgcgccggcgggatcccaggcgccgagcgcccgctgagcagccaccctttgcgcgccgcctgcagcgcaggtacgcgccggcctgggcgggcggagggggcggcggggacacgtttgcttttgggaggctgggggccgttcccatccccgacgcccgggggatcccgagcctgcctcggggctggggcccgccccccacgccgtctgagcggtgcgcggtgcaccaccctccccagtggaccgaactggaaaggccgggagaggtttcctccggggctcacgaattggggtcccggccccaggaccccgaagctgcccaatggctcacgccccaggccctcacccttacacggccttccctgactttcggggcgcagtcacccccgcggtaggggagggtcacggccttcctggtaaaacggatgtaaatagaagggggactcatctccaggactggggaacagcccctatgacctcgcagctccacggctccattggccagatttccaggaccaggactgaagcctcactaccccggctttgctgctcatagcgaggtctccctgcccggtgctcctgcgagccatggcggtcccattccccaaccctctttccagtggtgacccaggcctccggggttcagggtgaccacaaggtctcccccactctgcagcccaggcccagatggcctggctctagagctccccactccatccagagtccctgtttccccaaagagaagggcccaccccggctcccgctcactcctcctcctgcctctgcagcttccccgggcgctgcctggacaggcctgcctgcgtgctgggacatgtctggcctccaaggaccgtcggtgggcgatggctgcaacggtggaggggccagagctggaggcagctgctgccgcaggagatgcttcagaggattcggacgcagggtccagggcgctgcctttcctgggcggcaaccggctgagcttggacctgtaccccgggggctgccagcagctgctgcacctgtgtgtccagcagcctctgcagctgctgcaggtggaattcttgcgtctgagcactcacgaggaccctcagctgctggaggccaccctggcccagctgcctcagagcctgtcctgcctccgctccctggtcctcaaaggtgagttccacctgttctgggccctgtctccatctctcgctctgccctgcctctgctgcatgttctcaaaggcaaaccccagtcccagccccagctccaggccgcccctcccggctccccaggtgtgaactgttctgctcttggtcctgtccagccccatcgccatcctcggtgatcaccacccccagtgtggggctggctgggccctggctcctggaccctgacgctgcccagtgggggtctctccagaccacagtgcagatgttgttcctggggaaggttgtgggtgatggttgtcagctgagatgagccggtggtctccacccctgcctccttccatttgcgggcacctctccagtgtttctgtctgtctgtccctgtctggctggggtgggggtggggtgggaggtctgtgcctctcgagcagctgtttctctggctggcagggtcgatctgggacctcggaccctggctctgagggccacatccgcctccccccttcccaggagggcaacgccgggacacactgggtgcctgtctccggggtgccctgaccaacctgcccgctggtctgagtggcctggcccatctggcccacctggacctgagcttcaacagcctggagacactgccggcctgtgtcctgcagatgcgaggtctgggtgcgctcttgctgtctcacaactgcctctctgagctgcctgaggctctgggggcc

SEQ ID NO: 13224 - DNA, 754 bp, Homo sapiens
ggaacggcgcgtgggcccgggcagaagctgctggcggtaggctcgccttgactccttggtggttccctggccgcggcgaccggtggtcccacgtccagccgggctcagtgagcttccccgggcgctgcctggacaggcctgcctgcgtgctgggacatgtctggcctccaaggaccgtcggtgggcgatggctgcaacggtggaggggccagagctggaggcagctgctgccgcaggagatgcttcagaggattcggacgcagggtccagggcgctgcctttcctgggcggcaaccggctgagcttggacctgtaccccgggggctgccagcagctgctgcacctgtgtgtccagcagcctctgcagctgctgcaggtggaattcttgcgtctgagcactcacgaggaccctcagctgctggaggccaccctggcccagctgcctcagagcctgtcctgcctccgctccctggtcctcaaagggtcgatctgggacctcggaccctggctctgagggccacatccgcctccccccttcccaggagggcaacgccgggacacactgggtgcctgtctccggggtgccctgaccaacctgcccgctggtctgagtggcctggcccatctggcccacctggacctgagcttcaacagcctggagacactgccggcctgtgtcctgcagatgcgaggtctgggtgcgctcttgctgtctcacaactgcctctctgagctgcctgaggctctgggggcc

SEQ ID NO: 13225 - DNA, 14140 bp, Homo sapiens
gcactgcagcgccagcgtccgagcgggcggccgagctcccggagcggcctggccccgagccccgagcgggcgtcgctcagcagcaggtcgcggccgcagccccatccagccccgcgcccgccatgccgtccgcgggccccgcctgagctgcggcctccgcgcgcgggcgggcctggggacggcggggccatgcgcgcgctgccctaacgatgccgcccgccgcgcccgcccgcctggcgctggccctgggcctgggcctgtggctcggggcgctggcggggggccccgggcgcggctgcgggccctgcgagcccccctgcctctgcggcccagcgcccggcgccgcctgccgcgtcaactgctcgggccgcgggctgcggacgctcggtcccgcgctgcgcatccccgcggacgccacagcgctagacgtctcccacaacctgctccgggcgctggacgttgggctcctggcgaacctctcggcgctggcagagctggatataagcaacaacaagatttctacgttagaagaaggaatatttgctaatttatttaatttaagtgaaataaacctgagtgggaacccgtttgagtgtgactgtggcctggcgtggctgccgcgatgggcggaggagcagcaggtgcgggtggtgcagcccgaggcagccacgtgtgctgggcctggctccctggctggccagcctctgcttggcatccccttgctggacagtggctgtggtgaggagtatgtcgcctgcctccctgacaacagctcaggcaccgtggcagcagtgtccttttcagctgcccacgaaggcctgcttcagccagaggcctgcagcgccttctgcttctccaccggccagggcctcgcagccctctcggagcagggctggtgcctgtgtggggcggcccagccctccagtgcctcctttgcctgcctgtccctctgctccggccccccgccacctcctgcccccacctgtaggggccccaccctcctccagcacgtcttccctgcctccccaggggccaccctggtggggccccacggacctctggcctctggccagctagcagccttccacatcgctgccccgctccctgtcactgccacacgctgggacttcggagacggctccgccgaggtggatgccgctgggccggctgcctcgcatcgctatgtgctgcctgggcgctatcacgtgacggccgtgctggccctgggggccggctcagccctgctggggacagacgtgcaggtggaagcggcacctgccgccctggagctcgtgtgcccgtcctcggtgcagagtgacgagagcctcgacctcagcatccagaaccgcggtggttcaggcctggaggccgcctacagcatcgtggccctgggcgaggagccggcccgagcggtgcacccgctctgcccctcggacacggagatcttccctggcaacgggcactgctaccgcctggtggtggagaaggcggcctggctgcaggcgcaggagcagtgtcaggcctgggccggggccgccctggcaatggtggacagtcccgccgtgcagcgcttcctggtctcccgggtcaccaggagcctagacgtgtggatcggcttctcgactgtgcagggggtggaggtgggcccagcgccgcagggcgaggccttcagcctggagagctgccagaactggctgcccggggagccacacccagccacagccgagcactgcgtccggctcgggcccaccgggtggtgtaacaccgacctgtgctcagcgccgcacagctacgtctgcgagctgcagcccggaggcccagtgcaggatgccgagaacctcctcgtgggagcgcccagtggggacctgcagggacccctgacgcctctggcacagcaggacggcctctcagccccgcacgagcccgtggaggtcatggtattcccgggcctgcgtctgagccgtgaagccttcctcaccacggccgaatttgggacccaggagctccggcggcccgcccagctgcggctgcaggtgtaccggctcctcagcacagcagggaccccggagaacggcagcgagcctgagagcaggtccccggacaacaggacccagctggcccccgcgtgcatgccagggggacgctggtgccctggagccaacatctgcttgccgctggacgcctcctgccacccccaggcctgcgccaatggctgcacgtcagggccagggctacccggggccccctatgcgctatggagagagttcctcttctccgttcccgcggggccccccgcgcagtactcggtcaccctccacggccaggatgtcctcatgctccctggtgacctcgttggcttgcagcacgacgctggccctggcgccctcctgcactgctcgccggctcccggccaccctggtccccgggccccgtacctctccgccaacgcctcgtcatggctgccccacttgccagcccagctggagggcacttgggcctgccctgcctgtgccctgcggctgcttgcagccacggaacagctcaccgtgctgctgggcttgaggcccaaccctggactgcggctgcctgggcgctatgaggtccgggcagaggtgggcaatggcgtgtccaggcacaacctctcctgcagctttgacgtggtctccccagtggctgggctgcgggtcatctaccctgccccccgcgacggccgcctctacgtgcccaccaacggctcagccttggtgctccaggtggactctggtgccaacgccacggccacggctcgctggcctgggggcagtgtcagcgcccgctttgagaatgtctgccctgccctggtggccaccttcgtgcccggctgcccctgggagaccaacgataccctgttctcagtggtagcactgccgtggctcagtgagggggagcacgtggtggacgtggtggtggaaaacagcgccagccgggccaacctcagcctgcgggtgacggcggaggagcccatctgtggcctccgcgccacgcccagccccgaggcccgtgtactgcagggagtcctagtgaggtacagccccgtggtggaggccggctcggacatggtcttccggtggaccatcaacgacaagcagtccctgaccttccagaacgtggtcttcaatgtcatttatcagagcgcggcggtcttcaagctctcactgacggcctccaaccacgtgagcaacgtcaccgtgaactacaacgtaaccgtggagcggatgaacaggatgcagggtctgcaggtctccacagtgccggccgtgctgtcccccaatgccacgctagcactgacggcgggcgtgctggtggactcggccgtggaggtggccttcctgtggacctttggggatggggagcaggccctccaccagttccagcctccgtacaacgagtccttcccggttccagacccctcggtggcccaggtgctggtggagcacaatgtcatgcacacctacgctgccccaggtgagtacctcctgaccgtgctggcatctaatgccttcgagaacctgacgcagcaggtgcctgtgagcgtgcgcgcctccctgccctccgtggctgtgggtgtgagtgacggcgtcctggtggccggccggcccgtcaccttctacccgcacccgctgccctcgcctgggggtgttctttacacgtgggacttcggggacggctcccctgtcctgacccagagccagccggctgccaaccacacctatgcctcgaggggcacctaccacgtgcgcctggaggtcaacaacacggtgagcggtgcggcggcccaggcggatgtgcgcgtctttgaggagctccgcggactcagcgtggacatgagcctggccgtggagcagggcgcccccgtggtggtcagcgccgcggtgcagacgggcgacaacatcacgtggaccttcgacatgggggacggcaccgtgctgtcgggcccggaggcaacagtggagcatgtgtacctgcgggcacagaactgcacagtgaccgtgggtgcggccagccccgccggccacctggcccggagcctgcacgtgctggtcttcgtcctggaggtgctgcgcgttgaacccgccgcctgcatccccacgcagcctgacgcgcggctcacggcctacgtcaccgggaacccggcccactacctcttcgactggaccttcggggatggctcctccaacacgaccgtgcgggggtgcccgacggtgacacacaacttcacgcggagcggcacgttccccctggcgctggtgctgtccagccgcgtgaacagggcgcattacttcaccagcatctgcgtggagccagaggtgggcaacgtcaccctgcagccagagaggcagtttgtgcagctcggggacgaggcctggctggtggcatgtgcctggcccccgttcccctaccgctacacctgggactttggcaccgaggaagccgcccccacccgtgccaggggccctgaggtgacgttcatctaccgagacccaggctcctatcttgtgacagtcaccgcgtccaacaacatctctgctgccaatgactcagccctggtggaggtgcaggagcccgtgctggtcaccagcatcaaggtcaatggctcccttgggctggagctgcagcagccgtacctgttctctgctgtgggccgtgggcgccccgccagctacctgtgggatctgggggacggtgggtggctcgagggtccggaggtcacccacgcttacaacagcacaggtgacttcaccgttagggtggccggctggaatgaggtgagccgcagcgaggcctggctcaatgtgacggtgaagcggcgcgtgcgggggctcgtcgtcaatgcaagccgcacggtggtgcccctgaatgggagcgtgagcttcagcacgtcgctggaggccggcagtgatgtgcgctattcctgggtgctctgtgaccgctgcacgcccatccctgggggtcctaccatctcttacaccttccgctccgtgggcaccttcaatatcatcgtcacggctgagaacgaggtgggctccgcccaggacagcatcttcgtctatgtcctgcagctcatagaggggctgcaggtggtgggcggtggccgctacttccccaccaaccacacggtacagctgcaggccgtggttagggatggcaccaacgtctcctacagctggactgcctggagggacaggggcccggccctggccggcagcggcaaaggcttctcgctcaccgtgctcgaggccggcacctaccatgtgcagctgcgggccaccaacatgctgggcagcgcctgggccgactgcaccatggacttcgtggagcctgtggggtggctgatggtggccgcctccccgaacccagctgccgtcaacacaagcgtcaccctcagtgccgagctggctggtggcagtggtgtcgtatacacttggtccttggaggaggggctgagctgggagacctccgagccatttaccacccatagcttccccacacccggcctgcacttggtcaccatgacggcagggaacccgctgggctcagccaacgccaccgtggaagtggatgtgcaggtgcctgtgagtggcctcagcatcagggccagcgagcccggaggcagcttcgtggcggccgggtcctctgtgcccttttgggggcagctggccacgggcaccaatgtgagctggtgctgggctgtgcccggcggcagcagcaagcgtggccctcatgtcaccatggtcttcccggatgctggcaccttctccatccggctcaatgcctccaacgcagtcagctgggtctcagccacgtacaacctcacggcggaggagcccatcgtgggcctggtgctgtgggccagcagcaaggtggtggcgcccgggcagctggtccattttcagatcctgctggctgccggctcagctgtcaccttccgcctgcaggtcggcggggccaaccccgaggtgctccccgggccccgtttctcccacagcttcccccgcgtcggagaccacgtggtgagcgtgcggggcaaaaaccacgtgagctgggcccaggcgcaggtgcgcatcgtggtgctggaggccgtgagtgggctgcaggtgcccaactgctgcgagcctggcatcgccacgggcactgagaggaacttcacagcccgcgtgcagcgcggctctcgggtcgcctacgcctggtacttctcgctgcagaaggtccagggcgactcgctggtcatcctgtcgggccgcgacgtcacctacacgcccgtggccgcggggctgttggagatccaggtgcgcgccttcaacgccctgggcagtgagaaccgcacgctggtgctggaggttcaggacgccgtccagtatgtggccctgcagagcggcccctgcttcaccaaccgctcggcgcagtttgaggccgccaccagccccagcccccggcgtgtggcctaccactgggactttggggatgggtcgccagggcaggacacagatgagcccagggccgagcactcctacctgaggcctggggactaccgcgtgcaggtgaacgcctccaacctggtgagcttcttcgtggcgcaggccacggtgaccgtccaggtgctggcctgccgggagccggaggtggacgtggtcctgcccctgcaggtgctgatgcggcgatcacagcgcaactacttggaggcccacgttgacctgcgcgactgcgtcacctaccagactgagtaccgctgggaggtgtatcgcaccgccagctgccagcggccggggcgcccagcgcgtgtggccctgcccggcgtggacgtgagccggcctcggctggtgctgccgcggctggcgctgcctgtggggcactactgctttgtgtttgtcgtgtcatttggggacacgccactgacacagagcatccaggccaatgtgacggtggcccccgagcgcctggtgcccatcattgagggtggctcataccgcgtgtggtcagacacacgggacctggtgctggatgggagcgagtcctacgaccccaacctggaggacggcgaccagacgccgctcagtttccactgggcctgtgtggcttcgacacagagggaggctggcgggtgtgcgctgaactttgggccccgcgggagcagcacggtcaccattccacgggagcggctggcggctggcgtggagtacaccttcagcctgaccgtgtggaaggccggccgcaaggaggaggccaccaaccagacggtgctgatccggagtggccgggtgcccattgtgtccttggagtgtgtgtcctgcaaggcacaggccgtgtacgaagtgagccgcagctcctacgtgtacttggagggccgctgcctcaattgcagcagcggctccaagcgagggcggtgggctgcacgtacgttcagcaacaagacgctggtgctggatgagaccaccacatccacgggcagtgcaggcatgcgactggtgctgcggcggggcgtgctgcgggacggcgagggatacaccttcacgctcacggtgctgggccgctctggcgaggaggagggctgcgcctccatccgcctgtcccccaaccgcccgccgctggggggctcttgccgcctcttcccactgggcgctgtgcacgccctcaccaccaaggtgcacttcgaatgcacgggctggcatgacgcggaggatgctggcgccccgctggtgtacgccctgctgctgcggcgctgtcgccagggccactgcgaggagttctgtgtctacaagggcagcctctccagctacggagccgtgctgcccccgggtttcaggccacacttcgaggtgggcctggccgtggtggtgcaggaccagctgggagccgctgtggtcgccctcaacaggtctttggccatcaccctcccagagcccaacggcagcgcaacggggctcacagtctggctgcacgggctcaccgctagtgtgctcccagggctgctgcggcaggccgatccccagcacgtcatcgagtactcgttggccctggtcaccgtgctgaacgagtacgagcgggccctggacgtggcggcagagcccaagcacgagcggcagcaccgagcccagatacgcaagaacatcacggagactctggtgtccctgagggtccacactgtggatgacatccagcagatcgctgctgcgctggcccagtgcatggggcccagcagggagctcgtatgccgctcgtgcctgaagcagacgctgcacaagctggaggccatgatgctcatcctgcaggcagagaccaccgcgggcaccgtgacgcccaccgccatcggagacagcatcctcaacatcacaggagacctcatccacctggccagctcggacgtgcgggcaccacagccctcagagctgggagccgagtcaccatctcggatggtggcgtcccaggcctacaacctgacctctgccctcatgcgcatcctcatgcgctcccgcgtgctcaacgaggagcccctgacgctggcgggcgaggagatcgtggcccagggcaagcgctcggacccgcggagcctgctgtgctatggcggcgccccagggcctggctgccacttctccatccccgaggctttcagcggggccctggccaacctcagtgacgtggtgcagctcatctttctggtggactccaatccctttccctttggctatatcagcaactacaccgtctccaccaaggtggcctcgatggcattccagacacaggccggcgcccagatccccatcgagcggctggcctcagagcgcgccatcaccgtgaaggtgcccaacaactcggactgggctgcccggggccaccgcagctccgccaactccgccaactccgttgtggtccagccccaggcctccgtcggtgctgtggtcaccctggacagcagcaaccctgcggccgggctgcatctgcagctcaactatacgctgctggacggccactacctgtctgaggaacctgagccctacctggcagtctacctacactcggagccccggcccaatgagcacaactgctcggctagcaggaggatccgcccagagtcactccagggtgctgaccaccggccctacaccttcttcatttccccggggagcagagacccagcggggagttaccatctgaacctctccagccacttccgctggtcggcgctgcaggtgtccgtgggcctgtacacgtccctgtgccagtacttcagcgaggaggacatggtgtggcggacagaggggctgctgcccctggaggagacctcgccccgccaggccgtctgcctcacccgccacctcaccgccttcggcgccagcctcttcgtgcccccaagccatgtccgctttgtgtttcctgagccgacagcggatgtaaactacatcgtcatgctgacatgtgctgtgtgcctggtgacctacatggtcatggccgccatcctgcacaagctggaccagttggatgccagccggggccgcgccatccctttctgtgggcagcggggccgcttcaagtacgagatcctcgtcaagacaggctggggccggggctcaggtaccacggcccacgtgggcatcatgctgtatggggtggacagccggagcggccaccggcacctggacggcgacagagccttccaccgcaacagcctggacatcttccggatcgccaccccgcacagcctgggtagcgtgtggaagatccgagtgtggcacgacaacaaagggctcagccctgcctggttcctgcagcacgtcatcgtcagggacctgcagacggcacgcagcgccttcttcctggtcaatgactggctttcggtggagacggaggccaacgggggcctggtggagaaggaggtgctggccgcgagcgacgcagcccttttgcgcttccggcgcctgctggtggctgagctgcagcgtggcttctttgacaagcacatctggctctccatatgggaccggccgcctcgtagccgtttcactcgcatccagagggccacctgctgcgttctcctcatctgcctcttcctgggcgccaacgccgtgtggtacggggctgttggcgactctgcctacagcacggggcatgtgtccaggctgagcccgctgagcgtcgacacagtcgctgttggcctggtgtccagcgtggttgtctatcccgtctacctggccatcctttttctcttccggatgtcccggagcaaggtggctgggagcccgagccccacacctgccgggcagcaggtgctggacatcgacagctgcctggactcgtccgtgctggacagctccttcctcacgttctcaggcctccacgctgagcaggcctttgttggacagatgaagagtgacttgtttctggatgattctaagagtctggtgtgctggccctccggcgagggaacgctcagttggccggacctgctcagtgacccgtccattgtgggtagcaatctgcggcagctggcacggggccaggcgggccatgggctgggcccagaggaggacggcttctccctggccagcccctactcgcctgccaaatccttctcagcatcagatgaagacctgatccagcaggtccttgccgagggggtcagcagcccagcccctacccaagacacccacatggaaacggacctgctcagcagcctgtccagcactcctggggagaagacagagacgctggcgctgcagaggctgggggagctggggccacccagcccaggcctgaactgggaacagccccaggcagcgaggctgtccaggacaggactggtggagggtctgcggaagcgcctgctgccggcctggtgtgcctccctggcccacgggctcagcctgctcctggtggctgtggctgtggctgtctcagggtgggtgggtgcgagcttccccccgggcgtgagtgttgcgtggctcctgtccagcagcgccagcttcctggcctcattcctcggctgggagccactgaaggtcttgctggaagccctgtacttctcactggtggccaagcggctgcacccggatgaagatgacaccctggtagagagcccggctgtgacgcctgtgagcgcacgtgtgccccgcgtacggccaccccacggctttgcactcttcctggccaaggaagaagcccgcaaggtcaagaggctacatggcatgctgcggagcctcctggtgtacatgctttttctgctggtgaccctgctggccagctatggggatgcctcatgccatgggcacgcctaccgtctgcaaagcgccatcaagcaggagctgcacagccgggccttcctggccatcacgcggtctgaggagctctggccatggatggcccacgtgctgctgccctacgtccacgggaaccagtccagcccagagctggggcccccacggctgcggcaggtgcggctgcaggaagcactctacccagaccctcccggccccagggtccacacgtgctcggccgcaggaggcttcagcaccagcgattacgacgttggctgggagagtcctcacaatggctcggggacgtgggcctattcagcgccggatctgctgggggcatggtcctggggctcctgtgccgtgtatgacagcgggggctacgtgcaggagctgggcctgagcctggaggagagccgcgaccggctgcgcttcctgcagctgcacaactggctggacaacaggagccgcgctgtgttcctggagctcacgcgctacagcccggccgtggggctgcacgccgccgtcacgctgcgcctcgagttcccggcggccggccgcgccctggccgccctcagcgtccgcccctttgcgctgcgccgcctcagcgcgggcctctcgctgcctctgctcacctcggtgtgcctgctgctgttcgccgtgcacttcgccgtggccgaggcccgtacttggcacagggaagggcgctggcgcgtgctgcggctcggagcctgggcgcggtggctgctggtggcgctgacggcggccacggcactggtacgcctcgcccagctgggtgccgctgaccgccagtggacccgtttcgtgcgcggccgcccgcgccgcttcactagcttcgaccaggtggcgcagctgagctccgcagcccgtggcctggcggcctcgctgctcttcctgcttttggtcaaggctgcccagcagctacgcttcgtgcgccagtggtccgtctttggcaagacattatgccgagctctgccagagctcctgggggtcaccttgggcctggtggtgctcggggtagcctacgcccagctggccatcctgctcgtgtcttcctgtgtggactccctctggagcgtggcccaggccctgttggtgctgtgccctgggactgggctctctaccctgtgtcctgccgagtcctggcacctgtcacccctgctgtgtgtggggctctgggcactgcggctgtggggcgccctacggctgggggctgttattctccgctggcgctaccacgccttgcgtggagagctgtaccggccggcctgggagccccaggactacgagatggtggagttgttcctgcgcaggctgcgcctctggatgggcctcagcaaggtcaaggagttccgccacaaagtccgctttgaagggatggagccgctgccctctcgctcctccaggggctccaaggtatccccggatgtgcccccacccagcgctggctccgatgcctcgcacccctccacctcctccagccagctggatgggctgagcgtgagcctgggccggctggggacaaggtgtgagcctgagccctcccgcctccaagccgtgttcgaggccctgctcacccagtttgaccgactcaaccaggccacagaggacgtctaccagctggagcagcagctgcacagcctgcaaggccgcaggagcagccgggcgcccgccggatcttcccgtggcccatccccgggcctgcggccagcactgcccagccgccttgcccgggccagtcggggtgtggacctggccactggccccagcaggacaccccttcgggccaagaacaaggtccaccccagcagcacttagtcctccttcctggcgggggtgggccgtggagtcggagtggacaccgctcagtattactttctgccgctgtcaaggccgagggccaggcagaatggctgcacgtaggttccccagagagcaggcaggggcatctgtctgtctgtgggcttcagcactttaaagaggctgtgtggccaaccaggacccagggtcccctccccagctcccttgggaaggacacagcagtattggacggtttctagcctctgagatgctaatttatttccccgagtcctcaggtacagcgggctgtgcccggccccaccccctgggcagatgtcccccactgctaaggctgctggcttcagggagggttagcctgcaccgccgccaccctgcccctaagttattacctctccagttcctaccgtactccctgcaccgtctcactgtgtgtctcgtgtcagtaatttatatggtgttaaaatgtgtatatttttgtatgtcactattttcactagggctgaggggcctgcgcccagagctggcctcccccaacacctgctgcgcttggtaggtgtggtggcgttatggcagcccggctgctgcttggatgcgagcttggccttgggccggtgctgggggcacagctgtctgccaggcactctcatcaccccagaggccttgtcatcctcccttgccccaggccaggtagcaagagagcagcgcccaggcctgctggcatcaggtctgggcaagtagcaggactaggcatgtcagaggaccccagggtggttagaggaaaagactcctcctgggggctggctcccagggtggaggaaggtgactgtgtgtgtgtgtgtgtgcgcgcgcgcacgcgcgagtgtgctgtatggcccaggcagcctcaaggccctcggagctggctgtgcctgcttctgtgtaccacttctgtgggcatggccgcttctagagcctcgacacccccccaacccccgcaccaagcagacaaagtcaataaaagagctgtctgactgcaa

SEQ ID NO: 13226 - DNA, 15236 bp, Homo sapiens
ctgacggcctccaaccacgtgagcaacgtcaccgtgaactacaacgtaaccgtggagcggatgaacaggatgcagggtctgcaggtctccacagtgccggccgtgctgtcccccaatgccacgctagcactgacggcgggcgtgctggtggactcggccgtggaggtggccttcctgtgagtgactcgggggccggtttggggtgggcaccaggctcttgtcccagccccagcctcagccgagggacccccacatcacggggttgcttttctgagcctcggtttccctgtctgttgggaggtaactgggtgcacaggagccctgaggctgcacgggagccgggagaggcctcagcacagccgggtgggccctgaatggaggcccggggcgtgactgcagagtggagcctcggctgggtcccaagcaccccctgccccgccaccgcccacccctgtcccggttcactcactgcgtcccaccgccccggcaggtggacctttggggatggggagcaggccctccaccagttccagcctccgtacaacgagtccttcccggttccagacccctcggtggcccaggtgctggtggagcacaatgtcatgcacacctacgctgccccaggtgagggatgagggggtgagggggccactgcctttcaggctctgagcacggggtccccccagctccccagtcaagctgccccccttcctccccaacagccctcactgtgacctcacctgggctgatggcttaggcccctactggggtgagggaggggccaggcgtggggggagtggacagggaagctgggcccctgaactgcgccccccgccctccccgggcctggctcttgctgctctgctgccccgagtgcagctgcacttggaggcggtgccgtcctcgccaggcagccctcagtgctgctacacctgtgctccgtcccgcacgtggcttgggagcctgggacccttaaggctgggccgcaggtgcagccgttcaccccgggctcctcaggcggggggcttctgccgagcgggtggggagcaggtgggggtgccgcggctgccccactcgggcctgtccccacaggtgagtacctcctgaccgtgctggcatctaatgccttcgagaacctgacgcagcaggtgcctgtgagcgtgcgcgcctccctgccctccgtggctgtgggtgtgagtgacggcgtcctggtggccggccggcccgtcaccttctacccgcacccgctgccctcgcctgggggtgttctttacacgtgggacttcggggacggctcccctgtcctgacccagagccagccggctgccaaccacacctatgcctcgaggggcacctaccacgtgcgcctggaggtcaacaacacggtgagcggtgcggcggcccaggcggatgtgcgcgtctttgaggagctccgcggactcagcgtggacatgagcctggccgtggagcagggcgcccccgtggtggtcagcgccgcggtgcagacgggcgacaacatcacgtggaccttcgacatgggggacggcaccgtgctgtcgggcccggaggcaacagtggagcatgtgtacctgcgggcacagaactgcacagtgaccgtgggtgcggccagccccgccggccacctggcccggagcctgcacgtgctggtcttcgtcctggaggtgctgcgcgttgaacccgccgcctgcatccccacgcagcctgacgcgcggctcacggcctacgtcaccgggaacccggcccactacctcttcgactggaccttcggggatggctcctccaacacgaccgtgcgggggtgcccgacggtgacacacaacttcacgcggagcggcacgttccccctggcgctggtgctgtccagccgcgtgaacagggcgcattacttcaccagcatctgcgtggagccagaggtgggcaacgtcaccctgcagccagagaggcagtttgtgcagctcggggacgaggcctggctggtggcatgtgcctggcccccgttcccctaccgctacacctgggactttggcaccgaggaagccgcccccacccgtgccaggggccctgaggtgacgttcatctaccgagacccaggctcctatcttgtgacagtcaccgcgtccaacaacatctctgctgccaatgactcagccctggtggaggtgcaggagcccgtgctggtcaccagcatcaaggtcaatggctcccttgggctggagctgcagcagccgtacctgttctctgctgtgggccgtgggcgccccgccagctacctgtgggatctgggggacggtgggtggctcgagggtccggaggtcacccacgcttacaacagcacaggtgacttcaccgttagggtggccggctggaatgaggtgagccgcagcgaggcctggctcaatgtgacggtgaagcggcgcgtgcgggggctcgtcgtcaatgcaagccgcacggtggtgcccctgaatgggagcgtgagcttcagcacgtcgctggaggccggcagtgatgtgcgctattcctgggtgctctgtgaccgctgcacgcccatccctgggggtcctaccatctcttacaccttccgctccgtgggcaccttcaatatcatcgtcacggctgagaacgaggtgggctccgcccaggacagcatcttcgtctatgtcctgcagctcatagaggggctgcaggtggtgggcggtggccgctacttccccaccaaccacacggtacagctgcaggccgtggttagggatggcaccaacgtctcctacagctggactgcctggagggacaggggcccggccctggccggcagcggcaaaggcttctcgctcaccgtgctcgaggccggcacctaccatgtgcagctgcgggccaccaacatgctgggcagcgcctgggccgactgcaccatggacttcgtggagcctgtggggtggctgatggtggccgcctccccgaacccagctgccgtcaacacaagcgtcaccctcagtgccgagctggctggtggcagtggtgtcgtatacacttggtccttggaggaggggctgagctgggagacctccgagccatttaccacccatagcttccccacacccggcctgcacttggtcaccatgacggcagggaacccgctgggctcagccaacgccaccgtggaagtggatgtgcaggtgcctgtgagtggcctcagcatcagggccagcgagcccggaggcagcttcgtggcggccgggtcctctgtgcccttttgggggcagctggccacgggcaccaatgtgagctggtgctgggctgtgcccggcggcagcagcaagcgtggccctcatgtcaccatggtcttcccggatgctggcaccttctccatccggctcaatgcctccaacgcagtcagctgggtctcagccacgtacaacctcacggcggaggagcccatcgtgggcctggtgctgtgggccagcagcaaggtggtggcgcccgggcagctggtccattttcagatcctgctggctgccggctcagctgtcaccttccgcctgcaggtcggcggggccaaccccgaggtgctccccgggccccgtttctcccacagcttcccccgcgtcggagaccacgtggtgagcgtgcggggcaaaaaccacgtgagctgggcccaggcgcaggtgcgcatcgtggtgctggaggccgtgagtgggctgcaggtgcccaactgctgcgagcctggcatcgccacgggcactgagaggaacttcacagcccgcgtgcagcgcggctctcgggtcgcctacgcctggtacttctcgctgcagaaggtccagggcgactcgctggtcatcctgtcgggccgcgacgtcacctacacgcccgtggccgcggggctgttggagatccaggtgcgcgccttcaacgccctgggcagtgagaaccgcacgctggtgctggaggttcaggacgccgtccagtatgtggccctgcagagcggcccctgcttcaccaaccgctcggcgcagtttgaggccgccaccagccccagcccccggcgtgtggcctaccactgggactttggggatgggtcgccagggcaggacacagatgagcccagggccgagcactcctacctgaggcctggggactaccgcgtgcaggtgaacgcctccaacctggtgagcttcttcgtggcgcaggccacggtgaccgtccaggtgctggcctgccgggagccggaggtggacgtggtcctgcccctgcaggtgctgatgcggcgatcacagcgcaactacttggaggcccacgttgacctgcgcgactgcgtcacctaccagactgagtaccgctgggaggtgtatcgcaccgccagctgccagcggccggggcgcccagcgcgtgtggccctgcccggcgtggacgtgagccggcctcggctggtgctgccgcggctggcgctgcctgtggggcactactgctttgtgtttgtcgtgtcatttggggacacgccactgacacagagcatccaggccaatgtgacggtggcccccgagcgcctggtgcccatcattgagggtggctcataccgcgtgtggtcagacacacgggacctggtgctggatgggagcgagtcctacgaccccaacctggaggacggcgaccagacgccgctcagtttccactgggcctgtgtggcttcgacacaggtcagtgcgtggcagggccgtcctccatgcccctcacccgtccacacccatgagcccagagaacacccagcttgccaccagggctggcccgtcctcagtgcctggtgggccccgtcccagcatggggagggggtctcccgcgctgtctcctgggccgggctctgctttaaaactggatggggctctcaggccacgtcgccccttgttctcggcctgcagagggaggctggcgggtgtgcgctgaactttgggccccgcgggagcagcacggtcaccattccacgggagcggctggcggctggcgtggagtacaccttcagcctgaccgtgtggaaggccggccgcaaggaggaggccaccaaccagacggtgggtgccgcccgcccctcggccacttgccttggacagcccagcctccctggtcatctactgttttccgtgttttagtgctggtggaggccgcacgctctcccctctctgtttctgatgcaaattctatgtaacacgacagcctgcttcagctttgcttccttccaaacctgccacagttccacgtacagtcttcaagccacatatgctctagtggcaaaagctacacagtcccctagcaataccaacagtgaggaagagccccttcccaccccagaggtagccactgtccccagcccatgtccctgttgctggatgtggtgggccggttctcaccctcacgctcccctctctggaccggccaggaggcttggtgaccctgagcccgtggtggctgctcctgctgctgtcaggcggggcctgctggtgccccagagtgggcgtctgttccccagtccctgctttcctcagctggcctgattgggggtcttcccagaggggtcgtctgaggggagggtgtgggagcaggttccatcccagctcagcctcctgacccaggccctggctaagggctgcaggagtctgtgagtcaggcctacgtggcagctgcggtcctcacacccacacatacgtctcttctcacacgcatccccccaggggccctcagtgagcattgcctgcctcctgctagggtccagctgggtccagtacaccagaacgcacactccagtgtcctctgccctgtgtatgcccttccgccgtccaagttggaaggtggcaaaccggatgagtatcctgggagggagtgagctcaccggcagtggccaggcccctgggaaacctggagtttgggagcagcatcctccatgggtcccccagtccttccagcaggccaaatagacctgtgttggaggtaaccccactcccacgccaggtgctgatccggagtggccgggtgcccattgtgtccttggagtgtgtgtcctgcaaggcacaggccgtgtacgaagtgagccgcagctcctacgtgtacttggagggccgctgcctcaattgcagcagcggctccaagcgaggggtgagtgttgagcggggtgtgggcgggctggggatgggtcccatggccgaggggacggggcctgcaggcagaagtggggctgacagggcagagggttgcgccccctcaccaccccttctgcctgcagcggtgggctgcacgtacgttcagcaacaagacgctggtgctggatgagaccaccacatccacgggcagtgcaggcatgcgactggtgctgcggcggggcgtgctgcgggacggcgagggatacaccttcacgctcacggtgctgggccgctctggcgaggaggagggctgcgcctccatccgcctgtcccccaaccgcccgccgctggggggctcttgccgcctcttcccactgggcgctgtgcacgccctcaccaccaaggtgcacttcgaatgcacgggtgagtgcaggcctgcgtggggggagcagcgggatcccccgactctgtgacgtcacggagccctcccgtgatgccgtggggaccgtccctcaggctggcatgacgcggaggatgctggcgccccgctggtgtacgccctgctgctgcggcgctgtcgccagggccactgcgaggagttctgtgtctacaagggcagcctctccagctacggagccgtgctgcccccgggtttcaggccacacttcgaggtgggcctggccgtggtggtgcaggaccagctgggagccgctgtggtcgccctcaacaggtgagccaggccgtgggagggcgcccccgagactgccacctgctcaccacccccctctgctcgtaggtctttggccatcaccctcccagagcccaacggcagcgcaacggggctcacagtctggctgcacgggctcaccgctagtgtgctcccagggctgctgcggcaggccgatccccagcacgtcatcgagtactcgttggccctggtcaccgtgctgaacgaggtgagtgcagcctgggaggggacgtcacatctgctgcatgcgtgcttgggaccaagacctgtacccctgcctggagctttgcagagggctcatcccgggccccagagataaatcccagtgaccctgaagcagcaccccgaccttccgctcccagcagccacacccaccgggccctctccggcgtctgctttccacaatgcagcccccgcccaggagggcccatgtgcttaccctgttttgcccatgaagaaacagctcagtgttgtgggtcagtgcccgcatcacacagcgtctagcacgtaactgcaccccgggagtcgtgggcatctgctggcctcctgccggcctcctgcgctgctgacagcttgctgtgccccctgcctgccccagtacgagcgggccctggacgtggcggcagagcccaagcacgagcggcagcaccgagcccagatacgcaagaacatcacggagactctggtgtccctgagggtccacactgtggatgacatccagcagatcgctgctgcgctggcccagtgcatggtaggatggccccacctgctcaccctgccccgcatgcctgccagggcactgggttcagccccccagggcagacgggcagcttggccgaggagctgagcctccagcctgggctccttcctgccatggcgttcctcggtctctgacctgcttcagtagcctcagccgttctgtcctgtgtgaacgcagggtgcctctcgggggacccagggtgtaaagaggggcccagatgtggggagggactaagaagatgctgctctgtgccctccactctcccctcccctcccctcccccttccctcccctagcccctcccctcctcccctcccctagcccttcccctcctcccctcccctagccctttcccttcttcccccccagcccttcccctcctcccctcccctttttctccactcccctctcctctctcccctcctcctccgctctcatgtgaagaggtgccttgtgtggtcggtgggctgcatcacgtggtccccaggtggaggccctgggtcatgcagagccacagaaaatgcttagtgaggaggctgtgggggtccagtcaagtgggctctccagctgcagggctgggggtgggagccaggtgaggacccgtgtagagaggagggcgtgtgcaaggagtggggccaggagcggggctggacactgctggctccacacaggggcccagcagggagctcgtatgccgctcgtgcctgaagcagacgctgcacaagctggaggccatgatgctcatcctgcaggcagagaccaccgcgggcaccgtgacgcccaccgccatcggagacagcatcctcaacatcacaggtgccgcggcccgtgccccatgccacccgcccgccccgtgcggccctttcctctgcctccctcctccccccaaccgcgtcgcctttgccccatcccatcttcgtccccctcccctccccccaattcccatcctcatccccctcccccaattcccattctcctccccctcccccttccctattaccatcccttttctccatctctctccccttttctccatttccccccccgtcctccccgtccttttgtccattcccctcatcttcctcatccccctcatcccccttcccctcccttatcccccttcccctccctttccccctgctcctcttcttctcccttctcttttctctacccttttccttcctttttcctccctctccccatcatccccctcatcttcgtcctcatccccatcaccttccccctcccccctccaccactctctctccagcttcccccttccttctgcctgcacctcgctctctgccccctcaggttccccctttctcccagcccccaccctccggctccccctttttgcctgcccccaccctccctctacctccctgtctctgcactgacctcacgcatgtctgcaggagacctcatccacctggccagctcggacgtgcgggcaccacagccctcagagctgggagccgagtcaccatctcggatggtggcgtcccaggcctacaacctgacctctgccctcatgcgcatcctcatgcgctcccgcgtgctcaacgaggagcccctgacgctggcgggcgaggagatcgtggcccagggcaagcgctcggacccgcggagcctgctgtgctatggcggcgccccagggcctggctgccacttctccatccccgaggctttcagcggggccctggccaacctcagtgacgtggtgcagctcatctttctggtggactccaatccctttccctttggctatatcagcaactacaccgtctccaccaaggtggcctcgatggcattccagacacaggccggcgcccagatccccatcgagcggctggcctcagagcgcgccatcaccgtgaaggtgcccaacaactcggactgggctgcccggggccaccgcagctccgccaactccgccaactccgttgtggtccagccccaggcctccgtcggtgctgtggtcaccctggacagcagcaaccctgcggccgggctgcatctgcagctcaactatacgctgctggacggtgcgtgcagcgggtggggcacacgcggccccctggccttgttcttggggggaaggcgtttctcgtagggcttccatgggtgtctctggtgaaatttgctttctgtttcatgggctgctgggggcctggccagagaggagctgggggccacggagaagcaggtgccagctctggtgcagaggctcctatggcctttcaggcccgtggcagagggtgggctcaggagggccatcgtgggtgtcccccgggtggttgagcttcccggcaggcgtgtgacctgcgcgttctgccccaggccactacctgtctgaggaacctgagccctacctggcagtctacctacactcggagccccggcccaatgagcacaactgctcggctagcaggaggatccgcccagagtcactccagggtgctgaccaccggccctacaccttcttcatttccccggggtgagctctgcgggccagcctggcagggcagggcagggcatcatgggtcagcattgcctgggttactggccccatggggacggcaggcagcgaggggactggaccgggtatgggctctgagactgcgacatccaacctggcggagcctgggctcacgtccgctaccccttccctgcccaggagcagagacccagcggggagttaccatctgaacctctccagccacttccgctggtcggcgctgcaggtgtccgtgggcctgtacacgtccctgtgccagtacttcagcgaggaggacatggtgtggcggacagaggggctgctgcccctggaggagacctcgccccgccaggccgtctgcctcacccgccacctcaccgccttcggcgccagcctcttcgtgcccccaagccatgtccgctttgtgtttcctgtgagtgaccctgtgctcctgggagcctctgcagagtcgaggagggcctgggtgggctcggctctatcctgagaaggcacagcttgcacgtgacctcctgggcccggcggctgtgtcctcacaggagccgacagcggatgtaaactacatcgtcatgctgacatgtgctgtgtgcctggtgacctacatggtcatggccgccatcctgcacaagctggaccagttggatgccagccggggccgcgccatccctttctgtgggcagcggggccgcttcaagtacgagatcctcgtcaagacaggctggggccggggctcaggtgaggggcgcagcggggtggcagggcctcccctgctctcactggctgtgctggttgcaccctctgggagtgagtctcgtcgcaggcgtcagaacaaggcagtttttgcagtgctgtgtgaagggctcgtgtgttcatcctgggaatgacctcgtgagcactcactgtccctgaggactaggacagctcctagctggaagtaggtgccagtcagtcagggtgggcagcccacgttctgcacagtagcgtggccccacaagtgacgtgagcatcgctaccactgtgggagactgtgcatccacccgcgatcctgactgcatagctcgtctctcagacggaggcgccagcaccctccccgtggctgtttcttcagtacctccattttcctttcattggaattgcccttctggcattccctttttgttttcgtttttctttttttagagacggagtctcactctgttgcccaggctggagtgcaatggcatgatcttggctcacagcaacttccagctcccgggtttaagccattccccttaagcgattctcctgagtagctgggagtacaggtgcacaccaccacacccagttaatttttcaccatgtcagccaggcgaactcctgacctcaggtgatccgcctgcctcggcctgccagagtgctgggatgacaggtgtgagccaccacacctggctgtgttcccattttttatctctgtgctgctttcctcttcattgcccagttctttcttttgattacctacttttaaaaactgtcggccgggcgcggtggctcacacctgtaatccgagcactttgggaggccaggcaggcaaatcacggggtcaggagatcgagaccatcctggctaacggtgaaaccctgtctctaataaaaagtacaaaaaaattagcccggcgtagtggcaggcgcctgtagtcccagctccttgggagactgaggcaggagaatggcgtgaacccgggaggcggagcttgcagtgagctgagattgcgccactgcactccagcctgggtgacacagcaagactccatctcaaaaaaaaaagaaaaaaaatactgtcacctgggtctgtcactgggagaggaggtgacacagcttcacgctttgcagtctgtgcatgaactgagggacgggtgtgtggtgcgggtcaccggttgtggcatgactgaggcgtggacaggtgtgcagtgcgggtcactggttgtggtgtggactgaggcgtgtgcagccatgtttgcatgtcacaagttacagttctttccatgtaacttaatcatgtccttgaggtcctgctgttaattggacaaattgcagtaaccgcagctccttgtgtatggcagagccgtgcaaagccgggactgcctgtgtggctccttgagtgcgcacaggccaaagctgagatgacttgcctgggatgccacacgtgttgggcagcagaccgagcctcccacccctccctcttgcctcccaggtaccacggcccacgtgggcatcatgctgtatggggtggacagccggagcggccaccggcacctggacggcgacagagccttccaccgcaacagcctggacatcttccggatcgccaccccgcacagcctgggtagcgtgtggaagatccgagtgtggcacgacaacaaaggtttgtgcggaccctgccaagctctgcccctctgcccccgcattggggcgccctgcgagcctgacctccctcctgcgcctctgcagggctcagccctgcctggttcctgcagcacgtcatcgtcagggacctgcagacggcacgcagcgccttcttcctggtcaatgactggctttcggtggagacggaggccaacgggggcctggtggagaaggaggtgctggccgcgagtaaggcctcgttccatgttcccactccgtgggaggttgggcagggtggtcctgccccgtggcctcctgcagtgcggccctccctgccttctaggcgacgcagcccttttgcgcttccggcgcctgctggtggctgagctgcagcgtggcttctttgacaagcacatctggctctccatatgggaccggccgcctcgtagccgtttcactcgcatccagagggccacctgctgcgttctcctcatctgcctcttcctgggcgccaacgccgtgtggtacggggctgttggcgactctgcctacaggtgggtgccgtaggggtcggggcagcctcttcctgcccagcccttcctgcccctcagcctcacctgtgtggcctcctctcctccacacagcacggggcatgtgtccaggctgagcccgctgagcgtcgacacagtcgctgttggcctggtgtccagcgtggttgtctatcccgtctacctggccatcctttttctcttccggatgtcccggagcaaggtgggctggggctggggacccgggagtactgggaatggagcctgggcctcggcaccatgcctagggccgccactttccagtgctgcagccagagggaaaggcgtccaccaaaggctgctcgggaagggtcaacacacttgagcagccttagctagactgaccagggagaaagagagaagactcagaagccagaatggtgaaagaacgagggcactttgctaagcagacgccacggacgactgcacagcagcacgccagataactcagaagaagcaagcacgcggctgtgcacgcttccgaaatgcactccagaagaaaatctcagtacatctataggaagtgaagaggctgagttagtcccttagaaacgtcccagtggccgggccgggtgtggtggctcacgcctgtaatcccaacacttcaggtggccgaggtgggcggatctgagtccaggagtttgagaccagcctgggcaacatagcaagaccccatctatataaaacattaaaaagggccaggcgcggtggctcacgcctgtaatcccagcactttgggaggccgaggcgggcagatcacttgaggtcaggagttcgagaccagcctggccaacacaatgaaaccccgactctactacaaatacaaaaacttagctgggcatggtggcgggcgcctgtagtcccagctactcgagaggctgaggcaggagaatggcatgaacccaggaggcggagcttgcagtgagccgagattgcgccactgcactccatcctgggcaacggagcaagactccatctccaaaaaaaaaaaaaaaaaatcccacaaagaaaagctcaggctcagagccttcacgatagaatttttctaagcagttaaggaagaattaacaccaatccttcacagactctttccaagaatacagcaggtgggaacgcttcccattcatacggaaacgggaggccgcaccccttaggaatgcacacgtggggtcctcaagaggttacatgcaaactaaccccagcagcacacagagaaggcgcataagccgcgaccaggaggggttgctcccgagtccgtggcaggaaccagaggccacatgtggctgctcgtatttaagttaattaaaatggaacgatggccgggtgtggtggctcacacctgtaatcccagcactttgggaggcggaggcgggcagatcacttgaggtcaggagttccaagaccagcctggccaacacagtgaaaccccgtctctactaaaaatacaaaaaattagctgggcatggtggcaggcacctgtaatcccagctactcaggaggctgagccaggacaatcgcctgaacgcgggaggtggaggttgcagtgagctgagattgcgccattgcactccagcctgggtgacagcgagactccatctaaaaaagaaaatatgaaatttaaaactctgttccttagctgcaccagtctgctgtcaagtgttcagtggcacacgtcgcgaggggctgccatcacggacggtgcagatgtcccatatatccagcattctaggacattctgtcagatggcaccgggctctgtcctgtctgctgaggaggtggcttctcatccctgtcctgagcaggtctgagctgccgcccgctgaccactgccctcgtcctgcaggtggctgggagcccgagccccacacctgccgggcagcaggtgctggacatcgacagctgcctggactcgtccgtgctggacagctccttcctcacgttctcaggcctccacgctgaggtgaggactctactgggggtcctgggctgggctgggggtcctgccgccttggcgcagcttggactcaagacactgtgcacctctcagcaggcctttgttggacagatgaagagtgacttgtttctggatgattctaagag

SEQ ID NO: 13227 - DNA, 3386 bp, Homo sapiens
ctgacggcctccaaccacgtgagcaacgtcaccgtgaactacaacgtaaccgtggagcggatgaacaggatgcagggtctgcaggtctccacagtgccggccgtgctgtcccccaatgccacgctagcactgacggcgggcgtgctggtggactcggccgtggaggtggccttcctgtggacctttggggatggggagcaggccctccaccagttccagcctccgtacaacgagtccttcccggttccagacccctcggtggcccaggtgctggtggagcacaatgtcatgcacacctacgctgccccaggtgctgatccggagtggccgggtgcccattgtgtccttggagtgtgtgtcctgcaaggcacaggccgtgtacgaagtgagccgcagctcctacgtgtacttggagggccgctgcctcaattgcagcagcggctccaagcgagggcggtgggctgcacgtacgttcagcaacaagacgctggtgctggatgagaccaccacatccacgggcagtgcaggcatgcgactggtgctgcggcggggcgtgctgcgggacggcgagggatacaccttcacgctcacggtgctgggccgctctggcgaggaggagggctgcgcctccatccgcctgtcccccaaccgcccgccgctggggggctcttgccgcctcttcccactgggcgctgtgcacgccctcaccaccaaggtgcacttcgaatgcacgggctggcatgacgcggaggatgctggcgccccgctggtgtacgccctgctgctgcggcgctgtcgccagggccactgcgaggagttctgtgtctacaagggcagcctctccagctacggagccgtgctgcccccgggtttcaggccacacttcgaggtgggcctggccgtggtggtgcaggaccagctgggagccgctgtggtcgccctcaacaggtctttggccatcaccctcccagagcccaacggcagcgcaacggggctcacagtctggctgcacgggctcaccgctagtgtgctcccagggctgctgcggcaggccgatccccagcacgtcatcgagtactcgttggccctggtcaccgtgctgaacgagtacgagcgggccctggacgtggcggcagagcccaagcacgagcggcagcaccgagcccagatacgcaagaacatcacggagactctggtgtccctgagggtccacactgtggatgacatccagcagatcgctgctgcgctggcccagtgcatggggcccagcagggagctcgtatgccgctcgtgcctgaagcagacgctgcacaagctggaggccatgatgctcatcctgcaggcagagaccaccgcgggcaccgtgacgcccaccgccatcggagacagcatcctcaacatcacaggagacctcatccacctggccagctcggacgtgcgggcaccacagccctcagagctgggagccgagtcaccatctcggatggtggcgtcccaggcctacaacctgacctctgccctcatgcgcatcctcatgcgctcccgcgtgctcaacgaggagcccctgacgctggcgggcgaggagatcgtggcccagggcaagcgctcggacccgcggagcctgctgtgctatggcggcgccccagggcctggctgccacttctccatccccgaggctttcagcggggccctggccaacctcagtgacgtggtgcagctcatctttctggtggactccaatccctttccctttggctatatcagcaactacaccgtctccaccaaggtggcctcgatggcattccagacacaggccggcgcccagatccccatcgagcggctggcctcagagcgcgccatcaccgtgaaggccactacctgtctgaggaacctgagccctacctggcagtctacctacactcggagccccggcccaatgagcacaactgctcggctagcaggaggatccgcccagagtcactccagggtgctgaccaccggccctacaccttcttcatttccccggggagcagagacccagcggggagttaccatctgaacctctccagccacttccgctggtcggcgctgcaggtgtccgtgggcctgtacacgtccctgtgccagtacttcagcgaggaggacatggtgtggcggacagaggggctgctgcccctggaggagacctcgccccgccaggccgtctgcctcacccgccacctcaccgccttcggcgccagcctcttcgtgcccccaagccatgtccgctttgtgtttcctgagccgacagcggatgtaaactacatcgtcatgctgacatgtgctgtgtgcctggtgacctacatggtcatggccgccatcctgcacaagctggaccagttggatgccagccggggccgcgccatccctttctgtgggcagcggggccgcttcaagtacgagatcctcgtcaagacaggctggggccggggctcaggtaccacggcccacgtgggcatcatgctgtatggggtggacagccggagcggccaccggcacctggacggcgacagagccttccaccgcaacagcctggacatcttccggatcgccaccccgcacagcctgggtagcgtgtggaagatccgagtgtggcacgacaacaaagggctcagccctgcctggttcctgcagcacgtcatcgtcagggacctgcagacggcacgcagcgccttcttcctggtcaatgactggctttcggtggagacggaggccaacgggggcctggtggagaaggaggtgctggccgcgagcgacgcagcccttttgcgcttccggcgcctgctggtggctgagctgcagcgtggcttctttgacaagcacatctggctctccatatgggaccggccgcctcgtagccgtttcactcgcatccagagggccacctgctgcgttctcctcatctgcctcttcctgggcgccaacgccgtgtggtacggggctgttggcgactctgcctacagcacggggcatgtgtccaggctgagcccgctgagcgtcgacacagtcgctgttggcctggtgtccagcgtggttgtctatcccgtctacctggccatcctttttctcttccggatgtcccggagcaaggtggctgggagcccgagccccacacctgccgggcagcaggtgctggacatcgacagctgcctggactcgtccgtgctggacagctccttcctcacgttctcaggcctccacgctgaggtgaggactctactgggggtcctgggctgggctgggggtcctgccgccttggcgcagcttggactcaagacactgtgcacctctcagcaggcctttgttggacagatgaagagtgacttgtttctggatgattctaagag

SEQ ID NO: 13228 - DNA, 14135 bp, Homo sapiens
gcactgcagcgccagcgtccgagcgggcggccgagctcccggagcggcctggccccgagccccgagcgggcgtcgctcagcagcaggtcgcggccgcagccccatccagccccgcgcccgccatgccgtccgcgggccccgcctgagctgcggcctccgcgcgcgggcgggcctggggacggcggggccatgcgcgcgctgccctaacgatgccgcccgccgcgcccgcccgcctggcgctggccctgggcctgggcctgtggctcggggcgctggcggggggccccgggcgcggctgcgggccctgcgagcccccctgcctctgcggcccagcgcccggcgccgcctgccgcgtcaactgctcgggccgcgggctgcggacgctcggtcccgcgctgcgcatccccgcggacgccacagcgctagacgtctcccacaacctgctccgggcgctggacgttgggctcctggcgaacctctcggcgctggcagagctggatataagcaacaacaagatttctacgttagaagaaggaatatttgctaatttatttaatttaagtgaaataaacctgagtgggaacccgtttgagtgtgactgtggcctggcgtggctgccgcgatgggcggaggagcagcaggtgcgggtggtgcagcccgaggcagccacgtgtgctgggcctggctccctggctggccagcctctgcttggcatccccttgctggacagtggctgtggtgaggagtatgtcgcctgcctccctgacaacagctcaggcaccgtggcagcagtgtccttttcagctgcccacgaaggcctgcttcagccagaggcctgcagcgccttctgcttctccaccggccagggcctcgcagccctctcggagcagggctggtgcctgtgtggggcggcccagccctccagtgcctcctttgcctgcctgtccctctgctccggccccccgccacctcctgcccccacctgtaggggccccaccctcctccagcacgtcttccctgcctccccaggggccaccctggtggggccccacggacctctggcctctggccagctagcagccttccacatcgctgccccgctccctgtcactgccacacgctgggacttcggagacggctccgccgaggtggatgccgctgggccggctgcctcgcatcgctatgtgctgcctgggcgctatcacgtgacggccgtgctggccctgggggccggctcagccctgctggggacagacgtgcaggtggaagcggcacctgccgccctggagctcgtgtgcccgtcctcggtgcagagtgacgagagcctcgacctcagcatccagaaccgcggtggttcaggcctggaggccgcctacagcatcgtggccctgggcgaggagccggcccgagcggtgcacccgctctgcccctcggacacggagatcttccctggcaacgggcactgctaccgcctggtggtggagaaggcggcctggctgcaggcgcaggagcagtgtcaggcctgggccggggccgccctggcaatggtggacagtcccgccgtgcagcgcttcctggtctcccgggtcaccaggagcctagacgtgtggatcggcttctcgactgtgcagggggtggaggtgggcccagcgccgcagggcgaggccttcagcctggagagctgccagaactggctgcccggggagccacacccagccacagccgagcactgcgtccggctcgggcccaccgggtggtgtaacaccgacctgtgctcagcgccgcacagctacgtctgcgagctgcagcccggaggcccagtgcaggatgccgagaacctcctcgtgggagcgcccagtggggacctgcagggacccctgacgcctctggcacagcaggacggcctctcagccccgcacgagcccgtggaggtcatggtattcccgggcctgcgtctgagccgtgaagccttcctcaccacggccgaatttgggacccaggagctccggcggcccgcccagctgcggctgcaggtgtaccggctcctcagcacagcagggaccccggagaacggcagcgagcctgagagcaggtccccggacaacaggacccagctggcccccgcgtgcatgccagggggacgctggtgccctggagccaacatctgcttgccgctggacgcctcctgccacccccaggcctgcgccaatggctgcacgtcagggccagggctacccggggccccctatgcgctatggagagagttcctcttctccgttcccgcggggccccccgcgcagtactcggtcaccctccacggccaggatgtcctcatgctccctggtgacctcgttggcttgcagcacgacgctggccctggcgccctcctgcactgctcgccggctcccggccaccctggtccccgggccccgtacctctccgccaacgcctcgtcatggctgccccacttgccagcccagctggagggcacttgggcctgccctgcctgtgccctgcggctgcttgcagccacggaacagctcaccgtgctgctgggcttgaggcccaaccctggactgcggctgcctgggcgctatgaggtccgggcagaggtgggcaatggcgtgtccaggcacaacctctcctgcagctttgacgtggtctccccagtggctgggctgcgggtcatctaccctgccccccgcgacggccgcctctacgtgcccaccaacggctcagccttggtgctccaggtggactctggtgccaacgccacggccacggctcgctggcctgggggcagtgtcagcgcccgctttgagaatgtctgccctgccctggtggccaccttcgtgcccggctgcccctgggagaccaacgataccctgttctcagtggtagcactgccgtggctcagtgagggggagcacgtggtggacgtggtggtggaaaacagcgccagccgggccaacctcagcctgcgggtgacggcggaggagcccatctgtggcctccgcgccacgcccagccccgaggcccgtgtactgcagggagtcctagtgaggtacagccccgtggtggaggccggctcggacatggtcttccggtggaccatcaacgacaagcagtccctgaccttccagaacgtggtcttcaatgtcatttatcagagcgcggcggtcttcaagctctcactgacggcctccaaccacgtgagcaacgtcaccgtgaactacaacgtaaccgtggagcggatgaacaggatgcagggtctgcaggtctccacagtgccggccgtgctgtcccccaatgccacgctagcactgacggcgggcgtgctggtggactcggccgtggaggtggccttcctgtggacctttggggatggggagcaggccctccaccagttccagcctccgtacaacgagtccttcccggttccagacccctcggtggcccaggtgctggtggagcacaatgtcatgcacacctacgctgccccaggtgagtacctcctgaccgtgctggcatctaatgccttcgagaacctgacgcagcaggtgcctgtgagcgtgcgcgcctccctgccctccgtggctgtgggtgtgagtgacggcgtcctggtggccggccggcccgtcaccttctacccgcacccgctgccctcgcctgggggtgttctttacacgtgggacttcggggacggctcccctgtcctgacccagagccagccggctgccaaccacacctatgcctcgaggggcacctaccacgtgcgcctggaggtcaacaacacggtgagcggtgcggcggcccaggcggatgtgcgcgtctttgaggagctccgcggactcagcgtggacatgagcctggccgtggagcagggcgcccccgtggtggtcagcgccgcggtgcagacgggcgacaacatcacgtggaccttcgacatgggggacggcaccgtgctgtcgggcccggaggcaacagtggagcatgtgtacctgcgggcacagaactgcacagtgaccgtgggtgcggccagccccgccggccacctggcccggagcctgcacgtgctggtcttcgtcctggaggtgctgcgcgttgaacccgccgcctgcatccccacgcagcctgacgcgcggctcacggcctacgtcaccgggaacccggcccactacctcttcgactggaccttcggggatggctcctccaacacgaccgtgcgggggtgcccgacggtgacacacaacttcacgcggagcggcacgttccccctggcgctggtgctgtccagccgcgtgaacagggcgcattacttcaccagcatctgcgtggagccagaggtgggcaacgtcaccctgcagccagagaggcagtttgtgcagctcggggacgaggcctggctggtggcatgtgcctggcccccgttcccctaccgctacacctgggactttggcaccgaggaagccgcccccacccgtgccaggggccctgaggtgacgttcatctaccgagacccaggctcctatcttgtgacagtcaccgcgtccaacaacatctctgctgccaatgactcagccctggtggaggtgcaggagcccgtgctggtcaccagcatcaaggtcaatggctcccttgggctggagctgcagcagccgtacctgttctctgctgtgggccgtgggcgccccgccagctacctgtgggatctgggggacggtgggtggctcgagggtccggaggtcacccacgcttacaacagcacaggtgacttcaccgttagggtggccggctggaatgaggtgagccgcagcgaggcctggctcaatgtgacggtgaagcggcgcgtgcgggggctcgtcgtcaatgcaagccgcacggtggtgcccctgaatgggagcgtgagcttcagcacgtcgctggaggccggcagtgatgtgcgctattcctgggtgctctgtgaccgctgcacgcccatccctgggggtcctaccatctcttacaccttccgctccgtgggcaccttcaatatcatcgtcacggctgagaacgaggtgggctccgcccaggacagcatcttcgtctatgtcctgcagctcatagaggggctgcaggtggtgggcggtggccgctacttccccaccaaccacacggtacagctgcaggccgtggttagggatggcaccaacgtctcctacagctggactgcctggagggacaggggcccggccctggccggcagcggcaaaggcttctcgctcaccgtgctcgaggccggcacctaccatgtgcagctgcgggccaccaacatgctgggcagcgcctgggccgactgcaccatggacttcgtggagcctgtggggtggctgatggtggccgcctccccgaacccagctgccgtcaacacaagcgtcaccctcagtgccgagctggctggtggcagtggtgtcgtatacacttggtccttggaggaggggctgagctgggagacctccgagccatttaccacccatagcttccccacacccggcctgcacttggtcaccatgacggcagggaacccgctgggctcagccaacgccaccgtggaagtggatgtgcaggtgcctgtgagtggcctcagcatcagggccagcgagcccggaggcagcttcgtggcggccgggtcctctgtgcccttttgggggcagctggccacgggcaccaatgtgagctggtgctgggctgtgcccggcggcagcagcaagcgtggccctcatgtcaccatggtcttcccggatgctggcaccttctccatccggctcaatgcctccaacgcagtcagctgggtctcagccacgtacaacctcacggcggaggagcccatcgtgggcctggtgctgtgggccagcagcaaggtggtggcgcccgggcagctggtccattttcagatcctgctggctgccggctcagctgtcaccttccgcctgcaggtcggcggggccaaccccgaggtgctccccgggccccgtttctcccacagcttcccccgcgtcggagaccacgtggtgagcgtgcggggcaaaaaccacgtgagctgggcccaggcgcaggtgcgcatcgtggtgctggaggccgtgagtgggctgcaggtgcccaactgctgcgagcctggcatcgccacgggcactgagaggaacttcacagcccgcgtgcagcgcggctctcgggtcgcctacgcctggtacttctcgctgcagaaggtccagggcgactcgctggtcatcctgtcgggccgcgacgtcacctacacgcccgtggccgcggggctgttggagatccaggtgcgcgccttcaacgccctgggcagtgagaaccgcacgctggtgctggaggttcaggacgccgtccagtatgtggccctgcagagcggcccctgcttcaccaaccgctcggcgcagtttgaggccgccaccagccccagcccccggcgtgtggcctaccactgggactttggggatgggtcgccagggcaggacacagatgagcccagggccgagcactcctacctgaggcctggggactaccgcgtgcaggtgaacgcctccaacctggtgagcttcttcgtggcgcaggccacggtgaccgtccaggtgctggcctgccgggagccggaggtggacgtggtcctgcccctgcaggtgctgatgcggcgatcacagcgcaactacttggaggcccacgttgacctgcgcgactgcgtcacctaccagactgagtaccgctgggaggtgtatcgcaccgccagctgccagcggccggggcgcccagcgcgtgtggccctgcccggcgtggacgtgagccggcctcggctggtgctgccgcggctggcgctgcctgtggggcactactgctttgtgtttgtcgtgtcatttggggacacgccactgacacagagcatccaggccaatgtgacggtggcccccgagcgcctggtgcccatcattgagggtggctcataccgcgtgtggtcagacacacgggacctggtgctggatgggagcgagtcctacgaccccaacctggaggacggcgaccagacgccgctcagtttccactgggcctgtgtggcttcgacacagagggaggctggcgggtgtgcgctgaactttgggccccgcgggagcagcacggtcaccattccacgggagcggctggcggctggcgtggagtacaccttcagcctgaccgtgtggaaggccggccgcaaggaggaggccaccaaccagacggtgctgatccggagtggccgggtgcccattgtgtccttggagtgtgtgtcctgcaaggcacaggccgtgtacgaagtgagccgcagctcctacgtgtacttggagggccgctgcctcaattgcagcagcggctccaagcgagggcggtgggctgcacgtacgttcagcaacaagacgctggtgctggatgagaccaccacatccacgggcagtgcaggcatgcgactggtgctgcggcggggcgtgctgcgggacggcgagggatacaccttcacgctcacggtgctgggccgctctggcgaggaggagggctgcgcctccatccgcctgtcccccaaccgcccgccgctggggggctcttgccgcctcttcccactgggcgctgtgcacgccctcaccaccaaggtgcacttcgaatgcacgggctggcatgacgcggaggatgctggcgccccgctggtgtacgccctgctgctgcggcgctgtcgccagggccactgcgaggagttctgtgtctacaagggcagcctctccagctacggagccgtgctgcccccgggtttcaggccacacttcgaggtgggcctggccgtggtggtgcaggaccagctgggagccgctgtggtcgccctcaacaggtctttggccatcaccctcccagagcccaacggcagcgcaacggggctcacagtctggctgcacgggctcaccgctagtgtgctcccagggctgctgcggcaggccgatccccagcacgtcatcgagtactcgttggccctggtcaccgtgctgaacgagtacgagcgggccctggacgtggcggcagagcccaagcacgagcggcagcaccgagcccagatacgcaagaacatcacggagactctggtgtccctgagggtccacactgtggatgacatccagcagatcgctgctgcgctggcccagtgcatggggcccagcagggagctcgtatgccgctcgtgcctgaagcagacgctgcacaagctggaggccatgatgctcatcctgcaggcagagaccaccgcgggcaccgtgacgcccaccgccatcggagacagcatcctcaacatcacaggagacctcatccacctggccagctcggacgtgcgggcaccacagccctcagagctgggagccgagtcaccatctcggatggtggcgtcccaggcctacaacctgacctctgccctcatgcgcatcctcatgcgctcccgcgtgctcaacgaggagcccctgacgctggcgggcgaggagatcgtggcccagggcaagcgctcggacccgcggagcctgctgtgctatggcggcgccccagggcctggctgccacttctccatccccgaggctttcagcggggccctggccaacctcagtgacgtggtgcagctcatctttctggtggactccaatccctttccctttggctatatcagcaactacaccgtctccaccaaggtggcctcgatggcattccagacacaggccggcgcccagatccccatcgagcggctggcctcagagcgcgccatcaccgtgaaggtgcccaacaactcggactgggctgcccggggccaccgcagctccgccaactccgccaactccgttgtggtccagccccaggcctccgtcggtgctgtggtcaccctggacagcagcaaccctgcggccgggctgcatctgcagctcaactatacgctgctggacggccactacctgtctgaggaacctgagccctacctggcagtctacctacactcggagccccggcccaatgagcacaactgctcggctagcaggaggatccgcccagagtcactccagggtgctgaccaccggccctacaccttcttcatttccccggggagcagagacccagcggggagttaccatctgaacctctccagccacttccgctggtcggcgctgcaggtgtccgtgggcctgtacacgtccctgtgccagtacttcagcgaggaggacatggtgtggcggacagaggggctgctgcccctggaggagacctcgccccgccaggccgtctgcctcacccgccacctcaccgccttcggcgccagcctcttcgtgcccccaagccatgtccgctttgtgtttcctgagccgacagcggatgtaaactacatcgtcatgctgacatgtgctgtgtgcctggtgacctacatggtcatggccgccatcctgcacaagctggaccagttggatgccagccggggccgcgccatccctttctgtgggcagcggggccgcttcaagtacgagatcctcgtcaagacaggctggggccggggctcaggtaccacggcccacgtgggcatcatgctgtatggggtggacagccggagcggccaccggcacctggacggcgacagagccttccaccgcaacagcctggacatcttccggatcgccaccccgcacagcctgggtagcgtgtggaagatccgagtgtggcacgacaacaaagggctcagccctgcctggttcctgcagcacgtcatcgtcagggacctgcagacggcacgcagcgccttcttcctggtcaatgactggctttcggtggagacggaggccaacgggggcctggtggagaaggaggtgctggccgcgagcgacgcagcccttttgcgcttccggcgcctgctggtggctgagctgcagcgtggcttctttgacaagcacatctggctctccatatgggaccggccgcctcgtagccgtttcactcgcatccagagggccacctgctgcgttctcctcatctgcctcttcctgggcgccaacgccgtgtggtacggggctgttggcgactctgcctacagcacggggcatgtgtccaggctgagcccgctgagcgtcgacacagtcgctgttggcctggtgtccagcgtggttgtctatcccgtctacctggccatcctttttctcttccggatgtcccggagcaaggtggctgggagcccgagccccacacctgccgggcagcaggtgctggacatcgacagctgcctggactcgtccgtgctggacagctccttcctcacgttctcaggcctccacgctgaggcctttgttggacagatgaagagtgacttgtttctggatgattctaagagtctggtgtgctggccctccggcgagggaacgctcagttggccggacctgctcagtgacccgtccattgtgggtagcaatctgcggcagctggcacggggccaggcgggccatgggctgggcccagaggaggacggcttctccctggccagcccctactcgcctgccaaatccttctcagcatcagatgaagacctgatccagcaggtccttgccgagggggtcagcagcccagcccctacccaagacacccacatggaaacggacctgctcagcagcctgtccagcactcctggggagaagacagagacgctggcgctgcagaggctgggggagctggggccacccagcccaggcctgaactgggaacagccccaggcagcgaggctgtccaggacaggactggtggagggtctgcggaagcgcctgctgccggcctggtgtgcctccctggcccacgggctcagcctgctcctggtggctgtggctgtggctgtctcagggtgggtgggtgcgagcttccccccgggcgtgagtgttgcgtggctcctgtccagcagcgccagcttcctggcctcattcctcggctgggagccactgaaggtcttgctggaagccctgtacttctcactggtggccaagcggctgcacccggatgaagatgacaccctggtagagagcccggctgtgacgcctgtgagcgcacgtgtgccccgcgtacggccaccccacggctttgcactcttcctggccaaggaagaagcccgcaaggtcaagaggctacatggcatgctgcggagcctcctggtgtacatgctttttctgctggtgaccctgctggccagctatggggatgcctcatgccatgggcacgcctaccgtctgcaaagcgccatcaagcaggagctgcacagccgggccttcctggccatcacgcggtctgaggagctctggccatggatggcccacgtgctgctgccctacgtccacgggaaccagtccagcccagagctggggcccccacggctgcggcaggtgcggctgcaggaagcactctacccagaccctcccggccccagggtccacacgtgctcggccgcaggaggcttcagcaccagcgattacgacgttggctgggagagtcctcacaatggctcggggacgtgggcctattcagcgccggatctgctgggggcatggtcctggggctcctgtgccgtgtatgacagcgggggctacgtgcaggagctgggcctgagcctggaggagagccgcgaccggctgcgcttcctgcagctgcacaactggctggacaacaggagccgcgctgtgttcctggagctcacgcgctacagcccggccgtggggctgcacgccgccgtcacgctgcgcctcgagttcccggcggccggccgcgccctggccgccctcagcgtccgcccctttgcgctgcgccgcctcagcgcgggcctctcgctgcctctgctcacctcggtgtgcctgctgctgttcgccgtgcacttcgccgtggccgaggcccgtacttggcacagggaagggcgctggcgcgtgctgcggctcggagcctgggcgcggtggctgctggtggcgctgacggcggccacggcactggtacgcctcgcccagctgggtgccgctgaccgccagtggacccgtttcgtgcgcggccgcccgcgccgcttcactagcttcgaccaggtggcgcagctgagctccgcagcccgtggcctggcggcctcgctgctcttcctgcttttggtcaaggctgcccagcagctacgcttcgtgcgccagtggtccgtctttggcaagacattatgccgagctctgccagagctcctgggggtcaccttgggcctggtggtgctcggggtagcctacgcccagctggccatcctgctcgtgtcttcctgtgtggactccctctggagcgtggcccaggccctgttggtgctgtgccctgggactgggctctctaccctgtgtcctgccgagtcctggcacctgtcacccctgctgtgtgtggggctctgggcactgcggctgtggggcgccctacggctgggggctgttattctccgctggcgctaccacgccttgcgtggagagctgtaccggccggcctgggagccccaggactacgagatggtggagttgttcctgcgcaggctgcgcctctggatgggcctcagcaaggtcaaggagttccgccacaaagtccgctttgaagggatggagccgctgccctctcgctcctccaggggctccaaggtatccccggatgtgcccccacccagcgctggctccgatgcctcgcacccctccacctcctccagccagctggatgggctgagcgtgagcctgggccggctggggacaaggtgtgagcctgagccctcccgcctccaagccgtgttcgaggccctgctcacccagtttgaccgactcaaccaggccacagaggacgtctaccagctggagcagcagctgcacagcctgcaaggccgcaggagcagccgggcgcccgccggatcttcccgtggcccatccccgggcctgcggccagcactgcccagccgccttgcccgggccagtcggggtgtggacctggccactggccccagcaggacaccccttcgggccaagaacaaggtccaccccagcagcacttagtcctccttcctggcgggggtgggccgtggagtcggagtggacaccgctcagtattactttctgccgctgtcaaggccgagggccaggcagaatggctgcacgtaggttccccagagagcaggcaggggcatctgtctgtctgtgggcttcagcactttaaagaggctgtgtggccaaccaggacccagggtcccctccccagctcccttgggaaggacacagcagtattggacggtttctagcctctgagatgctaatttatttccccgagtcctcaggtacagcgggctgtgcccggccccaccccctgggcagatgtcccccactgctaaggctgctggcttcagggagggttagcctgcaccgccgccaccctgcccctaagttattacctctccagttcctaccgtactccctgcaccgtctcactgtgtgtctcgtgtcagtaatttatatggtgttaaaatgtgtatatttttgtatgtcactattttcactagggctgaggggcctgcgcccagagctggcctcccccaacacctgctgcgcttggtaggtgtggtggcgttatggcagcccggctgctgcttggatgcgagcttggccttgggccggtgctgggggcacagctgtctgccaggcactctcatcaccccagaggccttgtcatcctcccttgccccaggccaggtagcaagagagcagcgcccaggcctgctggcatcaggtctgggcaagtagcaggactaggcatgtcagaggaccccagggtggttagaggaaaagactcctcctgggggctggctcccagggtggaggaaggtgactgtgtgtgtgtgtgtgtgcgcgcgcgcacgcgcgagtgtgctgtatggcccaggcagcctcaaggccctcggagctggctgtgcctgcttctgtgtaccacttctgtgggcatggccgcttctagagcctcgacacccccccaacccccgcaccaagcagacaaagtcaataaaagagctgtctgactgc

SEQ ID NO: 13229 - DNA, 3990 bp, Homo sapiens
gtggtggaggccggctcggacatggtcttccggtggaccatcaacgacaagcagtccctgaccttccagaacgtggtcttcaatgtcatttatcagagcgcggcggtcttcaagctctcagtaggtgggcgggggtggggaggggaggggatggggcggggcagggcgggggcgggctccaccttcacctctgccttctgctctgcttcatgctgcccgaggacgctgccatggctgtgggtgagtggagggagggacgccaatcagggccaggcctctcacctgccacctgggctcactgacgcctgtccctgcagctgacggcctccaaccacgtgagcaacgtcaccgtgaactacaacgtaaccgtggagcggatgaacaggatgcagggtctgcaggtctccacagtgccggccgtgctgtcccccaatgccacgctagcactgacggcgggcgtgctggtggactcggccgtggaggtggccttcctgtgagtgactcgggggccggtttggggtgggcaccaggctcttgtcccagccccagcctcagccgagggacccccacatcacggggttgcttttctgagcctcggtttccctgtctgttgggaggtaactgggtgcacaggagccctgaggctgcacgggagccgggagaggcctcagcacagccgggtgggccctgaatggaggcccggggcgtgactgcagagtggagcctcggctgggtcccaagcaccccctgccccgccaccgcccacccctgtcccggttcactcactgcgtcccaccgccccggcaggtggacctttggggatggggagcaggccctccaccagttccagcctccgtacaacgagtccttcccggttccagacccctcggtggcccaggtgctggtggagcacaatgtcatgcacacctacgctgccccaggtgagggatgagggggtgagggggccactgcctttcaggctctgagcacggggtccccccagctccccagtcaagctgccccccttcctccccaacagccctcactgtgacctcacctgggctgatggcttaggcccctactggggtgagggaggggccaggcgtggggggagtggacagggaagctgggcccctgaactgcgccccccgccctccccgggcctggctcttgctgctctgctgccccgagtgcagctgcacttggaggcggtgccgtcctcgccaggcagccctcagtgctgctacacctgtgctccgtcccgcacgtggcttgggagcctgggacccttaaggctgggccgcaggtgcagccgttcaccccgggctcctcaggcggggggcttctgccgagcgggtggggagcaggtgggggtgccgcggctgccccactcgggcctgtccccacaggtgagtacctcctgaccgtgctggcatctaatgccttcgagaacctgacgcagcaggtgcctgtgagcgtgcgcgcctccctgccctccgtggctgtgggtgtgagtgacggcgtcctggtggccggccggcccgtcaccttctacccgcacccgctgccctcgcctgggggtgttctttacacgtgggacttcggggacggctcccctgtcctgacccagagccagccggctgccaaccacacctatgcctcgaggggcacctaccacgtgcgcctggaggtcaacaacacggtgagcggtgcggcggcccaggcggatgtgcgcgtctttgaggagctccgcggactcagcgtggacatgagcctggccgtggagcagggcgcccccgtggtggtcagcgccgcggtgcagacgggcgacaacatcacgtggaccttcgacatgggggacggcaccgtgctgtcgggcccggaggcaacagtggagcatgtgtacctgcgggcacagaactgcacagtgaccgtgggtgcggccagccccgccggccacctggcccggagcctgcacgtgctggtcttcgtcctggaggtgctgcgcgttgaacccgccgcctgcatccccacgcagcctgacgcgcggctcacggcctacgtcaccgggaacccggcccactacctcttcgactggaccttcggggatggctcctccaacacgaccgtgcgggggtgcccgacggtgacacacaacttcacgcggagcggcacgttccccctggcgctggtgctgtccagccgcgtgaacagggcgcattacttcaccagcatctgcgtggagccagaggtgggcaacgtcaccctgcagccagagaggcagtttgtgcagctcggggacgaggcctggctggtggcatgtgcctggcccccgttcccctaccgctacacctgggactttggcaccgaggaagccgcccccacccgtgccaggggccctgaggtgacgttcatctaccgagacccaggctcctatcttgtgacagtcaccgcgtccaacaacatctctgctgccaatgactcagccctggtggaggtgcaggagcccgtgctggtcaccagcatcaaggtcaatggctcccttgggctggagctgcagcagccgtacctgttctctgctgtgggccgtgggcgccccgccagctacctgtgggatctgggggacggtgggtggctcgagggtccggaggtcacccacgcttacaacagcacaggtgacttcaccgttagggtggccggctggaatgaggtgagccgcagcgaggcctggctcaatgtgacggtgaagcggcgcgtgcgggggctcgtcgtcaatgcaagccgcacggtggtgcccctgaatgggagcgtgagcttcagcacgtcgctggaggccggcagtgatgtgcgctattcctgggtgctctgtgaccgctgcacgcccatccctgggggtcctaccatctcttacaccttccgctccgtgggcaccttcaatatcatcgtcacggctgagaacgaggtgggctccgcccaggacagcatcttcgtctatgtcctgcagctcatagaggggctgcaggtggtgggcggtggccgctacttccccaccaaccacacggtacagctgcaggccgtggttagggatggcaccaacgtctcctacagctggactgcctggagggacaggggcccggccctggccggcagcggcaaaggcttctcgctcaccgtgctcgaggccggcacctaccatgtgcagctgcgggccaccaacatgctgggcagcgcctgggccgactgcaccatggacttcgtggagcctgtggggtggctgatggtggccgcctccccgaacccagctgccgtcaacacaagcgtcaccctcagtgccgagctggctggtggcagtggtgtcgtatacacttggtccttggaggaggggctgagctgggagacctccgagccatttaccacccatagcttccccacacccggcctgcacttggtcaccatgacggcagggaacccgctgggctcagccaacgccaccgtggaagtggatgtgcaggtgcctgtgagtggcctcagcatcagggccagcgagcccggaggcagcttcgtggcggccgggtcctctgtgcccttttgggggcagctggccacgggcaccaatgtgagctggtgctgggctgtgcccggcggcagcagcaagcgtggccctcatgtcaccatggtcttcccggatgctggcaccttctccatccggctcaatgcctccaacgcagtcagctgggtctcagccacgtacaacctcacggcggaggagcccatcgtgggcctggtgctgtgggccagcagcaaggtggtggcgcccgggcagctggtccattttcagatcctgctggctgccggctcagctgtcaccttccgcctgcaggtcggcggggccaaccccgaggtgctccccgggccccgtttctcccacagcttcccccgcgtcggagaccacgtggtgagcgtgcggggcaaaaaccacgtgagctgggc

SEQ ID NO: 13230 - DNA, 490 bp, Homo sapiens
gtggtggaggccggctcggacatggtcttccggtggaccatcaacgacaagcagtccctgaccttccagaacgtggtcttcaatgtcatttatcagagcgcggcggtcttcaagctctcactgacggcctccaaccacgtgagcaacgtcaccgtgaactacaacgtaaccgtggagcggatgaacaggatgcagggtctgcaggtctccacagtgccggccgtgctgtcccccaatgccacgctagcactgacggcgggcgtgctggtggactcggccgtggaggtggccttcctgtggacctttggggatggggagcaggccctccaccagttccagcctccgtacaacgagtccttcccggttccagacccctcggtggcccaggtgctggtggagcacaatgtcatgcacacctacgctgccccagcttcccccgcgtcggagaccacgtggtgagcgtgcggggcaaaaaccacgtgagctgggc

SEQ ID NO: 13231 - DNA, 1441 bp, Homo sapiens
caggatgcagggtctgcaggtctccacagtgccggccgtgctgtcccccaatgccacgctagcactgacggcgggcgtgctggtggactcggccgtggaggtggccttcctgtgagtgactcgggggccggtttggggtgggcaccaggctcttgtcccagccccagcctcagccgagggacccccacatcacggggttgcttttctgagcctcggtttccctgtctgttgggaggtaactgggtgcacaggagccctgaggctgcacgggagccgggagaggcctcagcacagccgggtgggccctgaatggaggcccggggcgtgactgcagagtggagcctcggctgggtcccaagcaccccctgccccgccaccgcccacccctgtcccggttcactcactgcgtcccaccgccccggcaggtggacctttggggatggggagcaggccctccaccagttccagcctccgtacaacgagtccttcccggttccagacccctcggtggcccaggtgctggtggagcacaatgtcatgcacacctacgctgccccaggtgagggatgagggggtgagggggccactgcctttcaggctctgagcacggggtccccccagctccccagtcaagctgccccccttcctccccaacagccctcactgtgacctcacctgggctgatggcttaggcccctactggggtgagggaggggccaggcgtggggggagtggacagggaagctgggcccctgaactgcgccccccgccctccccgggcctggctcttgctgctctgctgccccgagtgcagctgcacttggaggcggtgccgtcctcgccaggcagccctcagtgctgctacacctgtgctccgtcccgcacgtggcttgggagcctgggacccttaaggctgggccgcaggtgcagccgttcaccccgggctcctcaggcggggggcttctgccgagcgggtggggagcaggtgggggtgccgcggctgccccactcgggcctgtccccacaggtgagtacctcctgaccgtgctggcatctaatgccttcgagaacctgacgcagcaggtgcctgtgagcgtgcgcgcctccctgccctccgtggctgtgggtgtgagtgacggcgtcctggtggccggccggcccgtcaccttctacccgcacccgctgccctcgcctgggggtgttctttacacgtgggacttcggggacggctcccctgtcctgacccagagccagccggctgccaaccacacctatgcctcgaggggcacctaccacgtgcgcctggaggtcaacaacacggtgagcggtgcggcggcccaggcggatgtgcgcgtctttgaggagctccgcggactcagcgtggacatgagcctggccgtggagcagggcgcccccgtggtggtcagcgccgcggtgcaga

SEQ ID NO: 13232 - DNA, 659 bp, Homo sapiens
caggatgcagggtctgcaggtctccacagtgccggccgtgctgtcccccaatgccacgctagcactgacggcgggcgtgctggtggactcggccgtggaggtggccttcctgtggacctttggggatggggagcaggccctccaccagttccagcctccgtacaacgagtccttcccggttccagacccctcggtggcccaggtgctggtggagcacaatgtcatgcacacctacgctgccccaggtgagtacctcctgaccgtgctggcatctaatgccttcgagaacctgacgcagcaggtgcctgtgagcgtgcgcgcctccctgccctccgtggctgtgggtgtgagtgacggcgtcctggtggccggccggcccgtcaccttctacccgcacccgctgccctcgcctgggggtgttctttacacgtgggacttcggggacggctcccctgtcctgacccagagccagccggctgccaaccacacctatgcctcgaggggcacctaccacgtgcgcctggaggtcaacaacacggtgagcggtgcggcggcccaggcggatgtgcgcgtctttgaggagctccgcggactcagcgtggacatgagcctggccgtggagcagggcgcccccgtggtggtcagcgccgcggtgcaga

SEQ ID NO: 13233 - DNA, 755 bp, Homo sapiens
gccgggactgcctgtgtggctccttgagtgcgcacaggccaaagctgagatgacttgcctgggatgccacacgtgttgggcagcagaccgagcctcccacccctccctcttgcctcccaggtaccacggcccacgtgggcatcatgctgtatggggtggacagccggagcggccaccggcacctggacggcgacagagccttccaccgcaacagcctggacatcttccggatcgccaccccgcacagcctgggtagcgtgtggaagatccgagtgtggcacgacaacaaaggtttgtgcggaccctgccaagctctgcccctctgcccccgcattggggcgccctgcgagcctgacctccctcctgcgcctctgcagggctcagccctgcctggttcctgcagcacgtcatcgtcagggacctgcagacggcacgcagcgccttcttcctggtcaatgactggctttcggtggagacggaggccaacgggggcctggtggagaaggaggtgctggccgcgagtaaggcctcgttccatgttcccactccgtgggaggttgggcagggtggtcctgccccgtggcctcctgcagtgcggccctccctgccttctaggcgacgcagcccttttgcgcttccggcgcctgctggtggctgagctgcagcgtggcttctttgacaagcacatctggctctccatatgggaccggccgcctcgtagccgtttcactcgcatccagagggccacctgctgc

SEQ ID NO: 13234 - DNA, 661 bp, Homo sapiens
gccgggactgcctgtgtggctccttgagtgcgcacaggccaaagctgagatgacttgcctgggatgccacacgtgttgggcagcagaccgagcctcccacccctccctcttgcctcccaggtaccacggcccacgtgggcatcatgctgtatggggtggacagccggagcggccaccggcacctggacggcgacagagccttccaccgcaacagcctggacatcttccggatcgccaccccgcacagcctgggtagcgtgtggaagatccgagtgtggcacgacaacaaaggtttgtgcggaccctgccaagctctgcccctctgcccccgcattggggcgccctgcgagcctgacctccctcctgcgcctctgcagggctcagccctgcctggttcctgcagcacgtcatcgtcagggacctgcagacggcacgcagcgccttcttcctggtcaatgactggctttcggtggagacggaggccaacgggggcctggtggagaaggaggtgctggccgcgagcgacgcagcccttttgcgcttccggcgcctgctggtggctgagctgcagcgtggcttctttgacaagcacatctggctctccatatgggaccggccgcctcgtagccgtttcactcgcatccagagggccacctgctgc

SEQ ID NO: 13235 - DNA, 4855 bp, Homo sapiens
gcggagcctgctgtgctatggcggcgccccagggcctggctgccacttctccatccccgaggctttcagcggggccctggccaacctcagtgacgtggtgcagctcatctttctggtggactccaatccctttccctttggctatatcagcaactacaccgtctccaccaaggtggcctcgatggcattccagacacaggccggcgcccagatccccatcgagcggctggcctcagagcgcgccatcaccgtgaaggtgcccaacaactcggactgggctgcccggggccaccgcagctccgccaactccgccaactccgttgtggtccagccccaggcctccgtcggtgctgtggtcaccctggacagcagcaaccctgcggccgggctgcatctgcagctcaactatacgctgctggacggtgcgtgcagcgggtggggcacacgcggccccctggccttgttcttggggggaaggcgtttctcgtagggcttccatgggtgtctctggtgaaatttgctttctgtttcatgggctgctgggggcctggccagagaggagctgggggccacggagaagcaggtgccagctctggtgcagaggctcctatggcctttcaggcccgtggcagagggtgggctcaggagggccatcgtgggtgtcccccgggtggttgagcttcccggcaggcgtgtgacctgcgcgttctgccccaggccactacctgtctgaggaacctgagccctacctggcagtctacctacactcggagccccggcccaatgagcacaactgctcggctagcaggaggatccgcccagagtcactccagggtgctgaccaccggccctacaccttcttcatttccccggggtgagctctgcgggccagcctggcagggcagggcagggcatcatgggtcagcattgcctgggttactggccccatggggacggcaggcagcgaggggactggaccgggtatgggctctgagactgcgacatccaacctggcggagcctgggctcacgtccgctaccccttccctgcccaggagcagagacccagcggggagttaccatctgaacctctccagccacttccgctggtcggcgctgcaggtgtccgtgggcctgtacacgtccctgtgccagtacttcagcgaggaggacatggtgtggcggacagaggggctgctgcccctggaggagacctcgccccgccaggccgtctgcctcacccgccacctcaccgccttcggcgccagcctcttcgtgcccccaagccatgtccgctttgtgtttcctgtgagtgaccctgtgctcctgggagcctctgcagagtcgaggagggcctgggtgggctcggctctatcctgagaaggcacagcttgcacgtgacctcctgggcccggcggctgtgtcctcacaggagccgacagcggatgtaaactacatcgtcatgctgacatgtgctgtgtgcctggtgacctacatggtcatggccgccatcctgcacaagctggaccagttggatgccagccggggccgcgccatccctttctgtgggcagcggggccgcttcaagtacgagatcctcgtcaagacaggctggggccggggctcaggtgaggggcgcagcggggtggcagggcctcccctgctctcactggctgtgctggttgcaccctctgggagtgagtctcgtcgcaggcgtcagaacaaggcagtttttgcagtgctgtgtgaagggctcgtgtgttcatcctgggaatgacctcgtgagcactcactgtccctgaggactaggacagctcctagctggaagtaggtgccagtcagtcagggtgggcagcccacgttctgcacagtagcgtggccccacaagtgacgtgagcatcgctaccactgtgggagactgtgcatccacccgcgatcctgactgcatagctcgtctctcagacggaggcgccagcaccctccccgtggctgtttcttcagtacctccattttcctttcattggaattgcccttctggcattccctttttgttttcgtttttctttttttagagacggagtctcactctgttgcccaggctggagtgcaatggcatgatcttggctcacagcaacttccagctcccgggtttaagccattccccttaagcgattctcctgagtagctgggagtacaggtgcacaccaccacacccagttaatttttcaccatgtcagccaggcgaactcctgacctcaggtgatccgcctgcctcggcctgccagagtgctgggatgacaggtgtgagccaccacacctggctgtgttcccattttttatctctgtgctgctttcctcttcattgcccagttctttcttttgattacctacttttaaaaactgtcggccgggcgcggtggctcacacctgtaatccgagcactttgggaggccaggcaggcaaatcacggggtcaggagatcgagaccatcctggctaacggtgaaaccctgtctctaataaaaagtacaaaaaaattagcccggcgtagtggcaggcgcctgtagtcccagctccttgggagactgaggcaggagaatggcgtgaacccgggaggcggagcttgcagtgagctgagattgcgccactgcactccagcctgggtgacacagcaagactccatctcaaaaaaaaaagaaaaaaaatactgtcacctgggtctgtcactgggagaggaggtgacacagcttcacgctttgcagtctgtgcatgaactgagggacgggtgtgtggtgcgggtcaccggttgtggcatgactgaggcgtggacaggtgtgcagtgcgggtcactggttgtggtgtggactgaggcgtgtgcagccatgtttgcatgtcacaagttacagttctttccatgtaacttaatcatgtccttgaggtcctgctgttaattggacaaattgcagtaaccgcagctccttgtgtatggcagagccgtgcaaagccgggactgcctgtgtggctccttgagtgcgcacaggccaaagctgagatgacttgcctgggatgccacacgtgttgggcagcagaccgagcctcccacccctccctcttgcctcccaggtaccacggcccacgtgggcatcatgctgtatggggtggacagccggagcggccaccggcacctggacggcgacagagccttccaccgcaacagcctggacatcttccggatcgccaccccgcacagcctgggtagcgtgtggaagatccgagtgtggcacgacaacaaaggtttgtgcggaccctgccaagctctgcccctctgcccccgcattggggcgccctgcgagcctgacctccctcctgcgcctctgcagggctcagccctgcctggttcctgcagcacgtcatcgtcagggacctgcagacggcacgcagcgccttcttcctggtcaatgactggctttcggtggagacggaggccaacgggggcctggtggagaaggaggtgctggccgcgagtaaggcctcgttccatgttcccactccgtgggaggttgggcagggtggtcctgccccgtggcctcctgcagtgcggccctccctgccttctaggcgacgcagcccttttgcgcttccggcgcctgctggtggctgagctgcagcgtggcttctttgacaagcacatctggctctccatatgggaccggccgcctcgtagccgtttcactcgcatccagagggccacctgctgcgttctcctcatctgcctcttcctgggcgccaacgccgtgtggtacggggctgttggcgactctgcctacaggtgggtgccgtaggggtcggggcagcctcttcctgcccagcccttcctgcccctcagcctcacctgtgtggcctcctctcctccacacagcacggggcatgtgtccaggctgagcccgctgagcgtcgacacagtcgctgttggcctggtgtccagcgtggttgtctatcccgtctacctggccatcctttttctcttccggatgtcccggagcaaggtgggctggggctggggacccgggagtactgggaatggagcctgggcctcggcaccatgcctagggccgccactttccagtgctgcagccagagggaaaggcgtccaccaaaggctgctcgggaagggtcaacacacttgagcagccttagctagactgaccagggagaaagagagaagactcagaagccagaatggtgaaagaacgagggcactttgctaagcagacgccacggacgactgcacagcagcacgccagataactcagaagaagcaagcacgcggctgtgcacgcttccgaaatgcactccagaagaaaatctcagtacatctataggaagtgaagaggctgagttagtcccttagaaacgtcccagtggccgggccgggtgtggtggctcacgcctgtaatcccaacacttcaggtggccgaggtgggcggatctgagtccaggagtttgagaccagcctgggcaacatagcaagaccccatctatataaaacattaaaaagggccaggcgcggtggctcacgcctgtaatcccagcactttgggaggccgaggcgggcagatcacttgaggtcaggagttcgagaccagcctggccaacacaatgaaaccccgactctactacaaatacaaaaacttagctgggcatggtggcgggcgcctgtagtcccagctactcgagaggctgaggcaggagaatggcatgaacccaggaggcggagcttgcagtgagccgagattgcgccactgcactccatcctgggcaacggagcaagactccatctccaaaaaaaaaaaaaaa

SEQ ID NO: 13236 - DNA, 2505 bp, Homo sapiens
gcggagcctgctgtgctatggcggcgccccagggcctggctgccacttctccatccccgaggctttcagcggggccctggccaacctcagtgacgtggtgcagctcatctttctggtggactccaatccctttccctttggctatatcagcaactacaccgtctccaccaaggtggcctcgatggcattccagacacaggccggcgcccagatccccatcgagcggctggcctcagagcgcgccatcaccgtgaaggtgcccaacaactcggactgggctgcccggggccaccgcagctccgccaactccgccaactccgttgtggtccagccccaggcctccgtcggtgctgtggtcaccctggacagcagcaaccctgcggccgggctgcatctgcagctcaactatacgctgctggacggtgcgtgcagcgggccactacctgtctgaggaacctgagccctacctggcagtctacctacactcggagccccggcccaatgagcacaactgctcggctagcaggaggatccgcccagagtcactccagggtgctgaccaccggccctacaccttcttcatttccccggggagcagagacccagcggggagttaccatctgaacctctccagccacttccgctggtcggcgctgcaggtgtccgtgggcctgtacacgtccctgtgccagtacttcagcgaggaggacatggtgtggcggacagaggggctgctgcccctggaggagacctcgccccgccaggccgtctgcctcacccgccacctcaccgccttcggcgccagcctcttcgtgcccccaagccatgtccgctttgtgtttcctgagccgacagcggatgtaaactacatcgtcatgctgacatgtgctgtgtgcctggtgacctacatggtcatggccgccatcctgcacaagctggaccagttggatgccagccggggccgcgccatccctttctgtgggcagcggggccgcttcaagtacgagatcctcgtcaagacaggctggggccggggctcaggtaccacggcccacgtgggcatcatgctgtatggggtggacagccggagcggccaccggcacctggacggcgacagagccttccaccgcaacagcctggacatcttccggatcgccaccccgcacagcctgggtagcgtgtggaagatccgagtgtggcacgacaacaaagggctcagccctgcctggttcctgcagcacgtcatcgtcagggacctgcagacggcacgcagcgccttcttcctggtcaatgactggctttcggtggagacggaggccaacgggggcctggtggagaaggaggtgctggccgcgagcgacgcagcccttttgcgcttccggcgcctgctggtggctgagctgcagcgtggcttctttgacaagcacatctggctctccatatgggaccggccgcctcgtagccgtttcactcgcatccagagggccacctgctgcgttctcctcatctgcctcttcctgggcgccaacgccgtgtggtacggggctgttggcgactctgcctacagcacggggcatgtgtccaggctgagcccgctgagcgtcgacacagtcgctgttggcctggtgtccagcgtggttgtctatcccgtctacctggccatcctttttctcttccggatgtcccggagcaaggtgggctggggctggggacccgggagtactgggaatggagcctgggcctcggcaccatgcctagggccgccactttccagtgctgcagccagagggaaaggcgtccaccaaaggctgctcgggaagggtcaacacacttgagcagccttagctagactgaccagggagaaagagagaagactcagaagccagaatggtgaaagaacgagggcactttgctaagcagacgccacggacgactgcacagcagcacgccagataactcagaagaagcaagcacgcggctgtgcacgcttccgaaatgcactccagaagaaaatctcagtacatctataggaagtgaagaggctgagttagtcccttagaaacgtcccagtggccgggccgggtgtggtggctcacgcctgtaatcccaacacttcaggtggccgaggtgggcggatctgagtccaggagtttgagaccagcctgggcaacatagcaagaccccatctatataaaacattaaaaagggccaggcgcggtggctcacgcctgtaatcccagcactttgggaggccgaggcgggcagatcacttgaggtcaggagttcgagaccagcctggccaacacaatgaaaccccgactctactacaaatacaaaaacttagctgggcatggtggcgggcgcctgtagtcccagctactcgagaggctgaggcaggagaatggcatgaacccaggaggcggagcttgcagtgagccgagattgcgccactgcactccatcctgggcaacggagcaagactccatctccaaaaaaaaaaaaaaa

SEQ ID NO: 13237 - DNA, 1313 bp, Homo sapiens
ggctgcaagcagacagatttctcgtccgcaggctgcccagcagctacgcttcgtgcgccagtggtccgtctttggcaagacattatgccgagctctgccagagctcctgggggtcaccttgggcctggtggtgctcggggtagcctacgcccagctggccatcctggtaggtgactgcgcggccggggagggcgtcttagctcagctcagctcagctgtacgccctcactggtgtcgccttccccgcagctcgtgtcttcctgtgtggactccctctggagcgtggcccaggccctgttggtgctgtgccctgggactgggctctctaccctgtgtcctgccgagtcctggcacctgtcacccctgctgtgtgtggggctctgggcactgcggctgtggggcgccctacggctgggggctgttattctccgctggcgctaccacgccttgcgtggagagctgtaccggccggcctgggagccccaggactacgagatggtggagttgttcctgcgcaggctgcgcctctggatgggcctcagcaaggtcaaggaggtgggtacggcccagtgggggggagagggacacgccctgggctctgcccagggtgcagccggactgactgagcccctgtgccgcccccagttccgccacaaagtccgctttgaagggatggagccgctgccctctcgctcctccaggggctccaaggtatccccggatgtgcccccacccagcgctggctccgatgcctcgcacccctccacctcctccagccagctggatgggctgagcgtgagcctgggccggctggggacaaggtgtgagcctgagccctcccgcctccaagccgtgttcgaggccctgctcacccagtttgaccgactcaaccaggccacagaggacgtctaccagctggagcagcagctgcacagcctgcaaggccgcaggagcagccgggcgcccgccggatcttcccgtggcccatccccgggcctgcggccagcactgcccagccgccttgcccgggccagtcggggtgtggacctggccactggccccagcaggacaccccttcgggccaagaacaaggtccaccccagcagcacttagtcctccttcctggcgggggtgggccgtggagtcggagtggacaccgctcagtattactttctgccgctgtcaaggccgagggccaggcagaatggctgcacgtaggttccccagagagcaggcaggggcatctgtctgtctgtgggcttcagcactttaaagaggctgtgtggccaaccaggacccagggtcccctcccc

SEQ ID NO: 13238 - DNA, 1140 bp, Homo sapiens
ggctgcaagcagacagatttctcgtccgcaggctgcccagcagctacgcttcgtgcgccagtggtccgtctttggcaagacattatgccgagctctgccagagctcctgggggtcaccttgggcctggtggtgctcggggtagcctacgcccagctggccatcctgctcgtgtcttcctgtgtggactccctctggagcgtggcccaggccctgttggtgctgtgccctgggactgggctctctaccctgtgtcctgccgagtcctggcacctgtcacccctgctgtgtgtggggctctgggcactgcggctgtggggcgccctacggctgggggctgttattctccgctggcgctaccacgccttgcgtggagagctgtaccggccggcctgggagccccaggactacgagatggtggagttgttcctgcgcaggctgcgcctctggatgggcctcagcaaggtcaaggagttccgccacaaagtccgctttgaagggatggagccgctgccctctcgctcctccaggggctccaaggtatccccggatgtgcccccacccagcgctggctccgatgcctcgcacccctccacctcctccagccagctggatgggctgagcgtgagcctgggccggctggggacaaggtgtgagcctgagccctcccgcctccaagccgtgttcgaggccctgctcacccagtttgaccgactcaaccaggccacagaggacgtctaccagctggagcagcagctgcacagcctgcaaggccgcaggagcagccgggcgcccgccggatcttcccgtggcccatccccgggcctgcggccagcactgcccagccgccttgcccgggccagtcggggtgtggacctggccactggccccagcaggacaccccttcgggccaagaacaaggtccaccccagcagcacttagtcctccttcctggcgggggtgggccgtggagtcggagtggacaccgctcagtattactttctgccgctgtcaaggccgagggccaggcagaatggctgcacgtaggttccccagagagcaggcaggggcatctgtctgtctgtgggcttcagcactttaaagaggctgtgtggccaaccaggacccagggtcccctcccc

SEQ ID NO: 13239 - DNA, 1261 bp, Homo sapiens
cccagcccaggcctgaactgggaacagccccaggcagcgaggctgtccaggacaggtgtgcttgcgtagccccgggatgcccctagcccctccctgtgagctgcctctcacaggtctgtctctgcttccccaggactggtggagggtctgcggaagcgcctgctgccggcctggtgtgcctccctggcccacgggctcagcctgctcctggtggctgtggctgtggctgtctcagggtgggtgggtgcgagcttccccccgggcgtgagtgttgcgtggctcctgtccagcagcgccagcttcctggcctcattcctcggctgggagccactgaaggtgagggggctgccaggggtaggctacaggcctccatcacgggggacccctctgaagccaccccctccccaggtcttgctggaagccctgtacttctcactggtggccaagcggctgcacccggatgaagatgacaccctggtagagagcccggctgtgacgcctgtgagcgcacgtgtgccccgcgtacggccaccccacggctttgcactcttcctggccaaggaagaagcccgcaaggtcaagaggctacatggcatgctgcgggtgagcctgggtgcggcctgtgcccctgccacctccgtctcttgtctcccacctcccacccatgcacgcaggacactcctgtccccctttcctcacctcagaaggcccttaggggttcaatgctctgcagcctttgcccggtctccctcctaccccacgccccccacttgctgccccagtccctgccagggcccagctccaatgcccactcctgcctggccctgaaggcccctaagcaccactgcagtggcctgtgtgtctgcccccaggtggggttccgggcagggtgtgtgctgccattaccctggccaggtagagtcttggggcgccccctgccagctcaccttcctgcagccacacctgccgcagccatggctccagccgttgccaaagccctgctgtcactgtgggctggggccaggctgaccacagggcccccccgtccaccagagcctcctggtgtacatgctttttctgctggtgaccctgctggccagctatggggatgcctcatgccatgggcacgcctaccgtctgcaaagcgccatcaagcaggagctgcacagccgggccttcctggccatcacgcggtacgggcatccggtgcactggtctgtcttctgggctttagttttgcctttagtccagccagacccta

SEQ ID NO: 13240 - DNA, 661 bp, Homo sapiens
cccagcccaggcctgaactgggaacagccccaggcagcgaggctgtccaggacaggactggtggagggtctgcggaagcgcctgctgccggcctggtgtgcctccctggcccacgggctcagcctgctcctggtggctgtggctgtggctgtctcagggtgggtgggtgcgagcttccccccgggcgtgagtgttgcgtggctcctgtccagcagcgccagcttcctggcctcattcctcggctgggagccactgaaggtcttgctggaagccctgtacttctcactggtggccaagcggctgcacccggatgaagatgacaccctggtagagagcccggctgtgacgcctgtgagcgcacgtgtgccccgcgtacggccaccccacggctttgcactcttcctggccaaggaagaagcccgcaaggtcaagaggctacatggcatgctgcggagcctcctggtgtacatgctttttctgctggtgaccctgctggccagctatggggatgcctcatgccatgggcacgcctaccgtctgcaaagcgccatcaagcaggagctgcacagccgggccttcctggccatcacgcggtacgggcatccggtgcactggtctgtcttctgggctttagttttgcctttagtccagccagacccta

SEQ ID NO: 13241 - DNA, 964 bp, Homo sapiens
cccggcgtggacgtgagccggcctcggctggtgctgccgcggctggcgctgcctgtggggcactactgctttgtgtttgtcgtgtcatttggggacacgccactgacacagagcatccaggccaatgtgacggtggcccccgagcgcctggtgcccatcattgagggtggctcataccgcgtgtggtcagacacacgggacctggtgctggatgggagcgagtcctacgaccccaacctggaggacggcgaccagacgccgctcagtttccactgggcctgtgtggcttcgacacaggtcagtgcgtggcagggccgtcctccatgcccctcacccgtccacacccatgagcccagagaacacccagcttgccaccagggctggcccgtcctcagtgcctggtgggccccgtcccagcatggggagggggtctcccgcgctgtctcctgggccgggctctgctttaaaactggatggggctctcaggccacgtcgccccttgttctcggcctgcagagggaggctggcgggtgtgcgctgaactttgggccccgcgggagcagcacggtcaccattccacgggagcggctggcggctggcgtggagtacaccttcagcctgaccgtgtggaaggccggccgcaaggaggaggccaccaaccagacggtgggtgccgcccgcccctcggccacttgccttggacagcccagcctccctggtcatctactgttttccgtgttttagtgctggtggaggccgcacgctctcccctctctgtttctgatgcaaattctatgtaacacgacagcctgcttcagctttgcttccttccaaacctgccacagttccacgtacagtcttcaagccacatatgctctagtggcaaaagctacacagtcccctagcaataccaacagtgaggaagagccccttcccaccccagaggtagccactgtccccagcc

SEQ ID NO: 13242 - DNA, 667 bp, Homo sapiens
cccggcgtggacgtgagccggcctcggctggtgctgccgcggctggcgctgcctgtggggcactactgctttgtgtttgtcgtgtcatttggggacacgccactgacacagagcatccaggccaatgtgacggtggcccccgagcgcctggtgcccatcattgagggtggctcataccgcgtgtggtcagacacacgggacctggtgctggatgggagcgagtcctacgaccccaacctggaggacggcgaccagacgccgctcagtttccactgggcctgtgtggcttcgacacagagggaggctggcgggtgtgcgctgaactttgggccccgcgggagcagcacggtcaccattccacgggagcggctggcggctggcgtggagtacaccttcagcctgaccgtgtggaaggccggccgcaaggaggaggccaccaaccagacgtgctggtggaggccgcacgctctcccctctctgtttctgatgcaaattctatgtaacacgacagcctgcttcagctttgcttccttccaaacctgccacagttccacgtacagtcttcaagccacatatgctctagtggcaaaagctacacagtcccctagcaataccaacagtgaggaagagccccttcccaccccagaggtagccactgtccccagcc

SEQ ID NO: 13243 - DNA, 1227 bp, Homo sapiens
gtgaaatttgctttctgtttcatgggctgctgggggcctggccagagaggagctgggggccacggagaagcaggtgccagctctggtgcagaggctcctatggcctttcaggcccgtggcagagggtgggctcaggagggccatcgtgggtgtcccccgggtggttgagcttcccggcaggcgtgtgacctgcgcgttctgccccaggccactacctgtctgaggaacctgagccctacctggcagtctacctacactcggagccccggcccaatgagcacaactgctcggctagcaggaggatccgcccagagtcactccagggtgctgaccaccggccctacaccttcttcatttccccggggtgagctctgcgggccagcctggcagggcagggcagggcatcatgggtcagcattgcctgggttactggccccatggggacggcaggcagcgaggggactggaccgggtatgggctctgagactgcgacatccaacctggcggagcctgggctcacgtccgctaccccttccctgcccaggagcagagacccagcggggagttaccatctgaacctctccagccacttccgctggtcggcgctgcaggtgtccgtgggcctgtacacgtccctgtgccagtacttcagcgaggaggacatggtgtggcggacagaggggctgctgcccctggaggagacctcgccccgccaggccgtctgcctcacccgccacctcaccgccttcggcgccagcctcttcgtgcccccaagccatgtccgctttgtgtttcctgtgagtgaccctgtgctcctgggagcctctgcagagtcgaggagggcctgggtgggctcggctctatcctgagaaggcacagcttgcacgtgacctcctgggcccggcggctgtgtcctcacaggagccgacagcggatgtaaactacatcgtcatgctgacatgtgctgtgtgcctggtgacctacatggtcatggccgccatcctgcacaagctggaccagttggatgccagccggggccgcgccatccctttctgtgggcagcggggccgcttcaagtacgagatcctcgtcaagacaggctggggccggggctcaggtgaggggcgcagcggggtggcagggcctcccctgctctcactggctgtgctggttgcaccctctgggagtgagtctcgtcgcaggcgtcagaacaaggcagtttttgca

SEQ ID NO: 13244 - DNA, 923 bp, Homo sapiens
gtgaaatttgctttctgtttcatgggctgctgggggcctggccagagaggagctgggggccacggagaagcaggtgccagctctggtgcagaggctcctatggcctttcaggcccgtggcagagggtgggctcaggagggccatcgtgggtgtcccccgggtggttgagcttcccggcaggcgtgtgacctgcgcgttctgccccaggccactacctgtctgaggaacctgagccctacctggcagtctacctacactcggagccccggcccaatgagcacaactgctcggctagcaggaggatccgcccagagtcactccagggtgctgaccaccggccctacaccttcttcatttccccggggagcagagacccagcggggagttaccatctgaacctctccagccacttccgctggtcggcgctgcaggtgtccgtgggcctgtacacgtccctgtgccagtacttcagcgaggaggacatggtgtggcggacagaggggctgctgcccctggaggagacctcgccccgccaggccgtctgcctcacccgccacctcaccgccttcggcgccagcctcttcgtgcccccaagccatgtccgctttgtgtttcctgagccgacagcggatgtaaactacatcgtcatgctgacatgtgctgtgtgcctggtgacctacatggtcatggccgccatcctgcacaagctggaccagttggatgccagccggggccgcgccatccctttctgtgggcagcggggccgcttcaagtacgagatcctcgtcaagacaggctggggccggggctcaggtgaggggcgcagcggggtggcagggcctcccctgctctcactggctgtgctggttgcaccctctgggagtgagtctcgtcgcaggcgtcagaacaaggcagtttttgca

SEQ ID NO: 13245 - DNA, 1152 bp, Homo sapiens
caccgtctccaccaaggtggcctcgatggcattccagacacaggccggcgcccagatccccatcgagcggctggcctcagagcgcgccatcaccgtgaaggtgcccaacaactcggactgggctgcccggggccaccgcagctccgccaactccgccaactccgttgtggtccagccccaggcctccgtcggtgctgtggtcaccctggacagcagcaaccctgcggccgggctgcatctgcagctcaactatacgctgctggacggtgcgtgcagcgggtggggcacacgcggccccctggccttgttcttggggggaaggcgtttctcgtagggcttccatgggtgtctctggtgaaatttgctttctgtttcatgggctgctgggggcctggccagagaggagctgggggccacggagaagcaggtgccagctctggtgcagaggctcctatggcctttcaggcccgtggcagagggtgggctcaggagggccatcgtgggtgtcccccgggtggttgagcttcccggcaggcgtgtgacctgcgcgttctgccccaggccactacctgtctgaggaacctgagccctacctggcagtctacctacactcggagccccggcccaatgagcacaactgctcggctagcaggaggatccgcccagagtcactccagggtgctgaccaccggccctacaccttcttcatttccccggggtgagctctgcgggccagcctggcagggcagggcagggcatcatgggtcagcattgcctgggttactggccccatggggacggcaggcagcgaggggactggaccgggtatgggctctgagactgcgacatccaacctggcggagcctgggctcacgtccgctaccccttccctgcccaggagcagagacccagcggggagttaccatctgaacctctccagccacttccgctggtcggcgctgcaggtgtccgtgggcctgtacacgtccctgtgccagtacttcagcgaggaggacatggtgtggcggacagaggggctgctgcccctggaggagacctcgccccgccaggccgtctgcctcacccgccacctcaccgccttcggcgccagcctcttcgtgcccccaagccatgtccgctttgtgtttcctg

SEQ ID NO: 13246 - DNA, 511 bp, Homo sapiens
caccgtctccaccaaggtggcctcgatggcattccagacacaggccggcgcccagatccccatcgagcggctggcctcagagcgcgccatcaccgtgaaggccactacctgtctgaggaacctgagccctacctggcagtctacctacactcggagccccggcccaatgagcacaactgctcggctagcaggaggatccgcccagagtcactccagggtgctgaccaccggccctacaccttcttcatttccccggggagcagagacccagcggggagttaccatctgaacctctccagccacttccgctggtcggcgctgcaggtgtccgtgggcctgtacacgtccctgtgccagtacttcagcgaggaggacatggtgtggcggacagaggggctgctgcccctggaggagacctcgccccgccaggccgtctgcctcacccgccacctcaccgccttcggcgccagcctcttcgtgcccccaagccatgtccgctttgtgtttcctg

SEQ ID NO: 13247 - DNA, 4716 bp, Homo sapiens
tgacctctgccctcatgcgcatcctcatgcgctcccgcgtgctcaacgaggagcccctgacgctggcgggcgaggagatcgtggcccagggcaagcgctcggacccgcggagcctgctgtgctatggcggcgccccagggcctggctgccacttctccatccccgaggctttcagcggggccctggccaacctcagtgacgtggtgcagctcatctttctggtggactccaatccctttccctttggctatatcagcaactacaccgtctccaccaaggtggcctcgatggcattccagacacaggccggcgcccagatccccatcgagcggctggcctcagagcgcgccatcaccgtgaaggtgcccaacaactcggactgggctgcccggggccaccgcagctccgccaactccgccaactccgttgtggtccagccccaggcctccgtcggtgctgtggtcaccctggacagcagcaaccctgcggccgggctgcatctgcagctcaactatacgctgctggacggtgcgtgcagcgggtggggcacacgcggccccctggccttgttcttggggggaaggcgtttctcgtagggcttccatgggtgtctctggtgaaatttgctttctgtttcatgggctgctgggggcctggccagagaggagctgggggccacggagaagcaggtgccagctctggtgcagaggctcctatggcctttcaggcccgtggcagagggtgggctcaggagggccatcgtgggtgtcccccgggtggttgagcttcccggcaggcgtgtgacctgcgcgttctgccccaggccactacctgtctgaggaacctgagccctacctggcagtctacctacactcggagccccggcccaatgagcacaactgctcggctagcaggaggatccgcccagagtcactccagggtgctgaccaccggccctacaccttcttcatttccccggggtgagctctgcgggccagcctggcagggcagggcagggcatcatgggtcagcattgcctgggttactggccccatggggacggcaggcagcgaggggactggaccgggtatgggctctgagactgcgacatccaacctggcggagcctgggctcacgtccgctaccccttccctgcccaggagcagagacccagcggggagttaccatctgaacctctccagccacttccgctggtcggcgctgcaggtgtccgtgggcctgtacacgtccctgtgccagtacttcagcgaggaggacatggtgtggcggacagaggggctgctgcccctggaggagacctcgccccgccaggccgtctgcctcacccgccacctcaccgccttcggcgccagcctcttcgtgcccccaagccatgtccgctttgtgtttcctgtgagtgaccctgtgctcctgggagcctctgcagagtcgaggagggcctgggtgggctcggctctatcctgagaaggcacagcttgcacgtgacctcctgggcccggcggctgtgtcctcacaggagccgacagcggatgtaaactacatcgtcatgctgacatgtgctgtgtgcctggtgacctacatggtcatggccgccatcctgcacaagctggaccagttggatgccagccggggccgcgccatccctttctgtgggcagcggggccgcttcaagtacgagatcctcgtcaagacaggctggggccggggctcaggtgaggggcgcagcggggtggcagggcctcccctgctctcactggctgtgctggttgcaccctctgggagtgagtctcgtcgcaggcgtcagaacaaggcagtttttgcagtgctgtgtgaagggctcgtgtgttcatcctgggaatgacctcgtgagcactcactgtccctgaggactaggacagctcctagctggaagtaggtgccagtcagtcagggtgggcagcccacgttctgcacagtagcgtggccccacaagtgacgtgagcatcgctaccactgtgggagactgtgcatccacccgcgatcctgactgcatagctcgtctctcagacggaggcgccagcaccctccccgtggctgtttcttcagtacctccattttcctttcattggaattgcccttctggcattccctttttgttttcgtttttctttttttagagacggagtctcactctgttgcccaggctggagtgcaatggcatgatcttggctcacagcaacttccagctcccgggtttaagccattccccttaagcgattctcctgagtagctgggagtacaggtgcacaccaccacacccagttaatttttcaccatgtcagccaggcgaactcctgacctcaggtgatccgcctgcctcggcctgccagagtgctgggatgacaggtgtgagccaccacacctggctgtgttcccattttttatctctgtgctgctttcctcttcattgcccagttctttcttttgattacctacttttaaaaactgtcggccgggcgcggtggctcacacctgtaatccgagcactttgggaggccaggcaggcaaatcacggggtcaggagatcgagaccatcctggctaacggtgaaaccctgtctctaataaaaagtacaaaaaaattagcccggcgtagtggcaggcgcctgtagtcccagctccttgggagactgaggcaggagaatggcgtgaacccgggaggcggagcttgcagtgagctgagattgcgccactgcactccagcctgggtgacacagcaagactccatctcaaaaaaaaaagaaaaaaaatactgtcacctgggtctgtcactgggagaggaggtgacacagcttcacgctttgcagtctgtgcatgaactgagggacgggtgtgtggtgcgggtcaccggttgtggcatgactgaggcgtggacaggtgtgcagtgcgggtcactggttgtggtgtggactgaggcgtgtgcagccatgtttgcatgtcacaagttacagttctttccatgtaacttaatcatgtccttgaggtcctgctgttaattggacaaattgcagtaaccgcagctccttgtgtatggcagagccgtgcaaagccgggactgcctgtgtggctccttgagtgcgcacaggccaaagctgagatgacttgcctgggatgccacacgtgttgggcagcagaccgagcctcccacccctccctcttgcctcccaggtaccacggcccacgtgggcatcatgctgtatggggtggacagccggagcggccaccggcacctggacggcgacagagccttccaccgcaacagcctggacatcttccggatcgccaccccgcacagcctgggtagcgtgtggaagatccgagtgtggcacgacaacaaaggtttgtgcggaccctgccaagctctgcccctctgcccccgcattggggcgccctgcgagcctgacctccctcctgcgcctctgcagggctcagccctgcctggttcctgcagcacgtcatcgtcagggacctgcagacggcacgcagcgccttcttcctggtcaatgactggctttcggtggagacggaggccaacgggggcctggtggagaaggaggtgctggccgcgagtaaggcctcgttccatgttcccactccgtgggaggttgggcagggtggtcctgccccgtggcctcctgcagtgcggccctccctgccttctaggcgacgcagcccttttgcgcttccggcgcctgctggtggctgagctgcagcgtggcttctttgacaagcacatctggctctccatatgggaccggccgcctcgtagccgtttcactcgcatccagagggccacctgctgcgttctcctcatctgcctcttcctgggcgccaacgccgtgtggtacggggctgttggcgactctgcctacaggtgggtgccgtaggggtcggggcagcctcttcctgcccagcccttcctgcccctcagcctcacctgtgtggcctcctctcctccacacagcacggggcatgtgtccaggctgagcccgctgagcgtcgacacagtcgctgttggcctggtgtccagcgtggttgtctatcccgtctacctggccatcctttttctcttccggatgtcccggagcaaggtgggctggggctggggacccgggagtactgggaatggagcctgggcctcggcaccatgcctagggccgccactttccagtgctgcagccagagggaaaggcgtccaccaaaggctgctcgggaagggtcaacacacttgagcagccttagctagactgaccagggagaaagagagaagactcagaagccagaatggtgaaagaacgagggcactttgctaagcagacgccacggacgactgcacagcagcacgccagataactcagaagaagcaagcacgcggctgtgcacgcttccgaaatgcactccagaagaaaatctcagtacatctataggaagtgaagaggctgagttagtcccttagaaacgtcccagtggccgggccgggtgtggtggctcacgcctgtaatcccaacacttcaggtggccgaggtgggcggatctgagtccaggagtttgagaccagcctgggcaacatagcaagaccccatctatataaaacattaaaaagggccaggcgcggtggctcacgcctgtaatcccagcactttgggaggccgaggcg

SEQ ID NO: 13248 - DNA, 2353 bp, Homo sapiens
tgacctctgccctcatgcgcatcctcatgcgctcccgcgtgctcaacgaggagcccctgacgctggcgggcgaggagatcgtggcccagggcaagcgctcggacccgcggagcctgctgtgctatggcggcgccccagggcctggctgccacttctccatccccgaggctttcagcggggccctggccaacctcagtgacgtggtgcagctcatctttctggtggactccaatccctttccctttggctatatcagcaactacaccgtctccaccaaggtggcctcgatggcattccagacacaggccggcgcccagatccccatcgagcggctggcctcagagcgcgccatcaccgtgaaggtgcccaacaactcggactgggctgcccggggccaccgcagctccgccaactccgccaactccgttgtggtccagccccaggcctccgtcggtgctgtggtcaccctggacagcagcaaccctgcggccgggctgcatctgcagctcaactatacgctgctggacggccactacctgtctgaggaacctgagccctacctggcagtctacctacactcggagccccggcccaatgagcacaactgctcggctagcaggaggatccgcccagagtcactccagggtgctgaccaccggccctacaccttcttcatttccccggggagcagagacccagcggggagttaccatctgaacctctccagccacttccgctggtcggcgctgcaggtgtccgtgggcctgtacacgtccctgtgccagtacttcagcgaggaggacatggtgtggcggacagaggggctgctgcccctggaggagacctcgccccgccaggccgtctgcctcacccgccacctcaccgccttcggcgccagcctcttcgtgcccccaagccatgtccgctttgtgtttcctgagccgacagcggatgtaaactacatcgtcatgctgacatgtgctgtgtgcctggtgacctacatggtcatggccgccatcctgcacaagctggaccagttggatgccagccggggccgcgccatccctttctgtgggcagcggggccgcttcaagtacgagatcctcgtcaagacaggctggggccggggctcaggtaccacggcccacgtgggcatcatgctgtatggggtggacagccggagcggccaccggcacctggacggcgacagagccttccaccgcaacagcctggacatcttccggatcgccaccccgcacagcctgggtagcgtgtggaagatccgagtgtggcacgacaacaaagggctcagccctgcctggttcctgcagcacgtcatcgtcagggacctgcagacggcacgcagcgccttcttcctggtcaatgactggctttcggtggagacggaggccaacgggggcctggtggagaaggaggtgctggccgcgagcgacgcagcccttttgcgcttccggcgcctgctggtggctgagctgcagcgtggcttctttgacaagcacatctggctctccatatgggaccggccgcctcgtagccgtttcactcgcatccagagggccacctgctgcgttctcctcatctgcctcttcctgggcgccaacgccgtgtggtacggggctgttggcgactctgcctacagcacggggcatgtgtccaggctgagcccgctgagcgtcgacacagtcgctgttggcctggtgtccagcgtggttgtctatcccgtctacctggccatcctttttctcttccggatgtcccggagcaaggtgggctggggctggggacccgggagtactgggaatggagcctgggcctcggcaccatgcctagggccgccactttccagtgctgcagccagagggaaaggcgtccaccaaaggctgctcgggaagggtcaacacacttgagcagccttagctagactgaccagggagaaagagagaagactcagaagccagaatggtgaaagaacgagggcactttgctaagcagacgccacggacgactgcacagcagcacgccagataactcagaagaagcaagcacgcggctgtgcacgcttccgaaatgcactccagaagaaaatctcagtacatctataggaagtgaagaggctgagttagtcccttagaaacgtcccagtggccgggccgggtgtggtggctcacgcctgtaatcccaacacttcaggtggccgaggtgggcggatctgagtccaggagtttgagaccagcctgggcaacatagcaagaccccatctatataaaacattaaaaagggccaggcgcggtggctcacgcctgtaatcccagcactttgggaggccgaggcg

SEQ ID NO: 13249 - DNA, 6241 bp, Homo sapiens
cggcgggcgtgctggtggactcggccgtggaggtggccttcctgtgagtgactcgggggccggtttggggtgggcaccaggctcttgtcccagccccagcctcagccgagggacccccacatcacggggttgcttttctgagcctcggtttccctgtctgttgggaggtaactgggtgcacaggagccctgaggctgcacgggagccgggagaggcctcagcacagccgggtgggccctgaatggaggcccggggcgtgactgcagagtggagcctcggctgggtcccaagcaccccctgccccgccaccgcccacccctgtcccggttcactcactgcgtcccaccgccccggcaggtggacctttggggatggggagcaggccctccaccagttccagcctccgtacaacgagtccttcccggttccagacccctcggtggcccaggtgctggtggagcacaatgtcatgcacacctacgctgccccaggtgagggatgagggggtgagggggccactgcctttcaggctctgagcacggggtccccccagctccccagtcaagctgccccccttcctccccaacagccctcactgtgacctcacctgggctgatggcttaggcccctactggggtgagggaggggccaggcgtggggggagtggacagggaagctgggcccctgaactgcgccccccgccctccccgggcctggctcttgctgctctgctgccccgagtgcagctgcacttggaggcggtgccgtcctcgccaggcagccctcagtgctgctacacctgtgctccgtcccgcacgtggcttgggagcctgggacccttaaggctgggccgcaggtgcagccgttcaccccgggctcctcaggcggggggcttctgccgagcgggtggggagcaggtgggggtgccgcggctgccccactcgggcctgtccccacaggtgagtacctcctgaccgtgctggcatctaatgccttcgagaacctgacgcagcaggtgcctgtgagcgtgcgcgcctccctgccctccgtggctgtgggtgtgagtgacggcgtcctggtggccggccggcccgtcaccttctacccgcacccgctgccctcgcctgggggtgttctttacacgtgggacttcggggacggctcccctgtcctgacccagagccagccggctgccaaccacacctatgcctcgaggggcacctaccacgtgcgcctggaggtcaacaacacggtgagcggtgcggcggcccaggcggatgtgcgcgtctttgaggagctccgcggactcagcgtggacatgagcctggccgtggagcagggcgcccccgtggtggtcagcgccgcggtgcagacgggcgacaacatcacgtggaccttcgacatgggggacggcaccgtgctgtcgggcccggaggcaacagtggagcatgtgtacctgcgggcacagaactgcacagtgaccgtgggtgcggccagccccgccggccacctggcccggagcctgcacgtgctggtcttcgtcctggaggtgctgcgcgttgaacccgccgcctgcatccccacgcagcctgacgcgcggctcacggcctacgtcaccgggaacccggcccactacctcttcgactggaccttcggggatggctcctccaacacgaccgtgcgggggtgcccgacggtgacacacaacttcacgcggagcggcacgttccccctggcgctggtgctgtccagccgcgtgaacagggcgcattacttcaccagcatctgcgtggagccagaggtgggcaacgtcaccctgcagccagagaggcagtttgtgcagctcggggacgaggcctggctggtggcatgtgcctggcccccgttcccctaccgctacacctgggactttggcaccgaggaagccgcccccacccgtgccaggggccctgaggtgacgttcatctaccgagacccaggctcctatcttgtgacagtcaccgcgtccaacaacatctctgctgccaatgactcagccctggtggaggtgcaggagcccgtgctggtcaccagcatcaaggtcaatggctcccttgggctggagctgcagcagccgtacctgttctctgctgtgggccgtgggcgccccgccagctacctgtgggatctgggggacggtgggtggctcgagggtccggaggtcacccacgcttacaacagcacaggtgacttcaccgttagggtggccggctggaatgaggtgagccgcagcgaggcctggctcaatgtgacggtgaagcggcgcgtgcgggggctcgtcgtcaatgcaagccgcacggtggtgcccctgaatgggagcgtgagcttcagcacgtcgctggaggccggcagtgatgtgcgctattcctgggtgctctgtgaccgctgcacgcccatccctgggggtcctaccatctcttacaccttccgctccgtgggcaccttcaatatcatcgtcacggctgagaacgaggtgggctccgcccaggacagcatcttcgtctatgtcctgcagctcatagaggggctgcaggtggtgggcggtggccgctacttccccaccaaccacacggtacagctgcaggccgtggttagggatggcaccaacgtctcctacagctggactgcctggagggacaggggcccggccctggccggcagcggcaaaggcttctcgctcaccgtgctcgaggccggcacctaccatgtgcagctgcgggccaccaacatgctgggcagcgcctgggccgactgcaccatggacttcgtggagcctgtggggtggctgatggtggccgcctccccgaacccagctgccgtcaacacaagcgtcaccctcagtgccgagctggctggtggcagtggtgtcgtatacacttggtccttggaggaggggctgagctgggagacctccgagccatttaccacccatagcttccccacacccggcctgcacttggtcaccatgacggcagggaacccgctgggctcagccaacgccaccgtggaagtggatgtgcaggtgcctgtgagtggcctcagcatcagggccagcgagcccggaggcagcttcgtggcggccgggtcctctgtgcccttttgggggcagctggccacgggcaccaatgtgagctggtgctgggctgtgcccggcggcagcagcaagcgtggccctcatgtcaccatggtcttcccggatgctggcaccttctccatccggctcaatgcctccaacgcagtcagctgggtctcagccacgtacaacctcacggcggaggagcccatcgtgggcctggtgctgtgggccagcagcaaggtggtggcgcccgggcagctggtccattttcagatcctgctggctgccggctcagctgtcaccttccgcctgcaggtcggcggggccaaccccgaggtgctccccgggccccgtttctcccacagcttcccccgcgtcggagaccacgtggtgagcgtgcggggcaaaaaccacgtgagctgggcccaggcgcaggtgcgcatcgtggtgctggaggccgtgagtgggctgcaggtgcccaactgctgcgagcctggcatcgccacgggcactgagaggaacttcacagcccgcgtgcagcgcggctctcgggtcgcctacgcctggtacttctcgctgcagaaggtccagggcgactcgctggtcatcctgtcgggccgcgacgtcacctacacgcccgtggccgcggggctgttggagatccaggtgcgcgccttcaacgccctgggcagtgagaaccgcacgctggtgctggaggttcaggacgccgtccagtatgtggccctgcagagcggcccctgcttcaccaaccgctcggcgcagtttgaggccgccaccagccccagcccccggcgtgtggcctaccactgggactttggggatgggtcgccagggcaggacacagatgagcccagggccgagcactcctacctgaggcctggggactaccgcgtgcaggtgaacgcctccaacctggtgagcttcttcgtggcgcaggccacggtgaccgtccaggtgctggcctgccgggagccggaggtggacgtggtcctgcccctgcaggtgctgatgcggcgatcacagcgcaactacttggaggcccacgttgacctgcgcgactgcgtcacctaccagactgagtaccgctgggaggtgtatcgcaccgccagctgccagcggccggggcgcccagcgcgtgtggccctgcccggcgtggacgtgagccggcctcggctggtgctgccgcggctggcgctgcctgtggggcactactgctttgtgtttgtcgtgtcatttggggacacgccactgacacagagcatccaggccaatgtgacggtggcccccgagcgcctggtgcccatcattgagggtggctcataccgcgtgtggtcagacacacgggacctggtgctggatgggagcgagtcctacgaccccaacctggaggacggcgaccagacgccgctcagtttccactgggcctgtgtggcttcgacacaggtcagtgcgtggcagggccgtcctccatgcccctcacccgtccacacccatgagcccagagaacacccagcttgccaccagggctggcccgtcctcagtgcctggtgggccccgtcccagcatggggagggggtctcccgcgctgtctcctgggccgggctctgctttaaaactggatggggctctcaggccacgtcgccccttgttctcggcctgcagagggaggctggcgggtgtgcgctgaactttgggccccgcgggagcagcacggtcaccattccacgggagcggctggcggctggcgtggagtacaccttcagcctgaccgtgtggaaggccggccgcaaggaggaggccaccaaccagacggtgggtgccgcccgcccctcggccacttgccttggacagcccagcctccctggtcatctactgttttccgtgttttagtgctggtggaggccgcacgctctcccctctctgtttctgatgcaaattctatgtaacacgacagcctgcttcagctttgcttccttccaaacctgccacagttccacgtacagtcttcaagccacatatgctctagtggcaaaagctacacagtcccctagcaataccaacagtgaggaagagccccttcccaccccagaggtagccactgtccccagcccatgtccctgttgctggatgtggtgggccggttctcaccctcacgctcccctctctggaccggccaggaggcttggtgaccctgagcccgtggtggctgctcctgctgctgtcaggcggggcctgctggtgccccagagtgggcgtctgttccccagtccctgctttcctcagctggcctgattgggggtcttcccagaggggtcgtctgaggggagggtgtgggagcaggttccatcccagctcagcctcctgacccaggccctggctaagggctgcaggagtctgtgagtcaggcctacgtggcagctgcggtcctcacacccacacatacgtctcttctcacacgcatccccccaggggccctcagtgagcattgcctgcctcctgctagggtccagctgggtccagtacaccagaacgcacactccagtgtcctctgccctgtgtatgcccttccgccgtccaagttggaaggtggcaaaccggatgagtatcctgggagggagtgagctcaccggcagtggccaggcccctgggaaacctggagtttgggagcagcatcctccatgggtcccccagtccttccagcaggccaaatagacctgtgttggaggtaaccccactcccacgccaggtgctgatccggagtggccgggtgcccattgtgtccttggagtgtgtgtcctgcaaggcacaggccgtgtacgaagtgagccgcagctcctacgtgtacttggagggccgctgcctcaattgcagcagcggctccaagcgaggggtgagtgttgagcggggtgtgggcgggctggggatgggtcccatggccgaggggacggggcctgcaggcagaagtggggctgacagggcagagggttgcgccccctcaccaccccttctgcctgcagcggtgggctgcacgtacgttcagcaacaagacgctggtgctggatgagaccaccacatccacgggcagtgcaggcatgcgactggtgc

SEQ ID NO: 13250 - DNA, 465 bp, Homo sapiens
cggcgggcgtgctggtggactcggccgtggaggtggccttcctgtggacctttggggatggggagcaggccctccaccagttccagcctccgtacaacgagtccttcccggttccagacccctcggtggcccaggtgctggtggagcacaatgtcatgcacacctacgctgccccaggtgagtacctcctgaccgtgctggcatctaatgccttcgagaacctgacgcagcaggtgctgatccggagtggccgggtgcccattgtgtccttggagtgtgtgtcctgcaaggcacaggccgtgtacgaagtgagccgcagctcctacgtgtacttggagggccgctgcctcaattgcagcagcggctccaagcgagggcggtgggctgcacgtacgttcagcaacaagacgctggtgctggatgagaccaccacatccacgggcagtgcaggcatgcgactggtgc

SEQ ID NO: 13251 - DNA, 1481 bp, Homo sapiens
ctatgtaacacgacagcctgcttcagctttgcttccttccaaacctgccacagttccacgtacagtcttcaagccacatatgctctagtggcaaaagctacacagtcccctagcaataccaacagtgaggaagagccccttcccaccccagaggtagccactgtccccagcccatgtccctgttgctggatgtggtgggccggttctcaccctcacgctcccctctctggaccggccaggaggcttggtgaccctgagcccgtggtggctgctcctgctgctgtcaggcggggcctgctggtgccccagagtgggcgtctgttccccagtccctgctttcctcagctggcctgattgggggtcttcccagaggggtcgtctgaggggagggtgtgggagcaggttccatcccagctcagcctcctgacccaggccctggctaagggctgcaggagtctgtgagtcaggcctacgtggcagctgcggtcctcacacccacacatacgtctcttctcacacgcatccccccaggggccctcagtgagcattgcctgcctcctgctagggtccagctgggtccagtacaccagaacgcacactccagtgtcctctgccctgtgtatgcccttccgccgtccaagttggaaggtggcaaaccggatgagtatcctgggagggagtgagctcaccggcagtggccaggcccctgggaaacctggagtttgggagcagcatcctccatgggtcccccagtccttccagcaggccaaatagacctgtgttggaggtaaccccactcccacgccaggtgctgatccggagtggccgggtgcccattgtgtccttggagtgtgtgtcctgcaaggcacaggccgtgtacgaagtgagccgcagctcctacgtgtacttggagggccgctgcctcaattgcagcagcggctccaagcgaggggtgagtgttgagcggggtgtgggcgggctggggatgggtcccatggccgaggggacggggcctgcaggcagaagtggggctgacagggcagagggttgcgccccctcaccaccccttctgcctgcagcggtgggctgcacgtacgttcagcaacaagacgctggtgctggatgagaccaccacatccacgggcagtgcaggcatgcgactggtgctgcggcggggcgtgctgcgggacggcgagggatacaccttcacgctcacggtgctgggccgctctggcgaggaggagggctgcgcctccatccgcctgtcccccaaccgcccgccgctggggggctcttgccgcctcttcccactgggcgctgtgcacgccctcaccaccaaggtgcacttcgaatgcacgggtgagtgcaggcctgcgtggggggagcagcgggatcccccgactctgtgacgtcacggagccctcccgtgatgccgtggggaccgtccctcaggctggcatgacgcggaggatgctggcgcc

SEQ ID NO: 13252 - DNA, 577 bp, Homo sapiens
ctatgtaacacgacagcctgcttcagctttgcttccttccaaacctgccacagttccacgtacagtcttcaagccacatatgctctagtggcaaaagctacacagtcccctagcaataccaacagtgctgatccggagtggccgggtgcccattgtgtccttggagtgtgtgtcctgcaaggcacaggccgtgtacgaagtgagccgcagctcctacgtgtacttggagggccgctgcctcaattgcagcagcggctccaagcgagggcggtgggctgcacgtacgttcagcaacaagacgctggtgctggatgagaccaccacatccacgggcagtgcaggcatgcgactggtgctgcggcggggcgtgctgcgggacggcgagggatacaccttcacgctcacggtgctgggccgctctggcgaggaggagggctgcgcctccatccgcctgtcccccaaccgcccgccgctggggggctcttgccgcctcttcccactgggcgctgtgcacgccctcaccaccaaggtgcacttcgaatgcacgggctggcatgacgcggaggatgctggcgcc

SEQ ID NO: 13253 - DNA, 16397 bp, Homo sapiens
gcagacagggtgctcacacagggcgtgaggcctggcttcccagtgagggcagcagcccagttactggggacgtcggccccgggcaggtcctgctggctggctcctcgggctacctggtgggctttaaattcctggaaagtcacggctctgacagtggctccgctaactcattccactgtctcatttcacaaaatgaatttaaaactctgctccctgacctcacacgagcccccgtgagtctctcacgccctctgctgtgttctcgcctggctaaagcgagtggcttttgaggtggagtctgaacccctgatgggaaactgcgggctgcccgcggtgccaccatgctgggtacatgggggacagggctgtctccatcttgcgggtacctgcctcttcaccaggggccttgggaggggccatcagaaatggcgtgacctgtgcagcctgtcctgggttctgtaagccagtgtaggtgcctcccctcactgctccgagctctctgggtgaggagctggggcaagagcgccgggagggtctgagaagactcagagagaggtggactctttgtagctggtactaggtttgctttacagatggggaaactgaggcacagagaggttgaggcattagtagtactacatggctggctggagagccggacagtgagtgtcccagcccgggcttggctcccatggcatgcagagccccgggcacctcctctcctctgtgccccgcgtgggactctccagcccgacgggaggtgtgtccaggaggcgacaggctaagggcagagtcctccacagagcccaggctgacaccattccccccgcagaggtacagccccgtggtggaggccggctcggacatggtcttccggtggaccatcaacgacaagcagtccctgaccttccagaacgtggtcttcaatgtcatttatcagagcgcggcggtcttcaagctctcagtaggtgggcgggggtggggaggggaggggatggggcggggcagggcgggggcgggctccaccttcacctctgccttctgctctgcttcatgctgcccgaggacgctgccatggctgtgggtgagtggagggagggacgccaatcagggccaggcctctcacctgccacctgggctcactgacgcctgtccctgcagctgacggcctccaaccacgtgagcaacgtcaccgtgaactacaacgtaaccgtggagcggatgaacaggatgcagggtctgcaggtctccacagtgccggccgtgctgtcccccaatgccacgctagcactgacggcgggcgtgctggtggactcggccgtggaggtggccttcctgtgagtgactcgggggccggtttggggtgggcaccaggctcttgtcccagccccagcctcagccgagggacccccacatcacggggttgcttttctgagcctcggtttccctgtctgttgggaggtaactgggtgcacaggagccctgaggctgcacgggagccgggagaggcctcagcacagccgggtgggccctgaatggaggcccggggcgtgactgcagagtggagcctcggctgggtcccaagcaccccctgccccgccaccgcccacccctgtcccggttcactcactgcgtcccaccgccccggcaggtggacctttggggatggggagcaggccctccaccagttccagcctccgtacaacgagtccttcccggttccagacccctcggtggcccaggtgctggtggagcacaatgtcatgcacacctacgctgccccaggtgagggatgagggggtgagggggccactgcctttcaggctctgagcacggggtccccccagctccccagtcaagctgccccccttcctccccaacagccctcactgtgacctcacctgggctgatggcttaggcccctactggggtgagggaggggccaggcgtggggggagtggacagggaagctgggcccctgaactgcgccccccgccctccccgggcctggctcttgctgctctgctgccccgagtgcagctgcacttggaggcggtgccgtcctcgccaggcagccctcagtgctgctacacctgtgctccgtcccgcacgtggcttgggagcctgggacccttaaggctgggccgcaggtgcagccgttcaccccgggctcctcaggcggggggcttctgccgagcgggtggggagcaggtgggggtgccgcggctgccccactcgggcctgtccccacaggtgagtacctcctgaccgtgctggcatctaatgccttcgagaacctgacgcagcaggtgcctgtgagcgtgcgcgcctccctgccctccgtggctgtgggtgtgagtgacggcgtcctggtggccggccggcccgtcaccttctacccgcacccgctgccctcgcctgggggtgttctttacacgtgggacttcggggacggctcccctgtcctgacccagagccagccggctgccaaccacacctatgcctcgaggggcacctaccacgtgcgcctggaggtcaacaacacggtgagcggtgcggcggcccaggcggatgtgcgcgtctttgaggagctccgcggactcagcgtggacatgagcctggccgtggagcagggcgcccccgtggtggtcagcgccgcggtgcagacgggcgacaacatcacgtggaccttcgacatgggggacggcaccgtgctgtcgggcccggaggcaacagtggagcatgtgtacctgcgggcacagaactgcacagtgaccgtgggtgcggccagccccgccggccacctggcccggagcctgcacgtgctggtcttcgtcctggaggtgctgcgcgttgaacccgccgcctgcatccccacgcagcctgacgcgcggctcacggcctacgtcaccgggaacccggcccactacctcttcgactggaccttcggggatggctcctccaacacgaccgtgcgggggtgcccgacggtgacacacaacttcacgcggagcggcacgttccccctggcgctggtgctgtccagccgcgtgaacagggcgcattacttcaccagcatctgcgtggagccagaggtgggcaacgtcaccctgcagccagagaggcagtttgtgcagctcggggacgaggcctggctggtggcatgtgcctggcccccgttcccctaccgctacacctgggactttggcaccgaggaagccgcccccacccgtgccaggggccctgaggtgacgttcatctaccgagacccaggctcctatcttgtgacagtcaccgcgtccaacaacatctctgctgccaatgactcagccctggtggaggtgcaggagcccgtgctggtcaccagcatcaaggtcaatggctcccttgggctggagctgcagcagccgtacctgttctctgctgtgggccgtgggcgccccgccagctacctgtgggatctgggggacggtgggtggctcgagggtccggaggtcacccacgcttacaacagcacaggtgacttcaccgttagggtggccggctggaatgaggtgagccgcagcgaggcctggctcaatgtgacggtgaagcggcgcgtgcgggggctcgtcgtcaatgcaagccgcacggtggtgcccctgaatgggagcgtgagcttcagcacgtcgctggaggccggcagtgatgtgcgctattcctgggtgctctgtgaccgctgcacgcccatccctgggggtcctaccatctcttacaccttccgctccgtgggcaccttcaatatcatcgtcacggctgagaacgaggtgggctccgcccaggacagcatcttcgtctatgtcctgcagctcatagaggggctgcaggtggtgggcggtggccgctacttccccaccaaccacacggtacagctgcaggccgtggttagggatggcaccaacgtctcctacagctggactgcctggagggacaggggcccggccctggccggcagcggcaaaggcttctcgctcaccgtgctcgaggccggcacctaccatgtgcagctgcgggccaccaacatgctgggcagcgcctgggccgactgcaccatggacttcgtggagcctgtggggtggctgatggtggccgcctccccgaacccagctgccgtcaacacaagcgtcaccctcagtgccgagctggctggtggcagtggtgtcgtatacacttggtccttggaggaggggctgagctgggagacctccgagccatttaccacccatagcttccccacacccggcctgcacttggtcaccatgacggcagggaacccgctgggctcagccaacgccaccgtggaagtggatgtgcaggtgcctgtgagtggcctcagcatcagggccagcgagcccggaggcagcttcgtggcggccgggtcctctgtgcccttttgggggcagctggccacgggcaccaatgtgagctggtgctgggctgtgcccggcggcagcagcaagcgtggccctcatgtcaccatggtcttcccggatgctggcaccttctccatccggctcaatgcctccaacgcagtcagctgggtctcagccacgtacaacctcacggcggaggagcccatcgtgggcctggtgctgtgggccagcagcaaggtggtggcgcccgggcagctggtccattttcagatcctgctggctgccggctcagctgtcaccttccgcctgcaggtcggcggggccaaccccgaggtgctccccgggccccgtttctcccacagcttcccccgcgtcggagaccacgtggtgagcgtgcggggcaaaaaccacgtgagctgggcccaggcgcaggtgcgcatcgtggtgctggaggccgtgagtgggctgcaggtgcccaactgctgcgagcctggcatcgccacgggcactgagaggaacttcacagcccgcgtgcagcgcggctctcgggtcgcctacgcctggtacttctcgctgcagaaggtccagggcgactcgctggtcatcctgtcgggccgcgacgtcacctacacgcccgtggccgcggggctgttggagatccaggtgcgcgccttcaacgccctgggcagtgagaaccgcacgctggtgctggaggttcaggacgccgtccagtatgtggccctgcagagcggcccctgcttcaccaaccgctcggcgcagtttgaggccgccaccagccccagcccccggcgtgtggcctaccactgggactttggggatgggtcgccagggcaggacacagatgagcccagggccgagcactcctacctgaggcctggggactaccgcgtgcaggtgaacgcctccaacctggtgagcttcttcgtggcgcaggccacggtgaccgtccaggtgctggcctgccgggagccggaggtggacgtggtcctgcccctgcaggtgctgatgcggcgatcacagcgcaactacttggaggcccacgttgacctgcgcgactgcgtcacctaccagactgagtaccgctgggaggtgtatcgcaccgccagctgccagcggccggggcgcccagcgcgtgtggccctgcccggcgtggacgtgagccggcctcggctggtgctgccgcggctggcgctgcctgtggggcactactgctttgtgtttgtcgtgtcatttggggacacgccactgacacagagcatccaggccaatgtgacggtggcccccgagcgcctggtgcccatcattgagggtggctcataccgcgtgtggtcagacacacgggacctggtgctggatgggagcgagtcctacgaccccaacctggaggacggcgaccagacgccgctcagtttccactgggcctgtgtggcttcgacacaggtcagtgcgtggcagggccgtcctccatgcccctcacccgtccacacccatgagcccagagaacacccagcttgccaccagggctggcccgtcctcagtgcctggtgggccccgtcccagcatggggagggggtctcccgcgctgtctcctgggccgggctctgctttaaaactggatggggctctcaggccacgtcgccccttgttctcggcctgcagagggaggctggcgggtgtgcgctgaactttgggccccgcgggagcagcacggtcaccattccacgggagcggctggcggctggcgtggagtacaccttcagcctgaccgtgtggaaggccggccgcaaggaggaggccaccaaccagacggtgggtgccgcccgcccctcggccacttgccttggacagcccagcctccctggtcatctactgttttccgtgttttagtgctggtggaggccgcacgctctcccctctctgtttctgatgcaaattctatgtaacacgacagcctgcttcagctttgcttccttccaaacctgccacagttccacgtacagtcttcaagccacatatgctctagtggcaaaagctacacagtcccctagcaataccaacagtgaggaagagccccttcccaccccagaggtagccactgtccccagcccatgtccctgttgctggatgtggtgggccggttctcaccctcacgctcccctctctggaccggccaggaggcttggtgaccctgagcccgtggtggctgctcctgctgctgtcaggcggggcctgctggtgccccagagtgggcgtctgttccccagtccctgctttcctcagctggcctgattgggggtcttcccagaggggtcgtctgaggggagggtgtgggagcaggttccatcccagctcagcctcctgacccaggccctggctaagggctgcaggagtctgtgagtcaggcctacgtggcagctgcggtcctcacacccacacatacgtctcttctcacacgcatccccccaggggccctcagtgagcattgcctgcctcctgctagggtccagctgggtccagtacaccagaacgcacactccagtgtcctctgccctgtgtatgcccttccgccgtccaagttggaaggtggcaaaccggatgagtatcctgggagggagtgagctcaccggcagtggccaggcccctgggaaacctggagtttgggagcagcatcctccatgggtcccccagtccttccagcaggccaaatagacctgtgttggaggtaaccccactcccacgccaggtgctgatccggagtggccgggtgcccattgtgtccttggagtgtgtgtcctgcaaggcacaggccgtgtacgaagtgagccgcagctcctacgtgtacttggagggccgctgcctcaattgcagcagcggctccaagcgaggggtgagtgttgagcggggtgtgggcgggctggggatgggtcccatggccgaggggacggggcctgcaggcagaagtggggctgacagggcagagggttgcgccccctcaccaccccttctgcctgcagcggtgggctgcacgtacgttcagcaacaagacgctggtgctggatgagaccaccacatccacgggcagtgcaggcatgcgactggtgctgcggcggggcgtgctgcgggacggcgagggatacaccttcacgctcacggtgctgggccgctctggcgaggaggagggctgcgcctccatccgcctgtcccccaaccgcccgccgctggggggctcttgccgcctcttcccactgggcgctgtgcacgccctcaccaccaaggtgcacttcgaatgcacgggtgagtgcaggcctgcgtggggggagcagcgggatcccccgactctgtgacgtcacggagccctcccgtgatgccgtggggaccgtccctcaggctggcatgacgcggaggatgctggcgccccgctggtgtacgccctgctgctgcggcgctgtcgccagggccactgcgaggagttctgtgtctacaagggcagcctctccagctacggagccgtgctgcccccgggtttcaggccacacttcgaggtgggcctggccgtggtggtgcaggaccagctgggagccgctgtggtcgccctcaacaggtgagccaggccgtgggagggcgcccccgagactgccacctgctcaccacccccctctgctcgtaggtctttggccatcaccctcccagagcccaacggcagcgcaacggggctcacagtctggctgcacgggctcaccgctagtgtgctcccagggctgctgcggcaggccgatccccagcacgtcatcgagtactcgttggccctggtcaccgtgctgaacgaggtgagtgcagcctgggaggggacgtcacatctgctgcatgcgtgcttgggaccaagacctgtacccctgcctggagctttgcagagggctcatcccgggccccagagataaatcccagtgaccctgaagcagcaccccgaccttccgctcccagcagccacacccaccgggccctctccggcgtctgctttccacaatgcagcccccgcccaggagggcccatgtgcttaccctgttttgcccatgaagaaacagctcagtgttgtgggtcagtgcccgcatcacacagcgtctagcacgtaactgcaccccgggagtcgtgggcatctgctggcctcctgccggcctcctgcgctgctgacagcttgctgtgccccctgcctgccccagtacgagcgggccctggacgtggcggcagagcccaagcacgagcggcagcaccgagcccagatacgcaagaacatcacggagactctggtgtccctgagggtccacactgtggatgacatccagcagatcgctgctgcgctggcccagtgcatggtaggatggccccacctgctcaccctgccccgcatgcctgccagggcactgggttcagccccccagggcagacgggcagcttggccgaggagctgagcctccagcctgggctccttcctgccatggcgttcctcggtctctgacctgcttcagtagcctcagccgttctgtcctgtgtgaacgcagggtgcctctcgggggacccagggtgtaaagaggggcccagatgtggggagggactaagaagatgctgctctgtgccctccactctcccctcccctcccctcccccttccctcccctagcccctcccctcctcccctcccctagcccttcccctcctcccctcccctagccctttcccttcttcccccccagcccttcccctcctcccctcccctttttctccactcccctctcctctctcccctcctcctccgctctcatgtgaagaggtgccttgtgtggtcggtgggctgcatcacgtggtccccaggtggaggccctgggtcatgcagagccacagaaaatgcttagtgaggaggctgtgggggtccagtcaagtgggctctccagctgcagggctgggggtgggagccaggtgaggacccgtgtagagaggagggcgtgtgcaaggagtggggccaggagcggggctggacactgctggctccacacaggggcccagcagggagctcgtatgccgctcgtgcctgaagcagacgctgcacaagctggaggccatgatgctcatcctgcaggcagagaccaccgcgggcaccgtgacgcccaccgccatcggagacagcatcctcaacatcacaggtgccgcggcccgtgccccatgccacccgcccgccccgtgcggccctttcctctgcctccctcctccccccaaccgcgtcgcctttgccccatcccatcttcgtccccctcccctccccccaattcccatcctcatccccctcccccaattcccattctcctccccctcccccttccctattaccatcccttttctccatctctctccccttttctccatttccccccccgtcctccccgtccttttgtccattcccctcatcttcctcatccccctcatcccccttcccctcccttatcccccttcccctccctttccccctgctcctcttcttctcccttctcttttctctacccttttccttcctttttcctccctctccccatcatccccctcatcttcgtcctcatccccatcaccttccccctcccccctccaccactctctctccagcttcccccttccttctgcctgcacctcgctctctgccccctcaggttccccctttctcccagcccccaccctccggctccccctttttgcctgcccccaccctccctctacctccctgtctctgcactgacctcacgcatgtctgcaggagacctcatccacctggccagctcggacgtgcgggcaccacagccctcagagctgggagccgagtcaccatctcggatggtggcgtcccaggcctacaacctgacctctgccctcatgcgcatcctcatgcgctcccgcgtgctcaacgaggagcccctgacgctggcgggcgaggagatcgtggcccagggcaagcgctcggacccgcggagcctgctgtgctatggcggcgccccagggcctggctgccacttctccatccccgaggctttcagcggggccctggccaacctcagtgacgtggtgcagctcatctttctggtggactccaatccctttccctttggctatatcagcaactacaccgtctccaccaaggtggcctcgatggcattccagacacaggccggcgcccagatccccatcgagcggctggcctcagagcgcgccatcaccgtgaaggtgcccaacaactcggactgggctgcccggggccaccgcagctccgccaactccgccaactccgttgtggtccagccccaggcctccgtcggtgctgtggtcaccctggacagcagcaaccctgcggccgggctgcatctgcagctcaactatacgctgctggacggtgcgtgcagcgggtggggcacacgcggccccctggccttgttcttggggggaaggcgtttctcgtagggcttccatgggtgtctctggtgaaatttgctttctgtttcatgggctgctgggggcctggccagagaggagctgggggccacggagaagcaggtgccagctctggtgcagaggctcctatggcctttcaggcccgtggcagagggtgggctcaggagggccatcgtgggtgtcccccgggtggttgagcttcccggcaggcgtgtgacctgcgcgttctgccccaggccactacctgtctgaggaacctgagccctacctggcagtctacctacactcggagccccggcccaatgagcacaactgctcggctagcaggaggatccgcccagagtcactccagggtgctgaccaccggccctacaccttcttcatttccccggggtgagctctgcgggccagcctggcagggcagggcagggcatcatgggtcagcattgcctgggttactggccccatggggacggcaggcagcgaggggactggaccgggtatgggctctgagactgcgacatccaacctggcggagcctgggctcacgtccgctaccccttccctgcccaggagcagagacccagcggggagttaccatctgaacctctccagccacttccgctggtcggcgctgcaggtgtccgtgggcctgtacacgtccctgtgccagtacttcagcgaggaggacatggtgtggcggacagaggggctgctgcccctggaggagacctcgccccgccaggccgtctgcctcacccgccacctcaccgccttcggcgccagcctcttcgtgcccccaagccatgtccgctttgtgtttcctgtgagtgaccctgtgctcctgggagcctctgcagagtcgaggagggcctgggtgggctcggctctatcctgagaaggcacagcttgcacgtgacctcctgggcccggcggctgtgtcctcacaggagccgacagcggatgtaaactacatcgtcatgctgacatgtgctgtgtgcctggtgacctacatggtcatggccgccatcctgcacaagctggaccagttggatgccagccggggccgcgccatccctttctgtgggcagcggggccgcttcaagtacgagatcctcgtcaagacaggctggggccggggctcaggtgaggggcgcagcggggtggcagggcctcccctgctctcactggctgtgctggttgcaccctctgggagtgagtctcgtcgcaggcgtcagaacaaggcagtttttgcagtgctgtgtgaagggctcgtgtgttcatcctgggaatgacctcgtgagcactcactgtccctgaggactaggacagctcctagctggaagtaggtgccagtcagtcagggtgggcagcccacgttctgcacagtagcgtggccccacaagtgacgtgagcatcgctaccactgtgggagactgtgcatccacccgcgatcctgactgcatagctcgtctctcagacggaggcgccagcaccctccccgtggctgtttcttcagtacctccattttcctttcattggaattgcccttctggcattccctttttgttttcgtttttctttttttagagacggagtctcactctgttgcccaggctggagtgcaatggcatgatcttggctcacagcaacttccagctcccgggtttaagccattccccttaagcgattctcctgagtagctgggagtacaggtgcacaccaccacacccagttaatttttcaccatgtcagccaggcgaactcctgacctcaggtgatccgcctgcctcggcctgccagagtgctgggatgacaggtgtgagccaccacacctggctgtgttcccattttttatctctgtgctgctttcctcttcattgcccagttctttcttttgattacctacttttaaaaactgtcggccgggcgcggtggctcacacctgtaatccgagcactttgggaggccaggcaggcaaatcacggggtcaggagatcgagaccatcctggctaacggtgaaaccctgtctctaataaaaagtacaaaaaaattagcccggcgtagtggcaggcgcctgtagtcccagctccttgggagactgaggcaggagaatggcgtgaacccgggaggcggagcttgcagtgagctgagattgcgccactgcactccagcctgggtgacacagcaagactccatctcaaaaaaaaaagaaaaaaaatactgtcacctgggtctgtcactgggagaggaggtgacacagcttcacgctttgcagtctgtgcatgaactgagggacgggtgtgtggtgcgggtcaccggttgtggcatgactgaggcgtggacaggtgtgcagtgcgggtcactggttgtggtgtggactgaggcgtgtgcagccatgtttgcatgtcacaagttacagttctttccatgtaacttaatcatgtccttgaggtcctgctgttaattggacaaattgcagtaaccgcagctccttgtgtatggcagagccgtgcaaagccgggactgcctgtgtggctccttgagtgcgcacaggccaaagctgagatgacttgcctgggatgccacacgtgttgggcagcagaccgagcctcccacccctccctcttgcctcccaggtaccacggcccacgtgggcatcatgctgtatggggtggacagccggagcggccaccggcacctggacggcgacagagccttccaccgcaacagcctggacatcttccggatcgccaccccgcacagcctgggtagcgtgtggaagatccgagtgtggcacgacaacaaaggtttgtgcggaccctgccaagctctgcccctctgcccccgcattggggcgccctgcgagcctgacctccctcctgcgcctctgcagggctcagccctgcctggttcctgcagcacgtcatcgtcagggacctgcagacggcacgcagcgccttcttcctggtcaatgactggctttcggtggagacggaggccaacgggggcctggtggagaaggaggtgctggccgcgagtaaggcctcgttccatgttcccactccgtgggaggttgggcagggtggtcctgccccgtggcctcctgcagtgcggccctccctgccttctaggcgacgcagcccttttgcgcttccggcgcctgctggtggctgagctgcagcgtggcttctttgacaagcacatctggctctccatatgggaccggccgcctcgtagccgtttcactcgcatccagagggccacctgctgcgttctcctcatctgcctcttcctgggcgccaacgccgtgtggtacggggctgttggcgactctgcctacaggtgggtgccgtaggggtcggggcagcctcttcctgcccagcccttcctgcccctcagcctcacctgtgtggcctcctctcctccacacagcacggggcatgtgtccaggctgagcccgctgagcgtcgacacagtcgctgttggcctggtgtccagcgtggttgtctatcccgtctacctggccatcctttttctcttccggatgtcccggagcaaggtgggctggggctggggacccgggagtactgggaatggagcctgggcctcggcaccatgcctagggccgccactttccagtgctgcagccagagggaaaggcgtccaccaaaggctgctcgggaagggtcaacacacttgagcagccttagctagactgaccagggagaaagagagaagactcagaagccagaatggtgaaagaacgagggcactttgctaagcagacgccacggacgactgcacagcagcacgccagataactcagaagaagcaagcacgcggctgtgcacgcttccgaaatgcactccagaagaaaatctcagtacatctataggaagtgaagaggctgagttagtcccttagaaacgtcccagtggccgggccgggtgtggtggctcacgcctgtaatcccaacacttcaggtggccgaggtgggcggatctgagtccaggagtttgagaccagcctgggcaacatagcaagaccccatctatataaaacattaaaaagggccaggcgcggtggctcacgcctgtaatcccagcactttgggaggccgaggcgggcagatcacttgaggtcaggagttcgagaccagcctggccaacacaatgaaaccccgactctactacaaatacaaaaacttagctgggcatggtggcgggcgcctgtagtcccagctactcgagaggctgaggcaggagaatggcatgaacccaggaggcggagcttgcagtgagccgagattgcgccactgcactccatcctgggcaacggagcaagactccatctccaaaaaaaaaaaaaaaaaatcccacaaagaaaagctcaggctcagagccttcacgatagaatttttctaagcagttaaggaagaattaacaccaatccttcacagactctttccaagaatacagcaggtgggaacgcttcccattcatacggaaacgggaggccgcaccccttaggaatgcacacgtggggtcctcaagaggttacatgcaaactaaccccagcagcacacagagaaggcgcataagccgcgaccaggaggggttgctcccgagtccgtggcaggaaccagaggccacatgtggctgctcgtatttaagttaattaaaatggaacgatggccgggtgtggtggctcacacctgtaatcccagcactttgggaggcggaggcgggcagatcacttgaggtcaggagttccaagaccagcctggccaacacagtgaaaccccgtctctactaaaaatacaaaaaattagctgggcatggtggcaggcacctgtaatcccagctactcaggaggctgagccaggacaatcgcctgaacgcgggaggtggaggttgcagtgagctgagattgcgccattgcactccagcctgggtgacagcgagactccatctaaaaaagaaaatatgaaatttaaaactctgttccttagctgcaccagtctgctgtcaagtgttcagtggcacacgtcgcgaggggctgccatcacggacggtgcagatgtcccatatatccagcattctaggacattctgtcagatggcaccgggctctgtcctgtctgctgaggaggtggcttctcatccctgtcctgagcaggtctgagctgccgcccgctgaccactgccctcgtcctgcaggtggctgggagcccgagccccacacctgccgggcagcaggtgctggacatcgacagctgcctggactcgtccgtgctggacagctccttcctcacgttctcaggcctccacgctgaggtgaggactctactgggggtcctgggctgggctgggggtcctgccgccttggcgcagcttggactcaagacactgtgcacctctcagcaggcctttgttggacagatgaagagtgacttgtttctggatgattctaagag

SEQ ID NO: 13254 - DNA, 4193 bp, Homo sapiens
gcagacagggtgctcacacagggcgtgaggcctggcttcccagtgagggcagcagcccagttactggggacgtcggccccgggcaggtcctgctggctggctcctcgggctacctggtgggctttaaattcctggaaagtcacggctctgacagtggctccgctaactcattccactgtctcatttcacaaaatgaatttaaaactctgctccctgacctcacacgagcccccgtgagtctctcacgccctctgctgtgttctcgcctggctaaagcgagtggcttttgaggtggagtctgaacccctgatgggaaactgcgggctgcccgcggtgccaccatgctggaggtacagccccgtggtggaggccggctcggacatggtcttccggtggaccatcaacgacaagcagtccctgaccttccagaacgtggtcttcaatgtcatttatcagagcgcggcggtcttcaagctctcactgacggcctccaaccacgtgagcaacgtcaccgtgaactacaacgtaaccgtggagcggatgaacaggatgcagggtctgcaggtctccacagtgccggccgtgctgtcccccaatgccacgctagcactgacggcgggcgtgctggtggactcggccgtggaggtggccttcctgtggacctttggggatggggagcaggccctccaccagttccagcctccgtacaacgagtccttcccggttccagacccctcggtggcccaggtgctggtggagcacaatgtcatgcacacctacgctgccccaggtgctgatccggagtggccgggtgcccattgtgtccttggagtgtgtgtcctgcaaggcacaggccgtgtacgaagtgagccgcagctcctacgtgtacttggagggccgctgcctcaattgcagcagcggctccaagcgagggcggtgggctgcacgtacgttcagcaacaagacgctggtgctggatgagaccaccacatccacgggcagtgcaggcatgcgactggtgctgcggcggggcgtgctgcgggacggcgagggatacaccttcacgctcacggtgctgggccgctctggcgaggaggagggctgcgcctccatccgcctgtcccccaaccgcccgccgctggggggctcttgccgcctcttcccactgggcgctgtgcacgccctcaccaccaaggtgcacttcgaatgcacgggctggcatgacgcggaggatgctggcgccccgctggtgtacgccctgctgctgcggcgctgtcgccagggccactgcgaggagttctgtgtctacaagggcagcctctccagctacggagccgtgctgcccccgggtttcaggccacacttcgaggtgggcctggccgtggtggtgcaggaccagctgggagccgctgtggtcgccctcaacaggtctttggccatcaccctcccagagcccaacggcagcgcaacggggctcacagtctggctgcacgggctcaccgctagtgtgctcccagggctgctgcggcaggccgatccccagcacgtcatcgagtactcgttggccctggtcaccgtgctgaacgagtacgagcgggccctggacgtggcggcagagcccaagcacgagcggcagcaccgagcccagatacgcaagaacatcacggagactctggtgtccctgagggtccacactgtggatgacatccagcagatcgctgctgcgctggcccagtgcatggggcccagcagggagctcgtatgccgctcgtgcctgaagcagacgctgcacaagctggaggccatgatgctcatcctgcaggcagagaccaccgcgggcaccgtgacgcccaccgccatcggagacagcatcctcaacatcacaggagacctcatccacctggccagctcggacgtgcgggcaccacagccctcagagctgggagccgagtcaccatctcggatggtggcgtcccaggcctacaacctgacctctgccctcatgcgcatcctcatgcgctcccgcgtgctcaacgaggagcccctgacgctggcgggcgaggagatcgtggcccagggcaagcgctcggacccgcggagcctgctgtgctatggcggcgccccagggcctggctgccacttctccatccccgaggctttcagcggggccctggccaacctcagtgacgtggtgcagctcatctttctggtggactccaatccctttccctttggctatatcagcaactacaccgtctccaccaaggtggcctcgatggcattccagacacaggccggcgcccagatccccatcgagcggctggcctcagagcgcgccatcaccgtgaaggtgcccaacaactcggactgggctgcccggggccaccgcagctccgccaactccgccaactccgttgtggtccagccccaggcctccgtcggtgctgtggtcaccctggacagcagcaaccctgcggccgggctgcatctgcagctcaactatacgctgctggacggtgcgtgcagcgggtggggcacacgcggccccctggccttgttcttggggggaaggcgtttctcgtagggcttccatgggtgtctctggtgaaatttgctttctgtttcatgggctgctgggggcctggccagagaggagctgggggccacggagaagcaggccactacctgtctgaggaacctgagccctacctggcagtctacctacactcggagccccggcccaatgagcacaactgctcggctagcaggaggatccgcccagagtcactccagggtgctgaccaccggccctacaccttcttcatttccccggggagcagagacccagcggggagttaccatctgaacctctccagccacttccgctggtcggcgctgcaggtgtccgtgggcctgtacacgtccctgtgccagtacttcagcgaggaggacatggtgtggcggacagaggggctgctgcccctggaggagacctcgccccgccaggccgtctgcctcacccgccacctcaccgccttcggcgccagcctcttcgtgcccccaagccatgtccgctttgtgtttcctgagccgacagcggatgtaaactacatcgtcatgctgacatgtgctgtgtgcctggtgacctacatggtcatggccgccatcctgcacaagctggaccagttggatgccagccggggccgcgccatccctttctgtgggcagcggggccgcttcaagtacgagatcctcgtcaagacaggctggggccggggctcaggtaccacggcccacgtgggcatcatgctgtatggggtggacagccggagcggccaccggcacctggacggcgacagagccttccaccgcaacagcctggacatcttccggatcgccaccccgcacagcctgggtagcgtgtggaagatccgagtgtggcacgacaacaaagggctcagccctgcctggttcctgcagcacgtcatcgtcagggacctgcagacggcacgcagcgccttcttcctggtcaatgactggctttcggtggagacggaggccaacgggggcctggtggagaaggaggtgctggccgcgagcgacgcagcccttttgcgcttccggcgcctgctggtggctgagctgcagcgtggcttctttgacaagcacatctggctctccatatgggaccggccgcctcgtagccgtttcactcgcatccagagggccacctgctgcgttctcctcatctgcctcttcctgggcgccaacgccgtgtggtacggggctgttggcgactctgcctacagcacggggcatgtgtccaggctgagcccgctgagcgtcgacacagtcgctgttggcctggtgtccagcgtggttgtctatcccgtctacctggccatcctttttctcttccggatgtcccggagcaaggtggctgggagcccgagccccacacctgccgggcagcaggtgctggacatcgacagctgcctggactcgtccgtgctggacagctccttcctcacgttctcaggcctccacgctgaggtgaggactctactgggggtcctgggctgggctgggggtcctgccgccttggcgcagcttggactcaagacactgtgcacctctcagcaggcctttgttggacagatgaagagtgacttgtttctggatgattctaagag

SEQ ID NO: 13255 - DNA, 743 bp, Homo sapiens
atcatgtccttgaggtcctgctgttaattggacaaattgcagtaaccgcagctccttgtgtatggcagagccgtgcaaagccgggactgcctgtgtggctccttgagtgcgcacaggccaaagctgagatgacttgcctgggatgccacacgtgttgggcagcagaccgagcctcccacccctccctcttgcctcccaggtaccacggcccacgtgggcatcatgctgtatggggtggacagccggagcggccaccggcacctggacggcgacagagccttccaccgcaacagcctggacatcttccggatcgccaccccgcacagcctgggtagcgtgtggaagatccgagtgtggcacgacaacaaaggtttgtgcggaccctgccaagctctgcccctctgcccccgcattggggcgccctgcgagcctgacctccctcctgcgcctctgcagggctcagccctgcctggttcctgcagcacgtcatcgtcagggacctgcagacggcacgcagcgccttcttcctggtcaatgactggctttcggtggagacggaggccaacgggggcctggtggagaaggaggtgctggccgcgagtaaggcctcgttccatgttcccactccgtgggaggttgggcagggtggtcctgccccgtggcctcctgcagtgcggccctccctgccttctaggcgacgcagcccttttgcgcttccggcgcctgctggtggctgagctgca

SEQ ID NO: 13256 - DNA, 563 bp, Homo sapiens
atcatgtccttgaggtcctgctgttaattggacaaattgcagtaaccgcagctccttgtgtatggcagagccgtgcaaagccgggactgcctgtgtggctccttgagtgcgcacaggccaaagctgagatgacttgcctgggatgccacacgtgttgggcagcagaccgagcctcccacccctccctcttgcctcccaggtaccacggcccacgtgggcatcatgctgtatggggtggacagccggagcggccaccggcacctggacggcgacagagccttccaccgcaacagcctggacatcttccggatcgccaccccgcacagcctgggtagcgtgtggaagatccgagtgtggcacgacaacaaagggctcagccctgcctggttcctgcagcacgtcatcgtcagggacctgcagacggcacgcagcgccttcttcctggtcaatgactggctttcggtggagacggaggccaacgggggcctggtggagaaggaggtgctggccgcgagcgacgcagcccttttgcgcttccggcgcctgctggtggctgagctgca

SEQ ID NO: 13257 - DNA, 1170 bp, Homo sapiens
ggcaggtctgaggagctctggccatggatggcccacgtgctgctgccctacgtccacgggaaccagtccagcccagagctggggcccccacggctgcggcaggtgcggctgcaggaaggtgagctggcagggcgtgccccaagacttaaatcgttcctcttgttgagagagcagcctttagcggagctctggcatcagccctgctccctagctgtgtgacctttgccctcttaacaccgccgtttccttctctgtatatgagagatggtaacgttgtctaattgatggctgctgggagggttccctggggtggcgccgaaccagagctcaggcgagctggccagcaggaaacactcctgttgggttttgatgaggccctggccccggcctggggctctgtgtgtttcagcactctacccagaccctcccggccccagggtccacacgtgctcggccgcaggaggcttcagcaccagcgattacgacgttggctgggagagtcctcacaatggctcggggacgtgggcctattcagcgccggatctgctggggtgagcagagcgagggccccgggcgtctacgccaaggacaagggagtagttctccaggagtgccgcggcctcctgaccagcctggctccggggtgccggaagggctggggtgcggcacccacgccacccctctccggcagggcatggtcctggggctcctgtgccgtgtatgacagcgggggctacgtgcaggagctgggcctgagcctggaggagagccgcgaccggctgcgcttcctgcagctgcacaactggctggacaacaggtgggagctccctcccctgccctctccggggtggccgcagtcaccagccaggagcccaccctcactcctccggcccccgctggcctaggcggcttccacagcccctcagccacgcctgcactgcgcggtccccgcagctcccgccctgccacccgctcctactgacccgcaccctctgcgcaggagccgcgctgtgttcctggagctcacgcgctacagcccggccgtggggctgcacgccgccgtcacgctgcgcctcgagttcccggcggccggccgcgccctggccgccctcagcgtccgcccctttgcgctgcgccgcctcagcgcgggcctctcgctgcctctgctca

SEQ ID NO: 13258 - DNA, 696 bp, Homo sapiens
ggcaggtctgaggagctctggccatggatggcccacgtgctgctgccctacgtccacgggaaccagtccagcccagagctggggcccccacggctgcggcaggtgcggctgcaggaagcactctacccagaccctcccggccccagggtccacacgtgctcggccgcaggaggcttcagcaccagcgattacgacgttggctgggagagtcctcacaatggctcggggacgtgggcctattcagcgccggatctgctggggtgagcagagcgagggccccgggcgtctacgccaaggacaagggagtagttctccaggagtgccgcggcctcctgaccagcctggctccggggtgccggaagggctggggtgcggcacccacgccacccctctccggcagggcatggtcctggggctcctgtgccgtgtatgacagcgggggctacgtgcaggagctgggcctgagcctggaggagagccgcgaccggctgcgcttcctgcagctgcacaactggctggacaacaggagccgcgctgtgttcctggagctcacgcgctacagcccggccgtggggctgcacgccgccgtcacgctgcgcctcgagttcccggcggccggccgcgccctggccgccctcagcgtccgcccctttgcgctgcgccgcctcagcgcgggcctctcgctgcctctgctca

SEQ ID NO: 13259 - DNA, 10032 bp, Homo sapiens
attctatgtaacacgacagcctgcttcagctttgcttccttccaaacctgccacagttccacgtacagtcttcaagccacatatgctctagtggcaaaagctacacagtcccctagcaataccaacagtgaggaagagccccttcccaccccagaggtagccactgtccccagcccatgtccctgttgctggatgtggtgggccggttctcaccctcacgctcccctctctggaccggccaggaggcttggtgaccctgagcccgtggtggctgctcctgctgctgtcaggcggggcctgctggtgccccagagtgggcgtctgttccccagtccctgctttcctcagctggcctgattgggggtcttcccagaggggtcgtctgaggggagggtgtgggagcaggttccatcccagctcagcctcctgacccaggccctggctaagggctgcaggagtctgtgagtcaggcctacgtggcagctgcggtcctcacacccacacatacgtctcttctcacacgcatccccccaggggccctcagtgagcattgcctgcctcctgctagggtccagctgggtccagtacaccagaacgcacactccagtgtcctctgccctgtgtatgcccttccgccgtccaagttggaaggtggcaaaccggatgagtatcctgggagggagtgagctcaccggcagtggccaggcccctgggaaacctggagtttgggagcagcatcctccatgggtcccccagtccttccagcaggccaaatagacctgtgttggaggtaaccccactcccacgccaggtgctgatccggagtggccgggtgcccattgtgtccttggagtgtgtgtcctgcaaggcacaggccgtgtacgaagtgagccgcagctcctacgtgtacttggagggccgctgcctcaattgcagcagcggctccaagcgaggggtgagtgttgagcggggtgtgggcgggctggggatgggtcccatggccgaggggacggggcctgcaggcagaagtggggctgacagggcagagggttgcgccccctcaccaccccttctgcctgcagcggtgggctgcacgtacgttcagcaacaagacgctggtgctggatgagaccaccacatccacgggcagtgcaggcatgcgactggtgctgcggcggggcgtgctgcgggacggcgagggatacaccttcacgctcacggtgctgggccgctctggcgaggaggagggctgcgcctccatccgcctgtcccccaaccgcccgccgctggggggctcttgccgcctcttcccactgggcgctgtgcacgccctcaccaccaaggtgcacttcgaatgcacgggtgagtgcaggcctgcgtggggggagcagcgggatcccccgactctgtgacgtcacggagccctcccgtgatgccgtggggaccgtccctcaggctggcatgacgcggaggatgctggcgccccgctggtgtacgccctgctgctgcggcgctgtcgccagggccactgcgaggagttctgtgtctacaagggcagcctctccagctacggagccgtgctgcccccgggtttcaggccacacttcgaggtgggcctggccgtggtggtgcaggaccagctgggagccgctgtggtcgccctcaacaggtgagccaggccgtgggagggcgcccccgagactgccacctgctcaccacccccctctgctcgtaggtctttggccatcaccctcccagagcccaacggcagcgcaacggggctcacagtctggctgcacgggctcaccgctagtgtgctcccagggctgctgcggcaggccgatccccagcacgtcatcgagtactcgttggccctggtcaccgtgctgaacgaggtgagtgcagcctgggaggggacgtcacatctgctgcatgcgtgcttgggaccaagacctgtacccctgcctggagctttgcagagggctcatcccgggccccagagataaatcccagtgaccctgaagcagcaccccgaccttccgctcccagcagccacacccaccgggccctctccggcgtctgctttccacaatgcagcccccgcccaggagggcccatgtgcttaccctgttttgcccatgaagaaacagctcagtgttgtgggtcagtgcccgcatcacacagcgtctagcacgtaactgcaccccgggagtcgtgggcatctgctggcctcctgccggcctcctgcgctgctgacagcttgctgtgccccctgcctgccccagtacgagcgggccctggacgtggcggcagagcccaagcacgagcggcagcaccgagcccagatacgcaagaacatcacggagactctggtgtccctgagggtccacactgtggatgacatccagcagatcgctgctgcgctggcccagtgcatggtaggatggccccacctgctcaccctgccccgcatgcctgccagggcactgggttcagccccccagggcagacgggcagcttggccgaggagctgagcctccagcctgggctccttcctgccatggcgttcctcggtctctgacctgcttcagtagcctcagccgttctgtcctgtgtgaacgcagggtgcctctcgggggacccagggtgtaaagaggggcccagatgtggggagggactaagaagatgctgctctgtgccctccactctcccctcccctcccctcccccttccctcccctagcccctcccctcctcccctcccctagcccttcccctcctcccctcccctagccctttcccttcttcccccccagcccttcccctcctcccctcccctttttctccactcccctctcctctctcccctcctcctccgctctcatgtgaagaggtgccttgtgtggtcggtgggctgcatcacgtggtccccaggtggaggccctgggtcatgcagagccacagaaaatgcttagtgaggaggctgtgggggtccagtcaagtgggctctccagctgcagggctgggggtgggagccaggtgaggacccgtgtagagaggagggcgtgtgcaaggagtggggccaggagcggggctggacactgctggctccacacaggggcccagcagggagctcgtatgccgctcgtgcctgaagcagacgctgcacaagctggaggccatgatgctcatcctgcaggcagagaccaccgcgggcaccgtgacgcccaccgccatcggagacagcatcctcaacatcacaggtgccgcggcccgtgccccatgccacccgcccgccccgtgcggccctttcctctgcctccctcctccccccaaccgcgtcgcctttgccccatcccatcttcgtccccctcccctccccccaattcccatcctcatccccctcccccaattcccattctcctccccctcccccttccctattaccatcccttttctccatctctctccccttttctccatttccccccccgtcctccccgtccttttgtccattcccctcatcttcctcatccccctcatcccccttcccctcccttatcccccttcccctccctttccccctgctcctcttcttctcccttctcttttctctacccttttccttcctttttcctccctctccccatcatccccctcatcttcgtcctcatccccatcaccttccccctcccccctccaccactctctctccagcttcccccttccttctgcctgcacctcgctctctgccccctcaggttccccctttctcccagcccccaccctccggctccccctttttgcctgcccccaccctccctctacctccctgtctctgcactgacctcacgcatgtctgcaggagacctcatccacctggccagctcggacgtgcgggcaccacagccctcagagctgggagccgagtcaccatctcggatggtggcgtcccaggcctacaacctgacctctgccctcatgcgcatcctcatgcgctcccgcgtgctcaacgaggagcccctgacgctggcgggcgaggagatcgtggcccagggcaagcgctcggacccgcggagcctgctgtgctatggcggcgccccagggcctggctgccacttctccatccccgaggctttcagcggggccctggccaacctcagtgacgtggtgcagctcatctttctggtggactccaatccctttccctttggctatatcagcaactacaccgtctccaccaaggtggcctcgatggcattccagacacaggccggcgcccagatccccatcgagcggctggcctcagagcgcgccatcaccgtgaaggtgcccaacaactcggactgggctgcccggggccaccgcagctccgccaactccgccaactccgttgtggtccagccccaggcctccgtcggtgctgtggtcaccctggacagcagcaaccctgcggccgggctgcatctgcagctcaactatacgctgctggacggtgcgtgcagcgggtggggcacacgcggccccctggccttgttcttggggggaaggcgtttctcgtagggcttccatgggtgtctctggtgaaatttgctttctgtttcatgggctgctgggggcctggccagagaggagctgggggccacggagaagcaggtgccagctctggtgcagaggctcctatggcctttcaggcccgtggcagagggtgggctcaggagggccatcgtgggtgtcccccgggtggttgagcttcccggcaggcgtgtgacctgcgcgttctgccccaggccactacctgtctgaggaacctgagccctacctggcagtctacctacactcggagccccggcccaatgagcacaactgctcggctagcaggaggatccgcccagagtcactccagggtgctgaccaccggccctacaccttcttcatttccccggggtgagctctgcgggccagcctggcagggcagggcagggcatcatgggtcagcattgcctgggttactggccccatggggacggcaggcagcgaggggactggaccgggtatgggctctgagactgcgacatccaacctggcggagcctgggctcacgtccgctaccccttccctgcccaggagcagagacccagcggggagttaccatctgaacctctccagccacttccgctggtcggcgctgcaggtgtccgtgggcctgtacacgtccctgtgccagtacttcagcgaggaggacatggtgtggcggacagaggggctgctgcccctggaggagacctcgccccgccaggccgtctgcctcacccgccacctcaccgccttcggcgccagcctcttcgtgcccccaagccatgtccgctttgtgtttcctgtgagtgaccctgtgctcctgggagcctctgcagagtcgaggagggcctgggtgggctcggctctatcctgagaaggcacagcttgcacgtgacctcctgggcccggcggctgtgtcctcacaggagccgacagcggatgtaaactacatcgtcatgctgacatgtgctgtgtgcctggtgacctacatggtcatggccgccatcctgcacaagctggaccagttggatgccagccggggccgcgccatccctttctgtgggcagcggggccgcttcaagtacgagatcctcgtcaagacaggctggggccggggctcaggtgaggggcgcagcggggtggcagggcctcccctgctctcactggctgtgctggttgcaccctctgggagtgagtctcgtcgcaggcgtcagaacaaggcagtttttgcagtgctgtgtgaagggctcgtgtgttcatcctgggaatgacctcgtgagcactcactgtccctgaggactaggacagctcctagctggaagtaggtgccagtcagtcagggtgggcagcccacgttctgcacagtagcgtggccccacaagtgacgtgagcatcgctaccactgtgggagactgtgcatccacccgcgatcctgactgcatagctcgtctctcagacggaggcgccagcaccctccccgtggctgtttcttcagtacctccattttcctttcattggaattgcccttctggcattccctttttgttttcgtttttctttttttagagacggagtctcactctgttgcccaggctggagtgcaatggcatgatcttggctcacagcaacttccagctcccgggtttaagccattccccttaagcgattctcctgagtagctgggagtacaggtgcacaccaccacacccagttaatttttcaccatgtcagccaggcgaactcctgacctcaggtgatccgcctgcctcggcctgccagagtgctgggatgacaggtgtgagccaccacacctggctgtgttcccattttttatctctgtgctgctttcctcttcattgcccagttctttcttttgattacctacttttaaaaactgtcggccgggcgcggtggctcacacctgtaatccgagcactttgggaggccaggcaggcaaatcacggggtcaggagatcgagaccatcctggctaacggtgaaaccctgtctctaataaaaagtacaaaaaaattagcccggcgtagtggcaggcgcctgtagtcccagctccttgggagactgaggcaggagaatggcgtgaacccgggaggcggagcttgcagtgagctgagattgcgccactgcactccagcctgggtgacacagcaagactccatctcaaaaaaaaaagaaaaaaaatactgtcacctgggtctgtcactgggagaggaggtgacacagcttcacgctttgcagtctgtgcatgaactgagggacgggtgtgtggtgcgggtcaccggttgtggcatgactgaggcgtggacaggtgtgcagtgcgggtcactggttgtggtgtggactgaggcgtgtgcagccatgtttgcatgtcacaagttacagttctttccatgtaacttaatcatgtccttgaggtcctgctgttaattggacaaattgcagtaaccgcagctccttgtgtatggcagagccgtgcaaagccgggactgcctgtgtggctccttgagtgcgcacaggccaaagctgagatgacttgcctgggatgccacacgtgttgggcagcagaccgagcctcccacccctccctcttgcctcccaggtaccacggcccacgtgggcatcatgctgtatggggtggacagccggagcggccaccggcacctggacggcgacagagccttccaccgcaacagcctggacatcttccggatcgccaccccgcacagcctgggtagcgtgtggaagatccgagtgtggcacgacaacaaaggtttgtgcggaccctgccaagctctgcccctctgcccccgcattggggcgccctgcgagcctgacctccctcctgcgcctctgcagggctcagccctgcctggttcctgcagcacgtcatcgtcagggacctgcagacggcacgcagcgccttcttcctggtcaatgactggctttcggtggagacggaggccaacgggggcctggtggagaaggaggtgctggccgcgagtaaggcctcgttccatgttcccactccgtgggaggttgggcagggtggtcctgccccgtggcctcctgcagtgcggccctccctgccttctaggcgacgcagcccttttgcgcttccggcgcctgctggtggctgagctgcagcgtggcttctttgacaagcacatctggctctccatatgggaccggccgcctcgtagccgtttcactcgcatccagagggccacctgctgcgttctcctcatctgcctcttcctgggcgccaacgccgtgtggtacggggctgttggcgactctgcctacaggtgggtgccgtaggggtcggggcagcctcttcctgcccagcccttcctgcccctcagcctcacctgtgtggcctcctctcctccacacagcacggggcatgtgtccaggctgagcccgctgagcgtcgacacagtcgctgttggcctggtgtccagcgtggttgtctatcccgtctacctggccatcctttttctcttccggatgtcccggagcaaggtgggctggggctggggacccgggagtactgggaatggagcctgggcctcggcaccatgcctagggccgccactttccagtgctgcagccagagggaaaggcgtccaccaaaggctgctcgggaagggtcaacacacttgagcagccttagctagactgaccagggagaaagagagaagactcagaagccagaatggtgaaagaacgagggcactttgctaagcagacgccacggacgactgcacagcagcacgccagataactcagaagaagcaagcacgcggctgtgcacgcttccgaaatgcactccagaagaaaatctcagtacatctataggaagtgaagaggctgagttagtcccttagaaacgtcccagtggccgggccgggtgtggtggctcacgcctgtaatcccaacacttcaggtggccgaggtgggcggatctgagtccaggagtttgagaccagcctgggcaacatagcaagaccccatctatataaaacattaaaaagggccaggcgcggtggctcacgcctgtaatcccagcactttgggaggccgaggcgggcagatcacttgaggtcaggagttcgagaccagcctggccaacacaatgaaaccccgactctactacaaatacaaaaacttagctgggcatggtggcgggcgcctgtagtcccagctactcgagaggctgaggcaggagaatggcatgaacccaggaggcggagcttgcagtgagccgagattgcgccactgcactccatcctgggcaacggagcaagactccatctccaaaaaaaaaaaaaaaaaatcccacaaagaaaagctcaggctcagagccttcacgatagaatttttctaagcagttaaggaagaattaacaccaatccttcacagactctttccaagaatacagcaggtgggaacgcttcccattcatacggaaacgggaggccgcaccccttaggaatgcacacgtggggtcctcaagaggttacatgcaaactaaccccagcagcacacagagaaggcgcataagccgcgaccaggaggggttgctcccgagtccgtggcaggaaccagaggccacatgtggctgctcgtatttaagttaattaaaatggaacgatggccgggtgtggtggctcacacctgtaatcccagcactttgggaggcggaggcgggcagatcacttgaggtcaggagttccaagaccagcctggccaacacagtgaaaccccgtctctactaaaaatacaaaaaattagctgggcatggtggcaggcacctgtaatcccagctactcaggaggctgagccaggacaatcgcctgaacgcgggaggtggaggttgcagtgagctgagattgcgccattgcactccagcctgggtgacagcgagactccatctaaaaaagaaaatatgaaatttaaaactctgttccttagctgcaccagtctgctgtcaagtgttcagtggcacacgtcgcgaggggctgccatcacggacggtgcagatgtcccatatatccagcattctaggacattctgtcagatggcaccgggctctgtcctgtctgctgaggaggtggcttctcatccctgtcctgagcaggtctgagctgccgcccgctgaccactgccctcgtcctgcaggtggctgggagcccgagccccacacctgccgggcagcaggtgctggacatcgacagctgcctggactcgtccgtgctggacagctccttcctcacgttctcaggcctccacgctgaggtgaggactctactgggggtcctgggctgggctgggggtcctgccgccttggcgcagcttggactcaagacactgtgcacctctcagcaggcctttgttggacagatgaagagtgacttgtttctggatgattctaagag

SEQ ID NO: 13260 - DNA, 4443 bp, Homo sapiens
attctatgtaacacgacagcctgcttcagctttgcttccttccaaacctgccacagttccacgtacagtcttcaagccacatatgctctagtggcaaaagctacacagtcccctagcaataccaacagtgaggaagagccccttcccaccccagaggtagccactgtccccagcccatgtccctgttgctggatgtggtgggccggttctcaccctcacgctcccctctctggaccggccaggaggcttggtgaccctgagcccgtggtggctgctcctgctgctgtcaggcggggcctgctggtgccccagagtgggcgtctgttccccagtccctgctttcctcagctggcctgattgggggtcttcccagaggggtcgtctgaggggagggtgtgggagcaggttccatcccagctcagcctcctgacccaggccctggctaagggctgcaggagtctgtgagtcaggcctacgtggcagctgcggtcctcacacccacacatacgtctcttctcacacgcatccccccaggggccctcagtgagcattgcctgcctcctgctagggtccagctgggtccagtacaccagaacgcacactccagtgtcctctgccctgtgtatgcccttccgccgtccaagttggaaggtggcaaaccggatgagtatcctgggagggagtgagctcaccggcagtggccaggcccctgggaaacctggagtttgggagcagcatcctccatgggtcccccagtccttccagcaggccaaatagacctgtgttggaggtaaccccactcccacgccaggtgctgatccggagtggccgggtgcccattgtgtccttggagtgtgtgtcctgcaaggcacaggccgtgtacgaagtgagccgcagctcctacgtgtacttggagggccgctgcctcaattgcagcagcggctccaagcgagggcggtgggctgcacgtacgttcagcaacaagacgctggtgctggatgagaccaccacatccacgggcagtgcaggcatgcgactggtgctgcggcggggcgtgctgcgggacggcgagggatacaccttcacgctcacggtgctgggccgctctggcgaggaggagggctgcgcctccatccgcctgtcccccaaccgcccgccgctggggggctcttgccgcctcttcccactgggcgctgtgcacgccctcaccaccaaggtgcacttcgaatgcacgggctggcatgacgcggaggatgctggcgccccgctggtgtacgccctgctgctgcggcgctgtcgccagggccactgcgaggagttctgtgtctacaagggcagcctctccagctacggagccgtgctgcccccgggtttcaggccacacttcgaggtgggcctggccgtggtggtgcaggaccagctgggagccgctgtggtcgccctcaacaggtctttggccatcaccctcccagagcccaacggcagcgcaacggggctcacagtctggctgcacgggctcaccgctagtgtgctcccagggctgctgcggcaggccgatccccagcacgtcatcgagtactcgttggccctggtcaccgtgctgaacgaggtgagtgcagcctgggaggggacgtcacatctgctgcatgcgtgcttgggaccaagacctgtacccctgcctggagctttgcagagggctcatcccgggccccagagataaatcccagtgaccctgaagcagcaccccgaccttccgctcccagcagccacacccaccgggccctctccggcgtctgctttccacaatgcagcccccgcccaggagggcccatgtgcttaccctgttttgcccatgaagaaacagctcagtgttgtgggtcagtgcccgcatcacacagcgtctagcacgtaactgcaccccgggagtcgtgggcatctgctggcctcctgccggcctcctgcgctgctgacagcttgctgtgccccctgcctgccccagtacgagcgggccctggacgtggcggcagagcccaagcacgagcggcagcaccgagcccagatacgcaagaacatcacggagactctggtgtccctgagggtccacactgtggatgacatccagcagatcgctgctgcgctggcccagtgcatggggcccagcagggagctcgtatgccgctcgtgcctgaagcagacgctgcacaagctggaggccatgatgctcatcctgcaggcagagaccaccgcgggcaccgtgacgcccaccgccatcggagacagcatcctcaacatcacaggagacctcatccacctggccagctcggacgtgcgggcaccacagccctcagagctgggagccgagtcaccatctcggatggtggcgtcccaggcctacaacctgacctctgccctcatgcgcatcctcatgcgctcccgcgtgctcaacgaggagcccctgacgctggcgggcgaggagatcgtggcccagggcaagcgctcggacccgcggagcctgctgtgctatggcggcgccccagggcctggctgccacttctccatccccgaggctttcagcggggccctggccaacctcagtgacgtggtgcagctcatctttctggtggactccaatccctttccctttggctatatcagcaactacaccgtctccaccaaggtggcctcgatggcattccagacacaggccggcgcccagatccccatcgagcggctggcctcagagcgcgccatcaccgtgaaggtgcccaacaactcggactgggctgcccggggccaccgcagctccgccaactccgccaactccgttgtggtccagccccaggcctccgtcggtgctgtggtcaccctggacagcagcaaccctgcggccgggctgcatctgcagctcaactatacgctgctggacggccactacctgtctgaggaacctgagccctacctggcagtctacctacactcggagccccggcccaatgagcacaactgctcggctagcaggaggatccgcccagagtcactccagggtgctgaccaccggccctacaccttcttcatttccccggggagcagagacccagcggggagttaccatctgaacctctccagccacttccgctggtcggcgctgcaggtgtccgtgggcctgtacacgtccctgtgccagtacttcagcgaggaggacatggtgtggcggacagaggggctgctgcccctggaggagacctcgccccgccaggccgtctgcctcacccgccacctcaccgccttcggcgccagcctcttcgtgcccccaagccatgtccgctttgtgtttcctgagccgacagcggatgtaaactacatcgtcatgctgacatgtgctgtgtgcctggtgacctacatggtcatggccgccatcctgcacaagctggaccagttggatgccagccggggccgcgccatccctttctgtgggcagcggggccgcttcaagtacgagatcctcgtcaagacaggctggggccggggctcaggtaccacggcccacgtgggcatcatgctgtatggggtggacagccggagcggccaccggcacctggacggcgacagagccttccaccgcaacagcctggacatcttccggatcgccaccccgcacagcctgggtagcgtgtggaagatccgagtgtggcacgacaacaaagggctcagccctgcctggttcctgcagcacgtcatcgtcagggacctgcagacggcacgcagcgccttcttcctggtcaatgactggctttcggtggagacggaggccaacgggggcctggtggagaaggaggtgctggccgcgagcgacgcagcccttttgcgcttccggcgcctgctggtggctgagctgcagcgtggcttctttgacaagcacatctggctctccatatgggaccggccgcctcgtagccgtttcactcgcatccagagggccacctgctgcgttctcctcatctgcctcttcctgggcgccaacgccgtgtggtacggggctgttggcgactctgcctacagcacggggcatgtgtccaggctgagcccgctgagcgtcgacacagtcgctgttggcctggtgtccagcgtggttgtctatcccgtctacctggccatcctttttctcttccggatgtcccggagcaaggtggctgggagcccgagccccacacctgccgggcagcaggtgctggacatcgacagctgcctggactcgtccgtgctggacagctccttcctcacgttctcaggcctccacgctgaggtgaggactctactgggggtcctgggctgggctgggggtcctgccgccttggcgcagcttggactcaagacactgtgcacctctcagcaggcctttgttggacagatgaagagtgacttgtttctggatgattctaagag

SEQ ID NO: 13261 - DNA, 18869 bp, Homo sapiens
cccacacccggcctgcacttggtcaccatgacggcagggaacccgctgggctcagccaacgccaccgtggaagtggatgtgcaggtgcctgtgagtggcctcagcatcagggccagcgagcccggaggcagcttcgtggcggccgggtcctctgtgcccttttgggggcagctggccacgggcaccaatgtgagctggtgctgggctgtgcccggcggcagcagcaagcgtggccctcatgtcaccatggtcttcccggatgctggcaccttctccatccggctcaatgcctccaacgcagtcagctgggtctcagccacgtacaacctcacggcggaggagcccatcgtgggcctggtgctgtgggccagcagcaaggtggtggcgcccgggcagctggtccattttcagatcctgctggctgccggctcagctgtcaccttccgcctgcaggtcggcggggccaaccccgaggtgctccccgggccccgtttctcccacagcttcccccgcgtcggagaccacgtggtgagcgtgcggggcaaaaaccacgtgagctgggcccaggcgcaggtgcgcatcgtggtgctggaggccgtgagtgggctgcaggtgcccaactgctgcgagcctggcatcgccacgggcactgagaggaacttcacagcccgcgtgcagcgcggctctcgggtcgcctacgcctggtacttctcgctgcagaaggtccagggcgactcgctggtcatcctgtcgggccgcgacgtcacctacacgcccgtggccgcggggctgttggagatccaggtgcgcgccttcaacgccctgggcagtgagaaccgcacgctggtgctggaggttcaggacgccgtccagtatgtggccctgcagagcggcccctgcttcaccaaccgctcggcgcagtttgaggccgccaccagccccagcccccggcgtgtggcctaccactgggactttggggatgggtcgccagggcaggacacagatgagcccagggccgagcactcctacctgaggcctggggactaccgcgtgcaggtgaacgcctccaacctggtgagcttcttcgtggcgcaggccacggtgaccgtccaggtgctggcctgccgggagccggaggtggacgtggtcctgcccctgcaggtgctgatgcggcgatcacagcgcaactacttggaggcccacgttgacctgcgcgactgcgtcacctaccagactgagtaccgctgggaggtgtatcgcaccgccagctgccagcggccggggcgcccagcgcgtgtggccctgcccggcgtggacgtgagccggcctcggctggtgctgccgcggctggcgctgcctgtggggcactactgctttgtgtttgtcgtgtcatttggggacacgccactgacacagagcatccaggccaatgtgacggtggcccccgagcgcctggtgcccatcattgagggtggctcataccgcgtgtggtcagacacacgggacctggtgctggatgggagcgagtcctacgaccccaacctggaggacggcgaccagacgccgctcagtttccactgggcctgtgtggcttcgacacaggtcagtgcgtggcagggccgtcctccatgcccctcacccgtccacacccatgagcccagagaacacccagcttgccaccagggctggcccgtcctcagtgcctggtgggccccgtcccagcatggggagggggtctcccgcgctgtctcctgggccgggctctgctttaaaactggatggggctctcaggccacgtcgccccttgttctcggcctgcagagggaggctggcgggtgtgcgctgaactttgggccccgcgggagcagcacggtcaccattccacgggagcggctggcggctggcgtggagtacaccttcagcctgaccgtgtggaaggccggccgcaaggaggaggccaccaaccagacggtgggtgccgcccgcccctcggccacttgccttggacagcccagcctccctggtcatctactgttttccgtgttttagtgctggtggaggccgcacgctctcccctctctgtttctgatgcaaattctatgtaacacgacagcctgcttcagctttgcttccttccaaacctgccacagttccacgtacagtcttcaagccacatatgctctagtggcaaaagctacacagtcccctagcaataccaacagtgaggaagagccccttcccaccccagaggtagccactgtccccagcccatgtccctgttgctggatgtggtgggccggttctcaccctcacgctcccctctctggaccggccaggaggcttggtgaccctgagcccgtggtggctgctcctgctgctgtcaggcggggcctgctggtgccccagagtgggcgtctgttccccagtccctgctttcctcagctggcctgattgggggtcttcccagaggggtcgtctgaggggagggtgtgggagcaggttccatcccagctcagcctcctgacccaggccctggctaagggctgcaggagtctgtgagtcaggcctacgtggcagctgcggtcctcacacccacacatacgtctcttctcacacgcatccccccaggggccctcagtgagcattgcctgcctcctgctagggtccagctgggtccagtacaccagaacgcacactccagtgtcctctgccctgtgtatgcccttccgccgtccaagttggaaggtggcaaaccggatgagtatcctgggagggagtgagctcaccggcagtggccaggcccctgggaaacctggagtttgggagcagcatcctccatgggtcccccagtccttccagcaggccaaatagacctgtgttggaggtaaccccactcccacgccaggtgctgatccggagtggccgggtgcccattgtgtccttggagtgtgtgtcctgcaaggcacaggccgtgtacgaagtgagccgcagctcctacgtgtacttggagggccgctgcctcaattgcagcagcggctccaagcgaggggtgagtgttgagcggggtgtgggcgggctggggatgggtcccatggccgaggggacggggcctgcaggcagaagtggggctgacagggcagagggttgcgccccctcaccaccccttctgcctgcagcggtgggctgcacgtacgttcagcaacaagacgctggtgctggatgagaccaccacatccacgggcagtgcaggcatgcgactggtgctgcggcggggcgtgctgcgggacggcgagggatacaccttcacgctcacggtgctgggccgctctggcgaggaggagggctgcgcctccatccgcctgtcccccaaccgcccgccgctggggggctcttgccgcctcttcccactgggcgctgtgcacgccctcaccaccaaggtgcacttcgaatgcacgggtgagtgcaggcctgcgtggggggagcagcgggatcccccgactctgtgacgtcacggagccctcccgtgatgccgtggggaccgtccctcaggctggcatgacgcggaggatgctggcgccccgctggtgtacgccctgctgctgcggcgctgtcgccagggccactgcgaggagttctgtgtctacaagggcagcctctccagctacggagccgtgctgcccccgggtttcaggccacacttcgaggtgggcctggccgtggtggtgcaggaccagctgggagccgctgtggtcgccctcaacaggtgagccaggccgtgggagggcgcccccgagactgccacctgctcaccacccccctctgctcgtaggtctttggccatcaccctcccagagcccaacggcagcgcaacggggctcacagtctggctgcacgggctcaccgctagtgtgctcccagggctgctgcggcaggccgatccccagcacgtcatcgagtactcgttggccctggtcaccgtgctgaacgaggtgagtgcagcctgggaggggacgtcacatctgctgcatgcgtgcttgggaccaagacctgtacccctgcctggagctttgcagagggctcatcccgggccccagagataaatcccagtgaccctgaagcagcaccccgaccttccgctcccagcagccacacccaccgggccctctccggcgtctgctttccacaatgcagcccccgcccaggagggcccatgtgcttaccctgttttgcccatgaagaaacagctcagtgttgtgggtcagtgcccgcatcacacagcgtctagcacgtaactgcaccccgggagtcgtgggcatctgctggcctcctgccggcctcctgcgctgctgacagcttgctgtgccccctgcctgccccagtacgagcgggccctggacgtggcggcagagcccaagcacgagcggcagcaccgagcccagatacgcaagaacatcacggagactctggtgtccctgagggtccacactgtggatgacatccagcagatcgctgctgcgctggcccagtgcatggtaggatggccccacctgctcaccctgccccgcatgcctgccagggcactgggttcagccccccagggcagacgggcagcttggccgaggagctgagcctccagcctgggctccttcctgccatggcgttcctcggtctctgacctgcttcagtagcctcagccgttctgtcctgtgtgaacgcagggtgcctctcgggggacccagggtgtaaagaggggcccagatgtggggagggactaagaagatgctgctctgtgccctccactctcccctcccctcccctcccccttccctcccctagcccctcccctcctcccctcccctagcccttcccctcctcccctcccctagccctttcccttcttcccccccagcccttcccctcctcccctcccctttttctccactcccctctcctctctcccctcctcctccgctctcatgtgaagaggtgccttgtgtggtcggtgggctgcatcacgtggtccccaggtggaggccctgggtcatgcagagccacagaaaatgcttagtgaggaggctgtgggggtccagtcaagtgggctctccagctgcagggctgggggtgggagccaggtgaggacccgtgtagagaggagggcgtgtgcaaggagtggggccaggagcggggctggacactgctggctccacacaggggcccagcagggagctcgtatgccgctcgtgcctgaagcagacgctgcacaagctggaggccatgatgctcatcctgcaggcagagaccaccgcgggcaccgtgacgcccaccgccatcggagacagcatcctcaacatcacaggtgccgcggcccgtgccccatgccacccgcccgccccgtgcggccctttcctctgcctccctcctccccccaaccgcgtcgcctttgccccatcccatcttcgtccccctcccctccccccaattcccatcctcatccccctcccccaattcccattctcctccccctcccccttccctattaccatcccttttctccatctctctccccttttctccatttccccccccgtcctccccgtccttttgtccattcccctcatcttcctcatccccctcatcccccttcccctcccttatcccccttcccctccctttccccctgctcctcttcttctcccttctcttttctctacccttttccttcctttttcctccctctccccatcatccccctcatcttcgtcctcatccccatcaccttccccctcccccctccaccactctctctccagcttcccccttccttctgcctgcacctcgctctctgccccctcaggttccccctttctcccagcccccaccctccggctccccctttttgcctgcccccaccctccctctacctccctgtctctgcactgacctcacgcatgtctgcaggagacctcatccacctggccagctcggacgtgcgggcaccacagccctcagagctgggagccgagtcaccatctcggatggtggcgtcccaggcctacaacctgacctctgccctcatgcgcatcctcatgcgctcccgcgtgctcaacgaggagcccctgacgctggcgggcgaggagatcgtggcccagggcaagcgctcggacccgcggagcctgctgtgctatggcggcgccccagggcctggctgccacttctccatccccgaggctttcagcggggccctggccaacctcagtgacgtggtgcagctcatctttctggtggactccaatccctttccctttggctatatcagcaactacaccgtctccaccaaggtggcctcgatggcattccagacacaggccggcgcccagatccccatcgagcggctggcctcagagcgcgccatcaccgtgaaggtgcccaacaactcggactgggctgcccggggccaccgcagctccgccaactccgccaactccgttgtggtccagccccaggcctccgtcggtgctgtggtcaccctggacagcagcaaccctgcggccgggctgcatctgcagctcaactatacgctgctggacggtgcgtgcagcgggtggggcacacgcggccccctggccttgttcttggggggaaggcgtttctcgtagggcttccatgggtgtctctggtgaaatttgctttctgtttcatgggctgctgggggcctggccagagaggagctgggggccacggagaagcaggtgccagctctggtgcagaggctcctatggcctttcaggcccgtggcagagggtgggctcaggagggccatcgtgggtgtcccccgggtggttgagcttcccggcaggcgtgtgacctgcgcgttctgccccaggccactacctgtctgaggaacctgagccctacctggcagtctacctacactcggagccccggcccaatgagcacaactgctcggctagcaggaggatccgcccagagtcactccagggtgctgaccaccggccctacaccttcttcatttccccggggtgagctctgcgggccagcctggcagggcagggcagggcatcatgggtcagcattgcctgggttactggccccatggggacggcaggcagcgaggggactggaccgggtatgggctctgagactgcgacatccaacctggcggagcctgggctcacgtccgctaccccttccctgcccaggagcagagacccagcggggagttaccatctgaacctctccagccacttccgctggtcggcgctgcaggtgtccgtgggcctgtacacgtccctgtgccagtacttcagcgaggaggacatggtgtggcggacagaggggctgctgcccctggaggagacctcgccccgccaggccgtctgcctcacccgccacctcaccgccttcggcgccagcctcttcgtgcccccaagccatgtccgctttgtgtttcctgtgagtgaccctgtgctcctgggagcctctgcagagtcgaggagggcctgggtgggctcggctctatcctgagaaggcacagcttgcacgtgacctcctgggcccggcggctgtgtcctcacaggagccgacagcggatgtaaactacatcgtcatgctgacatgtgctgtgtgcctggtgacctacatggtcatggccgccatcctgcacaagctggaccagttggatgccagccggggccgcgccatccctttctgtgggcagcggggccgcttcaagtacgagatcctcgtcaagacaggctggggccggggctcaggtgaggggcgcagcggggtggcagggcctcccctgctctcactggctgtgctggttgcaccctctgggagtgagtctcgtcgcaggcgtcagaacaaggcagtttttgcagtgctgtgtgaagggctcgtgtgttcatcctgggaatgacctcgtgagcactcactgtccctgaggactaggacagctcctagctggaagtaggtgccagtcagtcagggtgggcagcccacgttctgcacagtagcgtggccccacaagtgacgtgagcatcgctaccactgtgggagactgtgcatccacccgcgatcctgactgcatagctcgtctctcagacggaggcgccagcaccctccccgtggctgtttcttcagtacctccattttcctttcattggaattgcccttctggcattccctttttgttttcgtttttctttttttagagacggagtctcactctgttgcccaggctggagtgcaatggcatgatcttggctcacagcaacttccagctcccgggtttaagccattccccttaagcgattctcctgagtagctgggagtacaggtgcacaccaccacacccagttaatttttcaccatgtcagccaggcgaactcctgacctcaggtgatccgcctgcctcggcctgccagagtgctgggatgacaggtgtgagccaccacacctggctgtgttcccattttttatctctgtgctgctttcctcttcattgcccagttctttcttttgattacctacttttaaaaactgtcggccgggcgcggtggctcacacctgtaatccgagcactttgggaggccaggcaggcaaatcacggggtcaggagatcgagaccatcctggctaacggtgaaaccctgtctctaataaaaagtacaaaaaaattagcccggcgtagtggcaggcgcctgtagtcccagctccttgggagactgaggcaggagaatggcgtgaacccgggaggcggagcttgcagtgagctgagattgcgccactgcactccagcctgggtgacacagcaagactccatctcaaaaaaaaaagaaaaaaaatactgtcacctgggtctgtcactgggagaggaggtgacacagcttcacgctttgcagtctgtgcatgaactgagggacgggtgtgtggtgcgggtcaccggttgtggcatgactgaggcgtggacaggtgtgcagtgcgggtcactggttgtggtgtggactgaggcgtgtgcagccatgtttgcatgtcacaagttacagttctttccatgtaacttaatcatgtccttgaggtcctgctgttaattggacaaattgcagtaaccgcagctccttgtgtatggcagagccgtgcaaagccgggactgcctgtgtggctccttgagtgcgcacaggccaaagctgagatgacttgcctgggatgccacacgtgttgggcagcagaccgagcctcccacccctccctcttgcctcccaggtaccacggcccacgtgggcatcatgctgtatggggtggacagccggagcggccaccggcacctggacggcgacagagccttccaccgcaacagcctggacatcttccggatcgccaccccgcacagcctgggtagcgtgtggaagatccgagtgtggcacgacaacaaaggtttgtgcggaccctgccaagctctgcccctctgcccccgcattggggcgccctgcgagcctgacctccctcctgcgcctctgcagggctcagccctgcctggttcctgcagcacgtcatcgtcagggacctgcagacggcacgcagcgccttcttcctggtcaatgactggctttcggtggagacggaggccaacgggggcctggtggagaaggaggtgctggccgcgagtaaggcctcgttccatgttcccactccgtgggaggttgggcagggtggtcctgccccgtggcctcctgcagtgcggccctccctgccttctaggcgacgcagcccttttgcgcttccggcgcctgctggtggctgagctgcagcgtggcttctttgacaagcacatctggctctccatatgggaccggccgcctcgtagccgtttcactcgcatccagagggccacctgctgcgttctcctcatctgcctcttcctgggcgccaacgccgtgtggtacggggctgttggcgactctgcctacaggtgggtgccgtaggggtcggggcagcctcttcctgcccagcccttcctgcccctcagcctcacctgtgtggcctcctctcctccacacagcacggggcatgtgtccaggctgagcccgctgagcgtcgacacagtcgctgttggcctggtgtccagcgtggttgtctatcccgtctacctggccatcctttttctcttccggatgtcccggagcaaggtgggctggggctggggacccgggagtactgggaatggagcctgggcctcggcaccatgcctagggccgccactttccagtgctgcagccagagggaaaggcgtccaccaaaggctgctcgggaagggtcaacacacttgagcagccttagctagactgaccagggagaaagagagaagactcagaagccagaatggtgaaagaacgagggcactttgctaagcagacgccacggacgactgcacagcagcacgccagataactcagaagaagcaagcacgcggctgtgcacgcttccgaaatgcactccagaagaaaatctcagtacatctataggaagtgaagaggctgagttagtcccttagaaacgtcccagtggccgggccgggtgtggtggctcacgcctgtaatcccaacacttcaggtggccgaggtgggcggatctgagtccaggagtttgagaccagcctgggcaacatagcaagaccccatctatataaaacattaaaaagggccaggcgcggtggctcacgcctgtaatcccagcactttgggaggccgaggcgggcagatcacttgaggtcaggagttcgagaccagcctggccaacacaatgaaaccccgactctactacaaatacaaaaacttagctgggcatggtggcgggcgcctgtagtcccagctactcgagaggctgaggcaggagaatggcatgaacccaggaggcggagcttgcagtgagccgagattgcgccactgcactccatcctgggcaacggagcaagactccatctccaaaaaaaaaaaaaaaaaatcccacaaagaaaagctcaggctcagagccttcacgatagaatttttctaagcagttaaggaagaattaacaccaatccttcacagactctttccaagaatacagcaggtgggaacgcttcccattcatacggaaacgggaggccgcaccccttaggaatgcacacgtggggtcctcaagaggttacatgcaaactaaccccagcagcacacagagaaggcgcataagccgcgaccaggaggggttgctcccgagtccgtggcaggaaccagaggccacatgtggctgctcgtatttaagttaattaaaatggaacgatggccgggtgtggtggctcacacctgtaatcccagcactttgggaggcggaggcgggcagatcacttgaggtcaggagttccaagaccagcctggccaacacagtgaaaccccgtctctactaaaaatacaaaaaattagctgggcatggtggcaggcacctgtaatcccagctactcaggaggctgagccaggacaatcgcctgaacgcgggaggtggaggttgcagtgagctgagattgcgccattgcactccagcctgggtgacagcgagactccatctaaaaaagaaaatatgaaatttaaaactctgttccttagctgcaccagtctgctgtcaagtgttcagtggcacacgtcgcgaggggctgccatcacggacggtgcagatgtcccatatatccagcattctaggacattctgtcagatggcaccgggctctgtcctgtctgctgaggaggtggcttctcatccctgtcctgagcaggtctgagctgccgcccgctgaccactgccctcgtcctgcaggtggctgggagcccgagccccacacctgccgggcagcaggtgctggacatcgacagctgcctggactcgtccgtgctggacagctccttcctcacgttctcaggcctccacgctgaggtgaggactctactgggggtcctgggctgggctgggggtcctgccgccttggcgcagcttggactcaagacactgtgcacctctcagcaggcctttgttggacagatgaagagtgacttgtttctggatgattctaagaggtgggttccctagagaaacctcgagccctggtgcaggtcactgtgtctggggtgccgggggtgtgcgggctgcgtgtccttgctgggtgtctgtggctccatgtggtcacaccacccgggagcaggtttgctcggaagcccagggtgtccgtgcgtgactggacgggggtgggctgtgtgtgtgacacatcccctggtaccttgctgacccgcgccacctgcagtctggtgtgctggccctccggcgagggaacgctcagttggccggacctgctcagtgacccgtccattgtgggtagcaatctgcggcagctggcacggggccaggcgggccatgggctgggcccagaggaggacggcttctccctggccagcccctactcgcctgccaaatccttctcagcatcaggtgagctggggtgagaggagggggctctgaagctcacccttgcagctgggcccaccctatgcctcctgtacctctagatgaagacctgatccagcaggtccttgccgagggggtcagcagcccagcccctacccaagacacccacatggaaacggacctgctcagcagcctgtgagtgtccggctctcgggggaggggggattgccagaggaggggccgggactcaggccaggcagccgtggttcccgcctggggtagggtggggtggggtgccagggcagggctgtggctgcaccacttcacttctctgaacctctgttgtctgtggaaagagcctcatgggatccccagggccccagaaccttccctctagggagggagcaggctcatggggctttgtaggagcagaaaggctcctgtgtgaggctggccggggccacgtttttatcttggtctcagagcagtgagaaattatgggcgggtttttaaataccccatttttggccgggcgcggtggctcacacgtgtaatcccagcactttgggaggccgaggtgggcagatgacctgaggtcagcagttcgagaccagcctggccaacatggcgaaaccccgtctctactaaaaatacaaaaaattagccgggcatgctggcaggcgcctgtagtcccagttactcgggagactgaggtaggagaatcgattgaacctggtaggtgaaggttgtagtgagccgagatcgcgccactgcactccagcctgggcaacaagagcgaaactccgtctcaaaaacaaaaaaattcctcaatttcttggttgttttgtaacttatcaacaaatggtcatatagaggttaccttgtatgtagtcacgcacatagtcacgcacatggcagccggcggcggagcgcacccacggcgtgttcccacgcgtgtgaccccgggctctgccatgccctcctatgctcaggtgtgctgaggtccacacggccctgccgttgcactgcagctgcctgcaggattcagtgcagtggcatgcagtgcaggtgcggtgccccggagccacaggccacaccacagggcctgcatgcacaggggctgcggtgtctgggtttgggtaactacgccctgtgacatttgcacagcaacagaattacctaatgacgcatttctcagaacacatccctggcactaagtggtgcgtgactgctgcttttgcatccacatctagtttgatttgtgtgttattcctttgagtgcttctcattgttaagcaaccaagaactaaagaggtatgaactgcccctggactcaaacaaaaaggaaaacttcctgatttacaaaaggcagataaccatcacatgagggcatctttatgaataaattgctggttggttttaaaaatacagagtatggggaaatccaggggtagtcactacatgctgaccagccccaggtatctccggcccaaagctctgtgaaatccagattcagtgcttccgcggggatttctgacggcagctcagactccgcatccacacagagcgcgtggccctcaccctcccggcttcctcaacccttggccgtcccttgctcggacagtgcttcgggctgaccaggtcggaggcttgggtttgtcctggacccctctgcgtccttcctcactgcagcctccagcgcgtcccgtggctcctttcccaacgcagagcacggccttccctgcgcctgagcctgcaccctccgtcctggcggcgcctctgccctggcattccctgccactccatgcctccctattggccattctccgtctctgccagcgagagcctgctccctgagtcagaccctgagtcatttgtgttgctataaaggaatagttgaggctgggttattttttatttttatttatttttttgagatggagtctctgttgcccagactggagtgcagtcgcatgatctcggctcactgcaaagtctgcctcccacgttcaagcagttatctgcctcagcctcccaagtagctaagattacaggcgcccgccgccacagccggctaattttttgtgtgtgtgttttagtagagaggaggtttcaccatcttagccaggctggtcttgaactcctgacctcgtgatccacccatctcagcctcccaaaatgctgagattacaggcgtgagccaccacgcctgaccaagttgaggctaggtcattttttaattttttgtaaagacagggtctcactgtctccaactcctgagctcaagtgatcctcctgcctcagcctcctgaagtgctgggattacaggcttgagacactgcgcccagccaagagtgtcttttatcctccgagagacagcaaaacaggaagcattcagtgcagtgtgaccctgggtcaggccgttctttcggtgatgggctgacgagggcgcaggtacgggagagcgtcctgagagcccgggactcggcgtctcgcagttggtctcgtcctccccctcaacgtgtcttcgctgcctctgtacctcttctctagcagctctgggaccgggcatatcagcatggtggcccgatgcagtggcacagcctcggtggtcactggctcctggagacacaagcagatctctggcctcagggagccctacacactgttgggatttgaaaggcattcatatgtttccttgtccagaagttaattttaggccataaacctgcatgggacagacacactggcgtctctagattgtagagatgcttgttggatggttgagacccaatcatagtttgcagggttgaaggggggctcattgcaccctgagagactgtgcactgctgtaagggcagctggtcaggctgtgggcgatgggtttatcagcagcaagcgggcgggagagggacgcaggcggacgcctgacttcggtgcctggagtggctcttggttccctggctcccagcaccactcccactctcgtttggggtagggtcttccggctttttgtcggggggaccctgtgacccaagaggctcaagaaactgcccgcccaggttaacatgggcttggctgcaactgcctcctggaggccgggatgaattcacagcctaccatgtccctcaggtccagcactcctggggagaagacagagacgctggcgctgcagaggctgggggagctggggccacccagcccaggcctgaactgggaacagccccaggcagcgaggctgtccaggacaggtgtgcttgcgtagccccgggatgcccctagcccctccctgtgagctgcctctcacaggtctgtctctgcttccccaggactggtggagggtctgcggaagcgcctgctgccggcctggtgtgcctccctggcccacgggctcagcctgctcctggtggctgtggctgtggctgtctcagggtgggtgggtgcgagcttccccccgggcgtgagtgttgcgtggctcctgtccagcagcgccagcttcctggcctcattcctcggctgggagccactgaaggtgagggggctgccaggggtaggctacaggcctccatcacgggggacccctctgaagccaccccctccccaggtcttgctggaagccctgtacttctcactggtggccaagcggctgcacccggatgaagatgacaccctggtagagagcccggctgtgacgcctgtgagcgcacgtgtgccccgcgtacggccaccccacggctttgcactcttcctggccaaggaagaagcccgcaaggtcaagaggctacatggcatgctgcgggtgagcctgggtgcggcctgtgcccctgccacctccgtctcttgtctcccacctcccacccatgcacgcaggacactcctgtccccctttcctcacctcagaaggcccttaggggttcaatgctctgcagcctttgcccggtctccctcctaccccacgccccccacttgctgccccagtccctgccagggcccagctccaatgcccactcctgcctggccctgaaggcccctaagcaccactgcagtggcctgtgtgtctgcccccaggtggggttccgggcagggtgtgtgctgccattaccctggccaggtagagtcttggggcgccccctgccagctcaccttcctgcagccacacctgccgcagccatggctccagccgttgccaaagccctgctgtcactgtgggctggggccaggctgaccacagggcccccccgtccaccagagcctcctggtgtacatgctttttctgctggtgaccctgctggccagctatggggatgcctcatgccatgggcacgcctaccgtctgcaaagcgccatcaagcaggagctgcacagccgggccttcctggccatcacgcggtacgggcatccggtgcactggtctgtcttctgggctttagttttgcctttagtccagccagaccctaggggacatgtggacatgtgtagatacctttgtggctgctagaactggaggtaggtgctgctggcatcagtaggcagaggggagggacacaggtccgtgtcttgcagtgcacaggacgggcccatgacagacaactgtctgccccagaacatccccaggataaggctgagaagcccaggtctagccgtggccagcagggcagtgggagccatgttccctgggtctctggtggccgctcactcgaggcgggcatggggcagtaggggctggagcgtgtgactgatgctgtggcaggtctgaggagctctggccatggatggcccacgtgctgctgccctacgtccacgggaaccagtccagcccagagctggggcccccacggctgcggcaggtgcggctgcaggaaggtgagctggcagggcgtgccccaagacttaaatcgttcctcttgttgagagagcagcctttagcggagctctggcatcagccctgctccctagctgtgtgacctttgccctcttaacaccgccgtttccttctctgtatatgagagatggtaacgttgtctaattgatggctgctgggagggttccctggggtggcgccgaaccagagctcaggcgagctggccagcaggaaacactcctgttgggttttgatgaggccctggccccggcctggggctctgtgtgtttcagcactctacccagaccctcccggccccagggtccacacgtgctcggccgcaggaggcttcagcaccagcgattacgacgttggctgggagagtcctcacaatggctcggggacgtgggcctattcagcgccggatctgctggggtgagcagagcgagggccccgggcgtctacgccaaggacaagggagtagttctccaggagtgccgcggcctcctgaccagcctggctccggggtgccggaagggctggggtgcggcacccacgccacccctctccggcagggcatggtcctggggctcctgtgccgtgtatgacagcgggggctacgtgcaggagctgggcctgagcctggaggagagccgcgaccggctgcgcttcctgcagctgcacaactggctggacaacaggtgggagctccctcccctgccctctccggggtggccgcagtcaccagccaggagcccaccctcactcctccggcccccgctggcctaggcggcttccacagcccctcagccacgcctgcactgcgcggtccccgcagctcccgccctgccacccgctcctactgacccgcaccctctgcgcaggagccgcgctgtgttcctggagctcacgcgctacagcccggccgtggggctgcacgccgccgtcacgctgcgcctcgagttcccggcggccggccgcgccctggccgccctcagcgtccgcccctttgcgctgcgccgcctcagcgcgggcctctcgctgcctctgctcacctcggtacgcccgtccccggccagaccccgcgcctcccaccggcagcgtcccgccccctcgcggggccccgccccggcagcgtctcacccctcgcagcgccccgccccctcgcagcgtcccgccccctcgcagggccccgccccggcagcgtcccgccccctcgtagggccccgccccggcagcgtcccgccccctcgcagggccccgccccggcagcgtccctcccgccctcctgaccgcgccccccacaggtgtgcctgctgctgttcgccgtgcacttcgccgtggccgaggcccgtacttggcacagggaagggcgctggcgcgtgctgcggctcggagcctgggcgcggtggctgctggtggcgctgacggcggccacggcactggtacgcctcgcccagctgggtgccgctgaccgccagtggacccgtttcgtgc

SEQ ID NO: 13262 - DNA, 6464 bp, Homo sapiens
cccacacccggcctgcacttggtcaccatgacggcagggaacccgctgggctcagccaacgccaccgtggaagtggatgtgcaggtgcctgtgagtggcctcagcatcagggccagcgagcccggaggcagcttcgtggcggccgggtcctctgtgcccttttgggggcagctggccacgggcaccaatgtgagctggtgctgggctgtgcccggcggcagcagcaagcgtggccctcatgtcaccatggtcttcccggatgctggcaccttctccatccggctcaatgcctccaacgcagtcagctgggtctcagccacgtacaacctcacggcggaggagcccatcgtgggcctggtgctgtgggccagcagcaaggtggtggcgcccgggcagctggtccattttcagatcctgctggctgccggctcagctgtcaccttccgcctgcaggtcggcggggccaaccccgaggtgctccccgggccccgtttctcccacagcttcccccgcgtcggagaccacgtggtgagcgtgcggggcaaaaaccacgtgagctgggcccaggcgcaggtgcgcatcgtggtgctggaggccgtgagtgggctgcaggtgcccaactgctgcgagcctggcatcgccacgggcactgagaggaacttcacagcccgcgtgcagcgcggctctcgggtcgcctacgcctggtacttctcgctgcagaaggtccagggcgactcgctggtcatcctgtcgggccgcgacgtcacctacacgcccgtggccgcggggctgttggagatccaggtgcgcgccttcaacgccctgggcagtgagaaccgcacgctggtgctggaggttcaggacgccgtccagtatgtggccctgcagagcggcccctgcttcaccaaccgctcggcgcagtttgaggccgccaccagccccagcccccggcgtgtggcctaccactgggactttggggatgggtcgccagggcaggacacagatgagcccagggccgagcactcctacctgaggcctggggactaccgcgtgcaggtgaacgcctccaacctggtgagcttcttcgtggcgcaggccacggtgaccgtccaggtgctggcctgccgggagccggaggtggacgtggtcctgcccctgcaggtgctgatgcggcgatcacagcgcaactacttggaggcccacgttgacctgcgcgactgcgtcacctaccagactgagtaccgctgggaggtgtatcgcaccgccagctgccagcggccggggcgcccagcgcgtgtggccctgcccggcgtggacgtgagccggcctcggctggtgctgccgcggctggcgctgcctgtggggcactactgctttgtgtttgtcgtgtcatttggggacacgccactgacacagagcatccaggccaatgtgacggtggcccccgagcgcctggtgcccatcattgagggtggctcataccgcgtgtggtcagacacacgggacctggtgctggatgggagcgagtcctacgaccccaacctggaggacggcgaccagacgccgctcagtttccactgggcctgtgtggcttcgacacagagggaggctggcgggtgtgcgctgaactttgggccccgcgggagcagcacggtcaccattccacgggagcggctggcggctggcgtggagtacaccttcagcctgaccgtgtggaaggccggccgcaaggaggaggccaccaaccagacggtgctgatccggagtggccgggtgcccattgtgtccttggagtgtgtgtcctgcaaggcacaggccgtgtacgaagtgagccgcagctcctacgtgtacttggagggccgctgcctcaattgcagcagcggctccaagcgagggcggtgggctgcacgtacgttcagcaacaagacgctggtgctggatgagaccaccacatccacgggcagtgcaggcatgcgactggtgctgcggcggggcgtgctgcgggacggcgagggatacaccttcacgctcacggtgctgggccgctctggcgaggaggagggctgcgcctccatccgcctgtcccccaaccgcccgccgctggggggctcttgccgcctcttcccactgggcgctgtgcacgccctcaccaccaaggtgcacttcgaatgcacgggctggcatgacgcggaggatgctggcgccccgctggtgtacgccctgctgctgcggcgctgtcgccagggccactgcgaggagttctgtgtctacaagggcagcctctccagctacggagccgtgctgcccccgggtttcaggccacacttcgaggtgggcctggccgtggtggtgcaggaccagctgggagccgctgtggtcgccctcaacaggtctttggccatcaccctcccagagcccaacggcagcgcaacggggctcacagtctggctgcacgggctcaccgctagtgtgctcccagggctgctgcggcaggccgatccccagcacgtcatcgagtactcgttggccctggtcaccgtgctgaacgagtacgagcgggccctggacgtggcggcagagcccaagcacgagcggcagcaccgagcccagatacgcaagaacatcacggagactctggtgtccctgagggtccacactgtggatgacatccagcagatcgctgctgcgctggcccagtgcatggggcccagcagggagctcgtatgccgctcgtgcctgaagcagacgctgcacaagctggaggccatgatgctcatcctgcaggcagagaccaccgcgggcaccgtgacgcccaccgccatcggagacagcatcctcaacatcacaggagacctcatccacctggccagctcggacgtgcgggcaccacagccctcagagctgggagccgagtcaccatctcggatggtggcgtcccaggcctacaacctgacctctgccctcatgcgcatcctcatgcgctcccgcgtgctcaacgaggagcccctgacgctggcgggcgaggagatcgtggcccagggcaagcgctcggacccgcggagcctgctgtgctatggcggcgccccagggcctggctgccacttctccatccccgaggctttcagcggggccctggccaacctcagtgacgtggtgcagctcatctttctggtggactccaatccctttccctttggctatatcagcaactacaccgtctccaccaagctccgccaactccgccaactccgttgtggtccagccccaggcctccgtcggtgctgtggtcaccctggacagcagcaaccctgcggccgggctgcatctgcagctcaactatacgctgctggacggccactacctgtctgaggaacctgagccctacctggcagtctacctacactcggagccccggcccaatgagcacaactgctcggctagcaggaggatccgcccagagtcactccagggtgctgaccaccggccctacaccttcttcatttccccggggagcagagacccagcggggagttaccatctgaacctctccagccacttccgctggtcggcgctgcaggtgtccgtgggcctgtacacgtccctgtgccagtacttcagcgaggaggacatggtgtggcggacagaggggctgctgcccctggaggagacctcgccccgccaggccgtctgcctcacccgccacctcaccgccttcggcgccagcctcttcgtgcccccaagccatgtccgctttgtgtttcctgagccgacagcggatgtaaactacatcgtcatgctgacatgtgctgtgtgcctggtgacctacatggtcatggccgccatcctgcacaagctggaccagttggatgccagccggggccgcgccatccctttctgtgggcagcggggccgcttcaagtacgagatcctcgtcaagacaggctggggccggggctcaggtaccacggcccacgtgggcatcatgctgtatggggtggacagccggagcggccaccggcacctggacggcgacagagccttccaccgcaacagcctggacatcttccggatcgccaccccgcacagcctgggtagcgtgtggaagatccgagtgtggcacgacaacaaagggctcagccctgcctggttcctgcagcacgtcatcgtcagggacctgcagacggcacgcagcgccttcttcctggtcaatgactggctttcggtggagacggaggccaacgggggcctggtggagaaggaggtgctggccgcgagcgacgcagcccttttgcgcttccggcgcctgctggtggctgagctgcagcgtggcttctttgacaagcacatctggctctccatatgggaccggccgcctcgtagccgtttcactcgcatccagagggccacctgctgcgttctcctcatctgcctcttcctgggcgccaacgccgtgtggtacggggctgttggcgactctgcctacagcacggggcatgtgtccaggctgagcccgctgagcgtcgacacagtcgctgttggcctggtgtccagcgtggttgtctatcccgtctacctggccatcctttttctcttccggatgtcccggagcaaggtggctgggagcccgagccccacacctgccgggcagcaggtgctggacatcgacagctgcctggactcgtccgtgctggacagctccttcctcacgttctcaggcctccacgctgagcaggcctttgttggacagatgaagagtgacttgtttctggatgattctaagagtctggtgtgctggccctccggcgagggaacgctcagttggccggacctgctcagtgacccgtccattgtgggtagcaatctgcggcagctggcacggggccaggcgggccatgggctgggcccagaggaggacggcttctccctggccagcccctactcgcctgccaaatccttctcagcatcagatgaagacctgatccagcaggtccttgccgagggggtcagcagcccagcccctacccaagacacccacatggaaacggacctgctcagcagcctgtccagcactcctggggagaagacagagacgctggcgctgcagaggctgggggagctggggccacccagcccaggcctgaactgggaacagccccaggcagcgaggctgtccaggacaggactggtggagggtctgcggaagcgcctgctgccggcctggtgtgcctccctggcccacgggctcagcctgctcctggtggctgtggctgtggctgtctcagggtgggtgggtgcgagcttccccccgggcgtgagtgttgcgtggctcctgtccagcagcgccagcttcctggcctcattcctcggctgggagccactgaaggtcttgctggaagccctgtacttctcactggtggccaagcggctgcacccggatgaagatgacaccctggtagagagcccggctgtgacgcctgtgagcgcacgtgtgccccgcgtacggccaccccacggctttgcactcttcctggccaaggaagaagcccgcaaggtcaagaggctacatggcatgctgcggagcctcctggtgtacatgctttttctgctggtgaccctgctggccagctatggggatgcctcatgccatgggcacgcctaccgtctgcaaagcgccatcaagcaggagctgcacagccgggccttcctggccatcacgcggtctgaggagctctggccatggatggcccacgtgctgctgccctacgtccacgggaaccagtccagcccagagctggggcccccacggctgcggcaggtgcggctgcaggaagcactctacccagaccctcccggccccagggtccacacgtgctcggccgcaggaggcttcagcaccagcgattacgacgttggctgggagagtcctcacaatggctcggggacgtgggcctattcagcgccggatctgctgggggcatggtcctggggctcctgtgccgtgtatgacagcgggggctacgtgcaggagctgggcctgagcctggaggagagccgcgaccggctgcgcttcctgcagctgcacaactggctggacaacaggagccgcgctgtgttcctggagctcacgcgctacagcccggccgtggggctgcacgccgccgtcacgctgcgcctcgagttcccggcggccggccgcgccctggccgccctcagcgtccgcccctttgcgctgcgccgcctcagcgcgggcctctcgctgcctctgctcacctcggtgtgcctgctgctgttcgccgtgcacttcgccgtggccgaggcccgtacttggcacagggaagggcgctggcgcgtgctgcggctcggagcctgggcgcggtggctgctggtggcgctgacggcggccacggcactggtacgcctcgcccagctgggtgccgctgaccgccagtggacccgtttcgtgc

SEQ ID NO: 13263 - DNA, 11138 bp, Homo sapiens
gggacttcggagacggctccgccgaggtggatgccgctgggccggctgcctcgcatcgctatgtgctgcctgggcgctatcacgtgacggccgtgctggccctgggggccggctcagccctgctggggacagacgtgcaggtggaagcggcacctgccgccctggagctcgtgtgcccgtcctcggtgcagagtgacgagagcctcgacctcagcatccagaaccgcggtggttcaggcctggaggccgcctacagcatcgtggccctgggcgaggagccggcccgaggtgagtgtctgctgcccactccccttcctccccagggccatccagatggggcagagcctggtacccccgtcttgggcccacactgaccgttgacaccctcgttcccaccggtctccagcggtgcacccgctctgcccctcggacacggagatcttccctggcaacgggcactgctaccgcctggtggtggagaaggcggcctggctgcaggcgcaggagcagtgtcaggcctgggccggggccgccctggcaatggtggacagtcccgccgtgcagcgcttcctggtctcccgggtcaccaggtgcctgcccccaccccccgaggggccataggttgggagatctctgaagcactggggcagagcctgcggctggggagtctcaggaggaaggaggtgggagctgggccggccctggtgagcaggtggcgccggccggtggggccgttcctgtcagctctgcagatgcagaggtggacatgagctgggggcagcctccggacactcctgggcacgccatacgggaggtggcctgcacggggatccctgccggtacccacaggccccgtgggtgggtgctgctgtgagcctgggctggtgggccctggtctccgggctctgagcctcagtttccccatctggaaagggggacagtgatggggctcccagcgggctgctgtgagggtgggaggatggaggagtgccctgagccccctgccatcccacacccgcccccaggagcctagacgtgtggatcggcttctcgactgtgcagggggtggaggtgggcccagcgccgcagggcgaggccttcagcctggagagctgccagaactggctgcccggggagccacacccagccacagccgagcactgcgtccggctcgggcccaccgggtggtgtaacaccgacctgtgctcagcgccgcacagctacgtctgcgagctgcagcccggaggtgtgcggggggccaggcaggggcctgagacgctggctgtggttaggggcctgccgagcgcccgcggtggagcctgggctgaggaggaggggctggtgggggggttttcgggcggctcggtccccagtctgttcgtcctggtgtcctgggccctggcccggcgcctcactgtgcactcgccaccccaggcccagtgcaggatgccgagaacctcctcgtgggagcgcccagtggggacctgcagggacccctgacgcctctggcacagcaggacggcctctcagccccgcacgagcccgtggaggtagtcggccccccacgttctacaacctgccctcctgcctgcccctggaggccttgcctgccctgcccactgtgggtctcgccaaaaaacttgggggccttaatgttgcttgtgcccagtgaagatggttgggaaaatccagagtgcagagaggaaagcgtttactcacattacctccaggccttttctctgagcgtgtgtgagttattcctgaaaggcaggtcaggggtcctgccccccatggacagtttccaccggagtcttcctctcgagcgacaggagccaggcctgtgggggtctgatggctcgctctccttccctcccctcttcctgggaagttcgggtagggggagtctgggcttcaggctgggatggggtctgtggagctgaggcggccccctgcccaccaggtcatggtattcccgggcctgcgtctgagccgtgaagccttcctcaccacggccgaatttgggacccaggagctccggcggcccgcccagctgcggctgcaggtgtaccggctcctcagcacagcaggtgggactctgggtggtgggtggtgggtggtgggcgccgcaggactcggggtggcctctctgagctttcacgtctgctggtcctgtggccaccagagtggttcccagtcttaggtggacagagcaggggttccagagacaccagctcattccaggtgtcctgggggtggattgggtggggcctgcctgggggccggcctgggtcagtcggctggccggagacggacgcagcactgggctgggagtgctgcccaggtggggagacctgtcctcacagcaaggccaggattgctggtgcaggcagttgggcatctctgacggtggcctgtgggcaaatcagggccccaacaccctcccctcctcacagggaccccggagaacggcagcgagcctgagagcaggtccccggacaacaggacccagctggcccccgcgtgcatgccagggggacgctggtgccctggagccaacatctgcttgccgctggacgcctcctgccacccccaggcctgcgccaatggctgcacgtcagggccagggctacccggggccccctatgcgctatggagagagttcctcttctccgttcccgcggggccccccgcgcagtactcggtgtgtggccctgacctgggtctgttccctgcatctcctcaggccaccttcctgtctgctgcccagggtctgggtctgtgcaccagacacacccagcctgcaggcccctcccacgtccttgccacctctgacctccgacctctgcagtgccctcggccctctcccagtgggagaagctctcgcctgggcccttggcacgagctgtgcctcctcttcctctctcccagcacagctgctccttcctgtctgccaggtcttggcctgtgtcctctccccgtgtgtcccccggtctgcaactgtcctgcctgtccttgtcacgagcactgtggggaggctccttgaggtgtggctgacgaagcggggagccctgcgtgtccaccctcatccgtcgtgcgggggtccacgggccatgaccgtgaggacgtgatgcagccctgcctccctctccacaggtcaccctccacggccaggatgtcctcatgctccctggtgacctcgttggcttgcagcacgacgctggccctggcgccctcctgcactgctcgccggctcccggccaccctggtccccgggccccgtacctctccgccaacgcctcgtcatggctgccccacttgccagcccagctggagggcacttgggcctgccctgcctgtgccctgcggctgcttgcagccacggaacagctcaccgtgctgctgggcttgaggcccaaccctggactgcggctgcctgggcgctatgaggtccgggcagaggtgggcaatggcgtgtccaggcacaacctctcctgcagctttgacgtggtctccccagtggctgggctgcgggtcatctaccctgccccccgcgacggccgcctctacgtgcccaccaacggctcagccttggtgctccaggtggactctggtgccaacgccacggccacggctcgctggcctgggggcagtgtcagcgcccgctttgagaatgtctgccctgccctggtggccaccttcgtgcccggctgcccctgggagaccaacgataccctgttctcagtggtagcactgccgtggctcagtgagggggagcacgtggtggacgtggtggtggaaaacagcgccagccgggccaacctcagcctgcgggtgacggcggaggagcccatctgtggcctccgcgccacgcccagccccgaggcccgtgtactgcagggagtcctagtggtgagtatggccgaggctccaccaccagcccccaggcaggtgcctgcagacagggtgctcacacagggcgtgaggcctggcttcccagtgagggcagcagcccagttactggggacgtcggccccgggcaggtcctgctggctggctcctcgggctacctggtgggctttaaattcctggaaagtcacggctctgacagtggctccgctaactcattccactgtctcatttcacaaaatgaatttaaaactctgctccctgacctcacacgagcccccgtgagtctctcacgccctctgctgtgttctcgcctggctaaagcgagtggcttttgaggtggagtctgaacccctgatgggaaactgcgggctgcccgcggtgccaccatgctgggtacatgggggacagggctgtctccatcttgcgggtacctgcctcttcaccaggggccttgggaggggccatcagaaatggcgtgacctgtgcagcctgtcctgggttctgtaagccagtgtaggtgcctcccctcactgctccgagctctctgggtgaggagctggggcaagagcgccgggagggtctgagaagactcagagagaggtggactctttgtagctggtactaggtttgctttacagatggggaaactgaggcacagagaggttgaggcattagtagtactacatggctggctggagagccggacagtgagtgtcccagcccgggcttggctcccatggcatgcagagccccgggcacctcctctcctctgtgccccgcgtgggactctccagcccgacgggaggtgtgtccaggaggcgacaggctaagggcagagtcctccacagagcccaggctgacaccattccccccgcagaggtacagccccgtggtggaggccggctcggacatggtcttccggtggaccatcaacgacaagcagtccctgaccttccagaacgtggtcttcaatgtcatttatcagagcgcggcggtcttcaagctctcagtaggtgggcgggggtggggaggggaggggatggggcggggcagggcgggggcgggctccaccttcacctctgccttctgctctgcttcatgctgcccgaggacgctgccatggctgtgggtgagtggagggagggacgccaatcagggccaggcctctcacctgccacctgggctcactgacgcctgtccctgcagctgacggcctccaaccacgtgagcaacgtcaccgtgaactacaacgtaaccgtggagcggatgaacaggatgcagggtctgcaggtctccacagtgccggccgtgctgtcccccaatgccacgctagcactgacggcgggcgtgctggtggactcggccgtggaggtggccttcctgtgagtgactcgggggccggtttggggtgggcaccaggctcttgtcccagccccagcctcagccgagggacccccacatcacggggttgcttttctgagcctcggtttccctgtctgttgggaggtaactgggtgcacaggagccctgaggctgcacgggagccgggagaggcctcagcacagccgggtgggccctgaatggaggcccggggcgtgactgcagagtggagcctcggctgggtcccaagcaccccctgccccgccaccgcccacccctgtcccggttcactcactgcgtcccaccgccccggcaggtggacctttggggatggggagcaggccctccaccagttccagcctccgtacaacgagtccttcccggttccagacccctcggtggcccaggtgctggtggagcacaatgtcatgcacacctacgctgccccaggtgagggatgagggggtgagggggccactgcctttcaggctctgagcacggggtccccccagctccccagtcaagctgccccccttcctccccaacagccctcactgtgacctcacctgggctgatggcttaggcccctactggggtgagggaggggccaggcgtggggggagtggacagggaagctgggcccctgaactgcgccccccgccctccccgggcctggctcttgctgctctgctgccccgagtgcagctgcacttggaggcggtgccgtcctcgccaggcagccctcagtgctgctacacctgtgctccgtcccgcacgtggcttgggagcctgggacccttaaggctgggccgcaggtgcagccgttcaccccgggctcctcaggcggggggcttctgccgagcgggtggggagcaggtgggggtgccgcggctgccccactcgggcctgtccccacaggtgagtacctcctgaccgtgctggcatctaatgccttcgagaacctgacgcagcaggtgcctgtgagcgtgcgcgcctccctgccctccgtggctgtgggtgtgagtgacggcgtcctggtggccggccggcccgtcaccttctacccgcacccgctgccctcgcctgggggtgttctttacacgtgggacttcggggacggctcccctgtcctgacccagagccagccggctgccaaccacacctatgcctcgaggggcacctaccacgtgcgcctggaggtcaacaacacggtgagcggtgcggcggcccaggcggatgtgcgcgtctttgaggagctccgcggactcagcgtggacatgagcctggccgtggagcagggcgcccccgtggtggtcagcgccgcggtgcagacgggcgacaacatcacgtggaccttcgacatgggggacggcaccgtgctgtcgggcccggaggcaacagtggagcatgtgtacctgcgggcacagaactgcacagtgaccgtgggtgcggccagccccgccggccacctggcccggagcctgcacgtgctggtcttcgtcctggaggtgctgcgcgttgaacccgccgcctgcatccccacgcagcctgacgcgcggctcacggcctacgtcaccgggaacccggcccactacctcttcgactggaccttcggggatggctcctccaacacgaccgtgcgggggtgcccgacggtgacacacaacttcacgcggagcggcacgttccccctggcgctggtgctgtccagccgcgtgaacagggcgcattacttcaccagcatctgcgtggagccagaggtgggcaacgtcaccctgcagccagagaggcagtttgtgcagctcggggacgaggcctggctggtggcatgtgcctggcccccgttcccctaccgctacacctgggactttggcaccgaggaagccgcccccacccgtgccaggggccctgaggtgacgttcatctaccgagacccaggctcctatcttgtgacagtcaccgcgtccaacaacatctctgctgccaatgactcagccctggtggaggtgcaggagcccgtgctggtcaccagcatcaaggtcaatggctcccttgggctggagctgcagcagccgtacctgttctctgctgtgggccgtgggcgccccgccagctacctgtgggatctgggggacggtgggtggctcgagggtccggaggtcacccacgcttacaacagcacaggtgacttcaccgttagggtggccggctggaatgaggtgagccgcagcgaggcctggctcaatgtgacggtgaagcggcgcgtgcgggggctcgtcgtcaatgcaagccgcacggtggtgcccctgaatgggagcgtgagcttcagcacgtcgctggaggccggcagtgatgtgcgctattcctgggtgctctgtgaccgctgcacgcccatccctgggggtcctaccatctcttacaccttccgctccgtgggcaccttcaatatcatcgtcacggctgagaacgaggtgggctccgcccaggacagcatcttcgtctatgtcctgcagctcatagaggggctgcaggtggtgggcggtggccgctacttccccaccaaccacacggtacagctgcaggccgtggttagggatggcaccaacgtctcctacagctggactgcctggagggacaggggcccggccctggccggcagcggcaaaggcttctcgctcaccgtgctcgaggccggcacctaccatgtgcagctgcgggccaccaacatgctgggcagcgcctgggccgactgcaccatggacttcgtggagcctgtggggtggctgatggtggccgcctccccgaacccagctgccgtcaacacaagcgtcaccctcagtgccgagctggctggtggcagtggtgtcgtatacacttggtccttggaggaggggctgagctgggagacctccgagccatttaccacccatagcttccccacacccggcctgcacttggtcaccatgacggcagggaacccgctgggctcagccaacgccaccgtggaagtggatgtgcaggtgcctgtgagtggcctcagcatcagggccagcgagcccggaggcagcttcgtggcggccgggtcctctgtgcccttttgggggcagctggccacgggcaccaatgtgagctggtgctgggctgtgcccggcggcagcagcaagcgtggccctcatgtcaccatggtcttcccggatgctggcaccttctccatccggctcaatgcctccaacgcagtcagctgggtctcagccacgtacaacctcacggcggaggagcccatcgtgggcctggtgctgtgggccagcagcaaggtggtggcgcccgggcagctggtccattttcagatcctgctggctgccggctcagctgtcaccttccgcctgcaggtcggcggggccaaccccgaggtgctccccgggccccgtttctcccacagcttcccccgcgtcggagaccacgtggtgagcgtgcggggcaaaaaccacgtgagctgggcccaggcgcaggtgcgcatcgtggtgctggaggccgtgagtgggctgcaggtgcccaactgctgcgagcctggcatcgccacgggcactgagaggaacttcacagcccgcgtgcagcgcggctctcgggtcgcctacgcctggtacttctcgctgcagaaggtccagggcgactcgctggtcatcctgtcgggccgcgacgtcacctacacgcccgtggccgcggggctgttggagatccaggtgcgcgccttcaacgccctgggcagtgagaaccgcacgctggtgctggaggttcaggacgccgtccagtatgtggccctgcagagcggcccctgcttcaccaaccgctcggcgcagtttgaggccgccaccagccccagcccccggcgtgtggcctaccactgggactttggggatgggtcgccagggcaggacacagatgagcccagggccgagcactcctacctgaggcctggggactaccgcgtgcaggtgaacgcctccaacctggtgagcttcttcgtggcgcaggccacggtgaccgtccaggtgctggcctgccgggagccggaggtggacgtggtcctgcccctgcaggtgctgatgcggcgatcacagcgcaactacttggaggcccacgttgacctgcgcgactgcgtcacctaccagactgagtaccgctgggaggtgtatcgcaccgccagctgccagcggccggggcgcccagcgcgtgtggccctgcccggcgtggacgtgagccggcctcggctggtgctgccgcggctggcgctgcctgtggggcactactgctttgtgtttgtcgtgtcatttggggacacgccactgacacagagcatccaggccaatgtgacggtggcccccgagcgcctggtgcccatcattgagggtggctcataccgcgtgtggtcagacacacgggacctggtgctggatgggagcgagtcctacgaccccaacctggaggacggcgaccagacgccgctcagtttccactgggcctgtgtggcttcgacacaggtcagtgcgtggcagggccgtcctccatgcccctcacccgtccacacccatgagcccagagaacacccagcttgccaccagggctggcccgtcctcagtgcctggtgggccccgtcccagcatggggagggggtctcccgcgctgtctcctgggccgggctctgctttaaaactggatggggctctcaggccacgtcgccccttgttctcggcctgcagagggaggctggcgggtgtgcgctgaactttgggccccgcgggagcagcacggtcaccattccacgggagcggctggcggctggcgtggagtacaccttcagcctgaccgtgtggaaggccggccgcaaggaggaggccaccaaccagacggtgggtgccgcccgcccctcggccacttgccttggacagcccagcctccctggtcatctactgttttccgtgttttagtgctggtggaggccgcacgctctcccctctctgtttctgatgcaaattctatgtaacacgacagcctgcttcagctttgcttccttccaaacctgccacagttccacgtacagtcttcaagccacatatgctctagtggcaaaagctacacagtcccctagcaataccaacagtgaggaagagccccttcccaccccagaggtagccactgtccccagcccatgtccctgttgctggatgtggtgggccggttctcaccctcacgctcccctctctggaccggccaggaggcttggtgaccctgagcccgtggtggctgctcctgctgctgtcaggcggggcctgctggtgccccagagtgggcgtctgttccccagtccctgctttcctcagctggcctgattgggggtcttcccagaggggtcgtctgaggggagggtgtgggagcaggttccatcccagctcagcctcctgacccaggccctggctaagggctgcaggagtctgtgagtcaggcctacgtggcagctgcggtcctcacacccacacatacgtctcttctcacacgcatccccccaggggccctcagtgagcattgcctgcctcctgctagggtccagctgggtccagtacaccagaacgcacactccagtgtcctctgccctgtgtatgcccttccgccgtccaagttggaaggtggcaaaccggatgagtatcctgggagggagtgagctcaccggcagtggccaggcccctgggaaacctggagtttgggagcagcatcctccatgggtcccccagtccttccagcaggccaaatagacctgtgttggaggtaaccccactcccacgccaggtgctgat

SEQ ID NO: 13264 - DNA, 737 bp, Homo sapiens
gggacttcggagacggctccgccgaggtggatgccgctgggccggctgcctcgcatcgctatgtgctgcctgggcgctatcacgtgacggccgtgctggccctgggggccggctcagccctgctggggacagacgtgcaggtggaagcggcacctgccgccctggagctcgtgtgcccgtcctcggtgcagagtgacgagagcctcgacctcagcatccagaaccgcggtggttcaggcctggaggccgcctacagcatcgtggccctgggcgaggagccggcccgagcggtgcacccgctctgcccctcggacacggagatcttccctggcaacgggcactgctaccgcctggtggtggagaaggcggcctggctgcaggcgcaggagcagtgtcaggcctgggccggggccgccctggcaatggtggacagtcccgccgtgcagcgcttcctggtctcccgggtcaccagacacacgggacctggtgctggatgggagcgagtcctacgaccccaacctggaggacggcgaccagacgccgctcagtttccactgggcctgtgtggcttcgacacagagggaggctggcgggtgtgcgctgaactttgggccccgcgggagcagcacggtcaccattccacgggagcggctggcggctggcgtggagtacaccttcagcctgaccgtgtggaaggccggccgcaaggaggaggccaccaaccagacggtgctgat

SEQ ID NO: 13265 - DNA, 10165 bp, Homo sapiens
gtgcgctgaactttgggccccgcgggagcagcacggtcaccattccacgggagcggctggcggctggcgtggagtacaccttcagcctgaccgtgtggaaggccggccgcaaggaggaggccaccaaccagacggtgggtgccgcccgcccctcggccacttgccttggacagcccagcctccctggtcatctactgttttccgtgttttagtgctggtggaggccgcacgctctcccctctctgtttctgatgcaaattctatgtaacacgacagcctgcttcagctttgcttccttccaaacctgccacagttccacgtacagtcttcaagccacatatgctctagtggcaaaagctacacagtcccctagcaataccaacagtgaggaagagccccttcccaccccagaggtagccactgtccccagcccatgtccctgttgctggatgtggtgggccggttctcaccctcacgctcccctctctggaccggccaggaggcttggtgaccctgagcccgtggtggctgctcctgctgctgtcaggcggggcctgctggtgccccagagtgggcgtctgttccccagtccctgctttcctcagctggcctgattgggggtcttcccagaggggtcgtctgaggggagggtgtgggagcaggttccatcccagctcagcctcctgacccaggccctggctaagggctgcaggagtctgtgagtcaggcctacgtggcagctgcggtcctcacacccacacatacgtctcttctcacacgcatccccccaggggccctcagtgagcattgcctgcctcctgctagggtccagctgggtccagtacaccagaacgcacactccagtgtcctctgccctgtgtatgcccttccgccgtccaagttggaaggtggcaaaccggatgagtatcctgggagggagtgagctcaccggcagtggccaggcccctgggaaacctggagtttgggagcagcatcctccatgggtcccccagtccttccagcaggccaaatagacctgtgttggaggtaaccccactcccacgccaggtgctgatccggagtggccgggtgcccattgtgtccttggagtgtgtgtcctgcaaggcacaggccgtgtacgaagtgagccgcagctcctacgtgtacttggagggccgctgcctcaattgcagcagcggctccaagcgaggggtgagtgttgagcggggtgtgggcgggctggggatgggtcccatggccgaggggacggggcctgcaggcagaagtggggctgacagggcagagggttgcgccccctcaccaccccttctgcctgcagcggtgggctgcacgtacgttcagcaacaagacgctggtgctggatgagaccaccacatccacgggcagtgcaggcatgcgactggtgctgcggcggggcgtgctgcgggacggcgagggatacaccttcacgctcacggtgctgggccgctctggcgaggaggagggctgcgcctccatccgcctgtcccccaaccgcccgccgctggggggctcttgccgcctcttcccactgggcgctgtgcacgccctcaccaccaaggtgcacttcgaatgcacgggtgagtgcaggcctgcgtggggggagcagcgggatcccccgactctgtgacgtcacggagccctcccgtgatgccgtggggaccgtccctcaggctggcatgacgcggaggatgctggcgccccgctggtgtacgccctgctgctgcggcgctgtcgccagggccactgcgaggagttctgtgtctacaagggcagcctctccagctacggagccgtgctgcccccgggtttcaggccacacttcgaggtgggcctggccgtggtggtgcaggaccagctgggagccgctgtggtcgccctcaacaggtgagccaggccgtgggagggcgcccccgagactgccacctgctcaccacccccctctgctcgtaggtctttggccatcaccctcccagagcccaacggcagcgcaacggggctcacagtctggctgcacgggctcaccgctagtgtgctcccagggctgctgcggcaggccgatccccagcacgtcatcgagtactcgttggccctggtcaccgtgctgaacgaggtgagtgcagcctgggaggggacgtcacatctgctgcatgcgtgcttgggaccaagacctgtacccctgcctggagctttgcagagggctcatcccgggccccagagataaatcccagtgaccctgaagcagcaccccgaccttccgctcccagcagccacacccaccgggccctctccggcgtctgctttccacaatgcagcccccgcccaggagggcccatgtgcttaccctgttttgcccatgaagaaacagctcagtgttgtgggtcagtgcccgcatcacacagcgtctagcacgtaactgcaccccgggagtcgtgggcatctgctggcctcctgccggcctcctgcgctgctgacagcttgctgtgccccctgcctgccccagtacgagcgggccctggacgtggcggcagagcccaagcacgagcggcagcaccgagcccagatacgcaagaacatcacggagactctggtgtccctgagggtccacactgtggatgacatccagcagatcgctgctgcgctggcccagtgcatggtaggatggccccacctgctcaccctgccccgcatgcctgccagggcactgggttcagccccccagggcagacgggcagcttggccgaggagctgagcctccagcctgggctccttcctgccatggcgttcctcggtctctgacctgcttcagtagcctcagccgttctgtcctgtgtgaacgcagggtgcctctcgggggacccagggtgtaaagaggggcccagatgtggggagggactaagaagatgctgctctgtgccctccactctcccctcccctcccctcccccttccctcccctagcccctcccctcctcccctcccctagcccttcccctcctcccctcccctagccctttcccttcttcccccccagcccttcccctcctcccctcccctttttctccactcccctctcctctctcccctcctcctccgctctcatgtgaagaggtgccttgtgtggtcggtgggctgcatcacgtggtccccaggtggaggccctgggtcatgcagagccacagaaaatgcttagtgaggaggctgtgggggtccagtcaagtgggctctccagctgcagggctgggggtgggagccaggtgaggacccgtgtagagaggagggcgtgtgcaaggagtggggccaggagcggggctggacactgctggctccacacaggggcccagcagggagctcgtatgccgctcgtgcctgaagcagacgctgcacaagctggaggccatgatgctcatcctgcaggcagagaccaccgcgggcaccgtgacgcccaccgccatcggagacagcatcctcaacatcacaggtgccgcggcccgtgccccatgccacccgcccgccccgtgcggccctttcctctgcctccctcctccccccaaccgcgtcgcctttgccccatcccatcttcgtccccctcccctccccccaattcccatcctcatccccctcccccaattcccattctcctccccctcccccttccctattaccatcccttttctccatctctctccccttttctccatttccccccccgtcctccccgtccttttgtccattcccctcatcttcctcatccccctcatcccccttcccctcccttatcccccttcccctccctttccccctgctcctcttcttctcccttctcttttctctacccttttccttcctttttcctccctctccccatcatccccctcatcttcgtcctcatccccatcaccttccccctcccccctccaccactctctctccagcttcccccttccttctgcctgcacctcgctctctgccccctcaggttccccctttctcccagcccccaccctccggctccccctttttgcctgcccccaccctccctctacctccctgtctctgcactgacctcacgcatgtctgcaggagacctcatccacctggccagctcggacgtgcgggcaccacagccctcagagctgggagccgagtcaccatctcggatggtggcgtcccaggcctacaacctgacctctgccctcatgcgcatcctcatgcgctcccgcgtgctcaacgaggagcccctgacgctggcgggcgaggagatcgtggcccagggcaagcgctcggacccgcggagcctgctgtgctatggcggcgccccagggcctggctgccacttctccatccccgaggctttcagcggggccctggccaacctcagtgacgtggtgcagctcatctttctggtggactccaatccctttccctttggctatatcagcaactacaccgtctccaccaaggtggcctcgatggcattccagacacaggccggcgcccagatccccatcgagcggctggcctcagagcgcgccatcaccgtgaaggtgcccaacaactcggactgggctgcccggggccaccgcagctccgccaactccgccaactccgttgtggtccagccccaggcctccgtcggtgctgtggtcaccctggacagcagcaaccctgcggccgggctgcatctgcagctcaactatacgctgctggacggtgcgtgcagcgggtggggcacacgcggccccctggccttgttcttggggggaaggcgtttctcgtagggcttccatgggtgtctctggtgaaatttgctttctgtttcatgggctgctgggggcctggccagagaggagctgggggccacggagaagcaggtgccagctctggtgcagaggctcctatggcctttcaggcccgtggcagagggtgggctcaggagggccatcgtgggtgtcccccgggtggttgagcttcccggcaggcgtgtgacctgcgcgttctgccccaggccactacctgtctgaggaacctgagccctacctggcagtctacctacactcggagccccggcccaatgagcacaactgctcggctagcaggaggatccgcccagagtcactccagggtgctgaccaccggccctacaccttcttcatttccccggggtgagctctgcgggccagcctggcagggcagggcagggcatcatgggtcagcattgcctgggttactggccccatggggacggcaggcagcgaggggactggaccgggtatgggctctgagactgcgacatccaacctggcggagcctgggctcacgtccgctaccccttccctgcccaggagcagagacccagcggggagttaccatctgaacctctccagccacttccgctggtcggcgctgcaggtgtccgtgggcctgtacacgtccctgtgccagtacttcagcgaggaggacatggtgtggcggacagaggggctgctgcccctggaggagacctcgccccgccaggccgtctgcctcacccgccacctcaccgccttcggcgccagcctcttcgtgcccccaagccatgtccgctttgtgtttcctgtgagtgaccctgtgctcctgggagcctctgcagagtcgaggagggcctgggtgggctcggctctatcctgagaaggcacagcttgcacgtgacctcctgggcccggcggctgtgtcctcacaggagccgacagcggatgtaaactacatcgtcatgctgacatgtgctgtgtgcctggtgacctacatggtcatggccgccatcctgcacaagctggaccagttggatgccagccggggccgcgccatccctttctgtgggcagcggggccgcttcaagtacgagatcctcgtcaagacaggctggggccggggctcaggtgaggggcgcagcggggtggcagggcctcccctgctctcactggctgtgctggttgcaccctctgggagtgagtctcgtcgcaggcgtcagaacaaggcagtttttgcagtgctgtgtgaagggctcgtgtgttcatcctgggaatgacctcgtgagcactcactgtccctgaggactaggacagctcctagctggaagtaggtgccagtcagtcagggtgggcagcccacgttctgcacagtagcgtggccccacaagtgacgtgagcatcgctaccactgtgggagactgtgcatccacccgcgatcctgactgcatagctcgtctctcagacggaggcgccagcaccctccccgtggctgtttcttcagtacctccattttcctttcattggaattgcccttctggcattccctttttgttttcgtttttctttttttagagacggagtctcactctgttgcccaggctggagtgcaatggcatgatcttggctcacagcaacttccagctcccgggtttaagccattccccttaagcgattctcctgagtagctgggagtacaggtgcacaccaccacacccagttaatttttcaccatgtcagccaggcgaactcctgacctcaggtgatccgcctgcctcggcctgccagagtgctgggatgacaggtgtgagccaccacacctggctgtgttcccattttttatctctgtgctgctttcctcttcattgcccagttctttcttttgattacctacttttaaaaactgtcggccgggcgcggtggctcacacctgtaatccgagcactttgggaggccaggcaggcaaatcacggggtcaggagatcgagaccatcctggctaacggtgaaaccctgtctctaataaaaagtacaaaaaaattagcccggcgtagtggcaggcgcctgtagtcccagctccttgggagactgaggcaggagaatggcgtgaacccgggaggcggagcttgcagtgagctgagattgcgccactgcactccagcctgggtgacacagcaagactccatctcaaaaaaaaaagaaaaaaaatactgtcacctgggtctgtcactgggagaggaggtgacacagcttcacgctttgcagtctgtgcatgaactgagggacgggtgtgtggtgcgggtcaccggttgtggcatgactgaggcgtggacaggtgtgcagtgcgggtcactggttgtggtgtggactgaggcgtgtgcagccatgtttgcatgtcacaagttacagttctttccatgtaacttaatcatgtccttgaggtcctgctgttaattggacaaattgcagtaaccgcagctccttgtgtatggcagagccgtgcaaagccgggactgcctgtgtggctccttgagtgcgcacaggccaaagctgagatgacttgcctgggatgccacacgtgttgggcagcagaccgagcctcccacccctccctcttgcctcccaggtaccacggcccacgtgggcatcatgctgtatggggtggacagccggagcggccaccggcacctggacggcgacagagccttccaccgcaacagcctggacatcttccggatcgccaccccgcacagcctgggtagcgtgtggaagatccgagtgtggcacgacaacaaaggtttgtgcggaccctgccaagctctgcccctctgcccccgcattggggcgccctgcgagcctgacctccctcctgcgcctctgcagggctcagccctgcctggttcctgcagcacgtcatcgtcagggacctgcagacggcacgcagcgccttcttcctggtcaatgactggctttcggtggagacggaggccaacgggggcctggtggagaaggaggtgctggccgcgagtaaggcctcgttccatgttcccactccgtgggaggttgggcagggtggtcctgccccgtggcctcctgcagtgcggccctccctgccttctaggcgacgcagcccttttgcgcttccggcgcctgctggtggctgagctgcagcgtggcttctttgacaagcacatctggctctccatatgggaccggccgcctcgtagccgtttcactcgcatccagagggccacctgctgcgttctcctcatctgcctcttcctgggcgccaacgccgtgtggtacggggctgttggcgactctgcctacaggtgggtgccgtaggggtcggggcagcctcttcctgcccagcccttcctgcccctcagcctcacctgtgtggcctcctctcctccacacagcacggggcatgtgtccaggctgagcccgctgagcgtcgacacagtcgctgttggcctggtgtccagcgtggttgtctatcccgtctacctggccatcctttttctcttccggatgtcccggagcaaggtgggctggggctggggacccgggagtactgggaatggagcctgggcctcggcaccatgcctagggccgccactttccagtgctgcagccagagggaaaggcgtccaccaaaggctgctcgggaagggtcaacacacttgagcagccttagctagactgaccagggagaaagagagaagactcagaagccagaatggtgaaagaacgagggcactttgctaagcagacgccacggacgactgcacagcagcacgccagataactcagaagaagcaagcacgcggctgtgcacgcttccgaaatgcactccagaagaaaatctcagtacatctataggaagtgaagaggctgagttagtcccttagaaacgtcccagtggccgggccgggtgtggtggctcacgcctgtaatcccaacacttcaggtggccgaggtgggcggatctgagtccaggagtttgagaccagcctgggcaacatagcaagaccccatctatataaaacattaaaaagggccaggcgcggtggctcacgcctgtaatcccagcactttgggaggccgaggcgggcagatcacttgaggtcaggagttcgagaccagcctggccaacacaatgaaaccccgactctactacaaatacaaaaacttagctgggcatggtggcgggcgcctgtagtcccagctactcgagaggctgaggcaggagaatggcatgaacccaggaggcggagcttgcagtgagccgagattgcgccactgcactccatcctgggcaacggagcaagactccatctccaaaaaaaaaaaaaaaaaatcccacaaagaaaagctcaggctcagagccttcacgatagaatttttctaagcagttaaggaagaattaacaccaatccttcacagactctttccaagaatacagcaggtgggaacgcttcccattcatacggaaacgggaggccgcaccccttaggaatgcacacgtggggtcctcaagaggttacatgcaaactaaccccagcagcacacagagaaggcgcataagccgcgaccaggaggggttgctcccgagtccgtggcaggaaccagaggccacatgtggctgctcgtatttaagttaattaaaatggaacgatggccgggtgtggtggctcacacctgtaatcccagcactttgggaggcggaggcgggcagatcacttgaggtcaggagttccaagaccagcctggccaacacagtgaaaccccgtctctactaaaaatacaaaaaattagctgggcatggtggcaggcacctgtaatcccagctactcaggaggctgagccaggacaatcgcctgaacgcgggaggtggaggttgcagtgagctgagattgcgccattgcactccagcctgggtgacagcgagactccatctaaaaaagaaaatatgaaatttaaaactctgttccttagctgcaccagtctgctgtcaagtgttcagtggcacacgtcgcgaggggctgccatcacggacggtgcagatgtcccatatatccagcattctaggacattctgtcagatggcaccgggctctgtcctgtctgctgaggaggtggcttctcatccctgtcctgagcaggtctgagctgccgcccgctgaccactgccctcgtcctgcaggtggctgggagcccgagccccacacctgccgggcagcaggtgctggacatcgacagctgcctggactcgtccgtgctggacagctccttcctcacgttctcaggcctccacgctgaggtgaggactctactgg

SEQ ID NO: 13266 - DNA, 4419 bp, Homo sapiens
gtgcgctgaactttgggccccgcgggagcagcacggtcaccattccacgggagcggctggcggctggcgtggagtacaccttcagcctgaccgtgtggaaggccggccgcaaggaggaggccaccaaccagacggtgggtgccgcccgcccctcggccacttgccttggacagcccagcctccctggtcatctactgttttccgtgttttagtgctggtggaggccgcacgctctcccctctctgtttctgatgcaaattctatgtaacacgacagcctgcttcagctttgcttccttccaaacctgccacagttccacgtacagtcttcaagccacatatgctctagtggcaaaagctacacagtcccctagcaataccaacagtgaggaagagccccttcccaccccagaggtagccactgtccccagcccatgtccctgttgctggatgtggtgggccggttctcaccctcacgctcccctctctggaccggccaggaggcttggtgaccctgagcccgtggtggctgctcctgctgctgtcaggcggggcctgctggtgccccagagtgggcgtctgttccccagtccctgctttcctcagctggcctgattgggggtcttcccagaggggtcgtctgaggggagggtgtgggagcaggttccatcccagctcagcctcctgacccaggccctggctaagggctgcaggagtctgtgagtcaggcctacgtggcagctgcggtcctcacacccacacatacgtctcttctcacacgcatccccccaggggccctcagtgagcattgcctgcctcctgctagggtccagctgggtccagtacaccagaacgcacactccagtgtcctctgccctgtgtatgcccttccgccgtccaagttggaaggtggcaaaccggatgagtatcctgggagggagtgagctcaccggcagtggccaggcccctgggaaacctggagtttgggagcagcatcctccatgggtcccccagtccttccagcaggccaaatagacctgtgttggaggtaaccccactcccacgccaggtgctgatccggagtggccgggtgcccattgtgtccttggagtgtgtgtcctgcaaggcacaggccgtgtacgaagtgagccgcagctcctacgtgtacttggagggccgctgcctcaattgcagcagcggctccaagcgagggcggtgggctgcacgtacgttcagcaacaagacgctggtgctggatgagaccaccacatccacgggcagtgcaggcatgcgactggtgctgcggcggggcgtgctgcgggacggcgagggatacaccttcacgctcacggtgctgggccgctctggcgaggaggagggctgcgcctccatccgcctgtcccccaaccgcccgccgctggggggctcttgccgcctcttcccactgggcgctgtgcacgccctcaccaccaaggtgcacttcgaatgcacgggctggcatgacgcggaggatgctggcgccccgctggtgtacgccctgctgctgcggcgctgtcgccagggccactgcgaggagttctgtgtctacaagggcagcctctccagctacggagccgtgctgcccccgggtttcaggccacacttcgaggtgggcctggccgtggtggtgcaggaccagctgggagccgctgtggtcgccctcaacaggtctttggccatcaccctcccagagcccaacggcagcgcaacggggctcacagtctggctgcacgggctcaccgctagtgtgctcccagggctgctgcggcaggccgatccccagcacgtcatcgagtactcgttggccctggtcaccgtgctgaacgagccacacccaccgggccctctccggcgtctgctttccacaatgcagcccccgcccaggagggcccatgtgcttaccctgttttgcccatgaagaaacagctcagtgttgtgggtcagtgcccgcatcacacagcgtctagcacgtaactgcaccccgggagtcgtgggcatctgctggcctcctgccggcctcctgcgctgctgacagcttgctgtgccccctgcctgccccagtacgagcgggccctggacgtggcggcagagcccaagcacgagcggcagcaccgagcccagatacgcaagaacatcacggagactctggtgtccctgagggtccacactgtggatgacatccagcagatcgctgctgcgctggcccagtgcatggggcccagcagggagctcgtatgccgctcgtgcctgaagcagacgctgcacaagctggaggccatgatgctcatcctgcaggcagagaccaccgcgggcaccgtgacgcccaccgccatcggagacagcatcctcaacatcacaggagacctcatccacctggccagctcggacgtgcgggcaccacagccctcagagctgggagccgagtcaccatctcggatggtggcgtcccaggcctacaacctgacctctgccctcatgcgcatcctcatgcgctcccgcgtgctcaacgaggagcccctgacgctggcgggcgaggagatcgtggcccagggcaagcgctcggacccgcggagcctgctgtgctatggcggcgccccagggcctggctgccacttctccatccccgaggctttcagcggggccctggccaacctcagtgacgtggtgcagctcatctttctggtggactccaatccctttccctttggctatatcagcaactacaccgtctccaccaaggtggcctcgatggcattccagacacaggccggcgcccagatccccatcgagcggctggcctcagagcgcgccatcaccgtgaaggtgcccaacaactcggactgggctgcccggggccaccgcagctccgccaactccgccaactccgttgtggtccagccccaggcctccgtcggtgctgtggtcaccctggacagcagcaaccctgcggccgggctgcatctgcagctcaactatacgctgctggacggccactacctgtctgaggaacctgagccctacctggcagtctacctacactcggagccccggcccaatgagcacaactgctcggctagcaggaggatccgcccagagtcactccagggtgctgaccaccggccctacaccttcttcatttccccggggagcagagacccagcggggagttaccatctgaacctctccagccacttccgctggtcggcgctgcaggtgtccgtgggcctgtacacgtccctgtgccagtacttcagcgaggaggacatggtgtggcggacagaggggctgctgcccctggaggagacctcgccccgccaggccgtctgcctcacccgccacctcaccgccttcggcgccagcctcttcgtgcccccaagccatgtccgctttgtgtttcctgagccgacagcggatgtaaactacatcgtcatgctgacatgtgctgtgtgcctggtgacctacatggtcatggccgccatcctgcacaagctggaccagttggatgccagccggggccgcgccatccctttctgtgggcagcggggccgcttcaagtacgagatcctcgtcaagacaggctggggccggggctcaggtaccacggcccacgtgggcatcatgctgtatggggtggacagccggagcggccaccggcacctggacggcgacagagccttccaccgcaacagcctggacatcttccggatcgccaccccgcacagcctgggtagcgtgtggaagatccgagtgtggcacgacaacaaagggctcagccctgcctggttcctgcagcacgtcatcgtcagggacctgcagacggcacgcagcgccttcttcctggtcaatgactggctttcggtggagacggaggccaacgggggcctggtggagaaggaggtgctggccgcgagcgacgcagcccttttgcgcttccggcgcctgctggtggctgagctgcagcgtggcttctttgacaagcacatctggctctccatatgggaccggccgcctcgtagccgtttcactcgcatccagagggccacctgctgcgttctcctcatctgcctcttcctgggcgccaacgccgtgtggtacggggctgttggcgactctgcctacagcacggggcatgtgtccaggctgagcccgctgagcgtcgacacagtcgctgttggcctggtgtccagcgtggttgtctatcccgtctacctggccatcctttttctcttccggatgtcccggagcaaggtggctgggagcccgagccccacacctgccgggcagcaggtgctggacatcgacagctgcctggactcgtccgtgctggacagctccttcctcacgttctcaggcctccacgctgaggtgaggactctactgg

SEQ ID NO: 13267 - DNA, 1288 bp, Homo sapiens
ccggccccagggtccacacgtgctcggccgcaggaggcttcagcaccagcgattacgacgttggctgggagagtcctcacaatggctcggggacgtgggcctattcagcgccggatctgctggggtgagcagagcgagggccccgggcgtctacgccaaggacaagggagtagttctccaggagtgccgcggcctcctgaccagcctggctccggggtgccggaagggctggggtgcggcacccacgccacccctctccggcagggcatggtcctggggctcctgtgccgtgtatgacagcgggggctacgtgcaggagctgggcctgagcctggaggagagccgcgaccggctgcgcttcctgcagctgcacaactggctggacaacaggtgggagctccctcccctgccctctccggggtggccgcagtcaccagccaggagcccaccctcactcctccggcccccgctggcctaggcggcttccacagcccctcagccacgcctgcactgcgcggtccccgcagctcccgccctgccacccgctcctactgacccgcaccctctgcgcaggagccgcgctgtgttcctggagctcacgcgctacagcccggccgtggggctgcacgccgccgtcacgctgcgcctcgagttcccggcggccggccgcgccctggccgccctcagcgtccgcccctttgcgctgcgccgcctcagcgcgggcctctcgctgcctctgctcacctcggtacgcccgtccccggccagaccccgcgcctcccaccggcagcgtcccgccccctcgcggggccccgccccggcagcgtctcacccctcgcagcgccccgccccctcgcagcgtcccgccccctcgcagggccccgccccggcagcgtcccgccccctcgtagggccccgccccggcagcgtcccgccccctcgcagggccccgccccggcagcgtccctcccgccctcctgaccgcgccccccacaggtgtgcctgctgctgttcgccgtgcacttcgccgtggccgaggcccgtacttggcacagggaagggcgctggcgcgtgctgcggctcggagcctgggcgcggtggctgctggtggcgctgacggcggccacggcactggtacgcctcgcccagctgggtgccgctgaccgccagtggacccgtttcgtgcgcggccgcccgcgccgcttcactagcttcgaccaggtggcgcagctgagctccgcagcccgtggcctggcggcctcgctgctcttcctgcttttggtcaagg

SEQ ID NO: 13268 - DNA, 665 bp, Homo sapiens
ccggccccagggtccacacgtgctcggccgcaggaggcttcagcaccagcgattacgacgttggctgggagagtcctcacaatggctcggggacgtgggcctattcagcgccggatctgctggggagctgggcctgagcctggaggagagccgcgaccggctgcgcttcctgcagctgcacaactggctggacaacaggagccgcgctgtgttcctggagctcacgcgctacagcccggccgtggggctgcacgccgccgtcacgctgcgcctcgagttcccggcggccggccgcgccctggccgccctcagcgtccgcccctttgcgctgcgccgcctcagcgcgggcctctcgctgcctctgctcacctcggtgtgcctgctgctgttcgccgtgcacttcgccgtggccgaggcccgtacttggcacagggaagggcgctggcgcgtgctgcggctcggagcctgggcgcggtggctgctggtggcgctgacggcggccacggcactggtacgcctcgcccagctgggtgccgctgaccgccagtggacccgtttcgtgcgcggccgcccgcgccgcttcactagcttcgaccaggtggcgcagctgagctccgcagcccgtggcctggcggcctcgctgctcttcctgcttttggtcaagg

SEQ ID NO: 13269 - DNA, 2892 bp, Homo sapiens
cgaatgcacgggtgagtgcaggcctgcgtggggggagcagcgggatcccccgactctgtgacgtcacggagccctcccgtgatgccgtggggaccgtccctcaggctggcatgacgcggaggatgctggcgccccgctggtgtacgccctgctgctgcggcgctgtcgccagggccactgcgaggagttctgtgtctacaagggcagcctctccagctacggagccgtgctgcccccgggtttcaggccacacttcgaggtgggcctggccgtggtggtgcaggaccagctgggagccgctgtggtcgccctcaacaggtgagccaggccgtgggagggcgcccccgagactgccacctgctcaccacccccctctgctcgtaggtctttggccatcaccctcccagagcccaacggcagcgcaacggggctcacagtctggctgcacgggctcaccgctagtgtgctcccagggctgctgcggcaggccgatccccagcacgtcatcgagtactcgttggccctggtcaccgtgctgaacgaggtgagtgcagcctgggaggggacgtcacatctgctgcatgcgtgcttgggaccaagacctgtacccctgcctggagctttgcagagggctcatcccgggccccagagataaatcccagtgaccctgaagcagcaccccgaccttccgctcccagcagccacacccaccgggccctctccggcgtctgctttccacaatgcagcccccgcccaggagggcccatgtgcttaccctgttttgcccatgaagaaacagctcagtgttgtgggtcagtgcccgcatcacacagcgtctagcacgtaactgcaccccgggagtcgtgggcatctgctggcctcctgccggcctcctgcgctgctgacagcttgctgtgccccctgcctgccccagtacgagcgggccctggacgtggcggcagagcccaagcacgagcggcagcaccgagcccagatacgcaagaacatcacggagactctggtgtccctgagggtccacactgtggatgacatccagcagatcgctgctgcgctggcccagtgcatggtaggatggccccacctgctcaccctgccccgcatgcctgccagggcactgggttcagccccccagggcagacgggcagcttggccgaggagctgagcctccagcctgggctccttcctgccatggcgttcctcggtctctgacctgcttcagtagcctcagccgttctgtcctgtgtgaacgcagggtgcctctcgggggacccagggtgtaaagaggggcccagatgtggggagggactaagaagatgctgctctgtgccctccactctcccctcccctcccctcccccttccctcccctagcccctcccctcctcccctcccctagcccttcccctcctcccctcccctagccctttcccttcttcccccccagcccttcccctcctcccctcccctttttctccactcccctctcctctctcccctcctcctccgctctcatgtgaagaggtgccttgtgtggtcggtgggctgcatcacgtggtccccaggtggaggccctgggtcatgcagagccacagaaaatgcttagtgaggaggctgtgggggtccagtcaagtgggctctccagctgcagggctgggggtgggagccaggtgaggacccgtgtagagaggagggcgtgtgcaaggagtggggccaggagcggggctggacactgctggctccacacaggggcccagcagggagctcgtatgccgctcgtgcctgaagcagacgctgcacaagctggaggccatgatgctcatcctgcaggcagagaccaccgcgggcaccgtgacgcccaccgccatcggagacagcatcctcaacatcacaggtgccgcggcccgtgccccatgccacccgcccgccccgtgcggccctttcctctgcctccctcctccccccaaccgcgtcgcctttgccccatcccatcttcgtccccctcccctccccccaattcccatcctcatccccctcccccaattcccattctcctccccctcccccttccctattaccatcccttttctccatctctctccccttttctccatttccccccccgtcctccccgtccttttgtccattcccctcatcttcctcatccccctcatcccccttcccctcccttatcccccttcccctccctttccccctgctcctcttcttctcccttctcttttctctacccttttccttcctttttcctccctctccccatcatccccctcatcttcgtcctcatccccatcaccttccccctcccccctccaccactctctctccagcttcccccttccttctgcctgcacctcgctctctgccccctcaggttccccctttctcccagcccccaccctccggctccccctttttgcctgcccccaccctccctctacctccctgtctctgcactgacctcacgcatgtctgcaggagacctcatccacctggccagctcggacgtgcgggcaccacagccctcagagctgggagccgagtcaccatctcggatggtggcgtcccaggcctacaacctgacctctgccctcatgcgcatcctcatgcgctcccgcgtgctcaacgaggagcccctgacgctggcgggcgaggagatcgtggcccagggcaagcgctcggacccgcggagcctgctgtgctatggcggcgccccagggcctggctgccacttctccatccccgaggctttcagcggggccctggccaacctcagtgacgtggtgcagctcatctttctggtggactccaatccctttccctttggctatatcagcaactacaccgtctccaccaa

SEQ ID NO: 13270 - DNA, 964 bp, Homo sapiens
cgaatgcacgggctggcatgacgcggaggatgctggcgccccgctggtgtacgccctgctgctgcggcgctgtcgccagggccactgcgaggagttctgtgtctacaagggcagcctctccagctacggagccgtgctgcccccgggtttcaggccacacttcgaggtgggcctggccgtggtggtgcaggaccagctgggagccgctgtggtcgccctcaacaggtctttggccatcaccctcccagagcccaacggcagcgcaacggggctcacagtctggctgcacgggctcaccgctagtgtgctcccagggctgctgcggcaggccgatccccagcacgtcatcgagtactcgttggccctggtcaccgtgctgaacgagtacgagcgggccctggacgtggcggcagagcccaagcacgagcggcagcaccgagcccagatacgcaagaacatcacggagactctggtgtccctgagggtccacactgtggatgacatccagcagatcgctgctgcgctggcccagtgcatggggcccagcagggagctcgtatgccgctcgtgcctgaagcagacgctgcacaagctggaggccatgatgctcatcctgcaggcagagaccaccgcgggcaccgtgacgcccaccgccatcggagacagcatcctcaacatcacaggagacctcatccacctggccagctcggacgtgcgggcaccacagccctcagagctgggagccgagtcaccatctcggatggtggcgtcccaggcctacaacctgacctctgccctcatgcgcatcctcatgcgctcccgcgtgctcaacgaggagcccctgacgctggcgggctttcagcggggccctggccaacctcagtgacgtggtgcagctcatctttctggtggactccaatccctttccctttggctatatcagcaactacaccgtctccaccaa

SEQ ID NO: 13271 - DNA, 6062 bp, Homo sapiens
ctctgccctcatgcgcatcctcatgcgctcccgcgtgctcaacgaggagcccctgacgctggcgggcgaggagatcgtggcccagggcaagcgctcggacccgcggagcctgctgtgctatggcggcgccccagggcctggctgccacttctccatccccgaggctttcagcggggccctggccaacctcagtgacgtggtgcagctcatctttctggtggactccaatccctttccctttggctatatcagcaactacaccgtctccaccaaggtggcctcgatggcattccagacacaggccggcgcccagatccccatcgagcggctggcctcagagcgcgccatcaccgtgaaggtgcccaacaactcggactgggctgcccggggccaccgcagctccgccaactccgccaactccgttgtggtccagccccaggcctccgtcggtgctgtggtcaccctggacagcagcaaccctgcggccgggctgcatctgcagctcaactatacgctgctggacggtgcgtgcagcgggtggggcacacgcggccccctggccttgttcttggggggaaggcgtttctcgtagggcttccatgggtgtctctggtgaaatttgctttctgtttcatgggctgctgggggcctggccagagaggagctgggggccacggagaagcaggtgccagctctggtgcagaggctcctatggcctttcaggcccgtggcagagggtgggctcaggagggccatcgtgggtgtcccccgggtggttgagcttcccggcaggcgtgtgacctgcgcgttctgccccaggccactacctgtctgaggaacctgagccctacctggcagtctacctacactcggagccccggcccaatgagcacaactgctcggctagcaggaggatccgcccagagtcactccagggtgctgaccaccggccctacaccttcttcatttccccggggtgagctctgcgggccagcctggcagggcagggcagggcatcatgggtcagcattgcctgggttactggccccatggggacggcaggcagcgaggggactggaccgggtatgggctctgagactgcgacatccaacctggcggagcctgggctcacgtccgctaccccttccctgcccaggagcagagacccagcggggagttaccatctgaacctctccagccacttccgctggtcggcgctgcaggtgtccgtgggcctgtacacgtccctgtgccagtacttcagcgaggaggacatggtgtggcggacagaggggctgctgcccctggaggagacctcgccccgccaggccgtctgcctcacccgccacctcaccgccttcggcgccagcctcttcgtgcccccaagccatgtccgctttgtgtttcctgtgagtgaccctgtgctcctgggagcctctgcagagtcgaggagggcctgggtgggctcggctctatcctgagaaggcacagcttgcacgtgacctcctgggcccggcggctgtgtcctcacaggagccgacagcggatgtaaactacatcgtcatgctgacatgtgctgtgtgcctggtgacctacatggtcatggccgccatcctgcacaagctggaccagttggatgccagccggggccgcgccatccctttctgtgggcagcggggccgcttcaagtacgagatcctcgtcaagacaggctggggccggggctcaggtgaggggcgcagcggggtggcagggcctcccctgctctcactggctgtgctggttgcaccctctgggagtgagtctcgtcgcaggcgtcagaacaaggcagtttttgcagtgctgtgtgaagggctcgtgtgttcatcctgggaatgacctcgtgagcactcactgtccctgaggactaggacagctcctagctggaagtaggtgccagtcagtcagggtgggcagcccacgttctgcacagtagcgtggccccacaagtgacgtgagcatcgctaccactgtgggagactgtgcatccacccgcgatcctgactgcatagctcgtctctcagacggaggcgccagcaccctccccgtggctgtttcttcagtacctccattttcctttcattggaattgcccttctggcattccctttttgttttcgtttttctttttttagagacggagtctcactctgttgcccaggctggagtgcaatggcatgatcttggctcacagcaacttccagctcccgggtttaagccattccccttaagcgattctcctgagtagctgggagtacaggtgcacaccaccacacccagttaatttttcaccatgtcagccaggcgaactcctgacctcaggtgatccgcctgcctcggcctgccagagtgctgggatgacaggtgtgagccaccacacctggctgtgttcccattttttatctctgtgctgctttcctcttcattgcccagttctttcttttgattacctacttttaaaaactgtcggccgggcgcggtggctcacacctgtaatccgagcactttgggaggccaggcaggcaaatcacggggtcaggagatcgagaccatcctggctaacggtgaaaccctgtctctaataaaaagtacaaaaaaattagcccggcgtagtggcaggcgcctgtagtcccagctccttgggagactgaggcaggagaatggcgtgaacccgggaggcggagcttgcagtgagctgagattgcgccactgcactccagcctgggtgacacagcaagactccatctcaaaaaaaaaagaaaaaaaatactgtcacctgggtctgtcactgggagaggaggtgacacagcttcacgctttgcagtctgtgcatgaactgagggacgggtgtgtggtgcgggtcaccggttgtggcatgactgaggcgtggacaggtgtgcagtgcgggtcactggttgtggtgtggactgaggcgtgtgcagccatgtttgcatgtcacaagttacagttctttccatgtaacttaatcatgtccttgaggtcctgctgttaattggacaaattgcagtaaccgcagctccttgtgtatggcagagccgtgcaaagccgggactgcctgtgtggctccttgagtgcgcacaggccaaagctgagatgacttgcctgggatgccacacgtgttgggcagcagaccgagcctcccacccctccctcttgcctcccaggtaccacggcccacgtgggcatcatgctgtatggggtggacagccggagcggccaccggcacctggacggcgacagagccttccaccgcaacagcctggacatcttccggatcgccaccccgcacagcctgggtagcgtgtggaagatccgagtgtggcacgacaacaaaggtttgtgcggaccctgccaagctctgcccctctgcccccgcattggggcgccctgcgagcctgacctccctcctgcgcctctgcagggctcagccctgcctggttcctgcagcacgtcatcgtcagggacctgcagacggcacgcagcgccttcttcctggtcaatgactggctttcggtggagacggaggccaacgggggcctggtggagaaggaggtgctggccgcgagtaaggcctcgttccatgttcccactccgtgggaggttgggcagggtggtcctgccccgtggcctcctgcagtgcggccctccctgccttctaggcgacgcagcccttttgcgcttccggcgcctgctggtggctgagctgcagcgtggcttctttgacaagcacatctggctctccatatgggaccggccgcctcgtagccgtttcactcgcatccagagggccacctgctgcgttctcctcatctgcctcttcctgggcgccaacgccgtgtggtacggggctgttggcgactctgcctacaggtgggtgccgtaggggtcggggcagcctcttcctgcccagcccttcctgcccctcagcctcacctgtgtggcctcctctcctccacacagcacggggcatgtgtccaggctgagcccgctgagcgtcgacacagtcgctgttggcctggtgtccagcgtggttgtctatcccgtctacctggccatcctttttctcttccggatgtcccggagcaaggtgggctggggctggggacccgggagtactgggaatggagcctgggcctcggcaccatgcctagggccgccactttccagtgctgcagccagagggaaaggcgtccaccaaaggctgctcgggaagggtcaacacacttgagcagccttagctagactgaccagggagaaagagagaagactcagaagccagaatggtgaaagaacgagggcactttgctaagcagacgccacggacgactgcacagcagcacgccagataactcagaagaagcaagcacgcggctgtgcacgcttccgaaatgcactccagaagaaaatctcagtacatctataggaagtgaagaggctgagttagtcccttagaaacgtcccagtggccgggccgggtgtggtggctcacgcctgtaatcccaacacttcaggtggccgaggtgggcggatctgagtccaggagtttgagaccagcctgggcaacatagcaagaccccatctatataaaacattaaaaagggccaggcgcggtggctcacgcctgtaatcccagcactttgggaggccgaggcgggcagatcacttgaggtcaggagttcgagaccagcctggccaacacaatgaaaccccgactctactacaaatacaaaaacttagctgggcatggtggcgggcgcctgtagtcccagctactcgagaggctgaggcaggagaatggcatgaacccaggaggcggagcttgcagtgagccgagattgcgccactgcactccatcctgggcaacggagcaagactccatctccaaaaaaaaaaaaaaaaaatcccacaaagaaaagctcaggctcagagccttcacgatagaatttttctaagcagttaaggaagaattaacaccaatccttcacagactctttccaagaatacagcaggtgggaacgcttcccattcatacggaaacgggaggccgcaccccttaggaatgcacacgtggggtcctcaagaggttacatgcaaactaaccccagcagcacacagagaaggcgcataagccgcgaccaggaggggttgctcccgagtccgtggcaggaaccagaggccacatgtggctgctcgtatttaagttaattaaaatggaacgatggccgggtgtggtggctcacacctgtaatcccagcactttgggaggcggaggcgggcagatcacttgaggtcaggagttccaagaccagcctggccaacacagtgaaaccccgtctctactaaaaatacaaaaaattagctgggcatggtggcaggcacctgtaatcccagctactcaggaggctgagccaggacaatcgcctgaacgcgggaggtggaggttgcagtgagctgagattgcgccattgcactccagcctgggtgacagcgagactccatctaaaaaagaaaatatgaaatttaaaactctgttccttagctgcaccagtctgctgtcaagtgttcagtggcacacgtcgcgaggggctgccatcacggacggtgcagatgtcccatatatccagcattctaggacattctgtcagatggcaccgggctctgtcctgtctgctgaggaggtggcttctcatccctgtcctgagcaggtctgagctgccgcccgctgaccactgccctcgtcctgcaggtggctgggagcccgagccccacacctgccgggcagcaggtgctggacatcgacagctgcctggactcgtccgtgctggacagctccttcctcacgttctcaggcctccacgctgaggtgaggactctactgggggtcctgggctgggctgggggtcctgccgccttggcgcagcttggactcaagacactgtgcacctctcagcaggcctttgttggacagatgaagagtgacttgtttctggatgattctaagag

SEQ ID NO: 13272 - DNA, 2040 bp, Homo sapiens
ctctgccctcatgcgcatcctcatgcgctcccgcgtgctcaacgaggagcccctgacgctggcgggcgaggagatcgtggcccagggcaagcgctcggacccgcggagcctgctgtgctatggcggcgccccagggcctggctgccacttctccatccccgaggctttcagcggggccctggccaacctcagtgacgtggtgcagctcatctttctggtggactccaatccctttccctttggctatatcagcaactacaccgtctccaccaaggtggcctcgatggcattccagacacaggccggcgcccagatccccatcgagcggctggcctcagagcgcgccatcaccgtgaaggtgcccaacaactcggactgggctgcccggggccaccgcagctccgccaactccgccaactccgttgtggtccagccccaggcctccgtcggtgctgtggtcaccctggacagcagcaaccctgcggccgggctgcatctgcagctcaactatacgctgctggacggccactacctgtctgaggaacctgagccctacctggcagtctacctacactcggagccccggcccaatgagcacaactgctcggctagcaggaggatccgcccagagtcactccagggtgctgaccaccggccctacaccttcttcatttccccggggagcagagacccagcggggagttaccatctgaacctctccagccacttccgctggtcggcgctgcaggtgtccgtgggcctgtacacgtccctgtgccagtacttcagcgaggaggacatggtgtggcggacagaggggctgctgcccctggaggagacctcgccccgccaggccgtctgcctcacccgccacctcaccgccttcggcgccagcctcttcgtgcccccaagccatgtccgctttgtgtttcctgagccgacagcggatgtaaactacatcgtcatgctgacatgtgctgtgtgcctggtgacctacatggtcatggccgccatcctgcacaagctggaccagttggatgccagccggggccgcgccatccctttctgtgggcagcggggccgcttcaagtacgagatcctcgtcaagacaggctggggccggggctcaggtaccacggcccacgtgggcatcatgctgtatggggtggacagccggagcggccaccggcacctggacggcgacagagccttccaccgcaacagcctggacatcttccggatcgccaccccgcacagcctgggtagcgtgtggaagatccgagtgtggcacgacaacaaagggctcagccctgcctggttcctgcagcacgtcatcgtcagggacctgcagacggcacgcagcgccttcttcctggtcaatgactggctttcggtggagacggaggccaacgggggcctggtggagaaggaggtgctggccgcgagcgacgcagcccttttgcgcttccggcgcctgctggtggctgagctgcagcgtggcttctttgacaagcacatctggctctccatatgggaccggccgcctcgtagccgtttcactcgcatccagagggccacctgctgcgttctcctcatctgcctcttcctgggcgccaacgccgtgtggtacggggctgttggcgactctgcctacagcacggggcatgtgtccaggctgagcccgctgagcgtcgacacagtcgctgttggcctggtgtccagcgtggttgtctatcccgtctacctggccatcctttttctcttccggatgtcccggagcaaggtggctgggagcccgagccccacacctgccgggcagcaggtgctggacatcgacagctgcctggactcgtccgtgctggacagctccttcctcacgttctcaggcctccacgctgaggtgaggactctactgggggtcctgggctgggctgggggtcctgccgccttggcgcagcttggactcaagacactgtgcacctctcagcaggcctttgttggacagatgaagagtgacttgtttctggatgattctaagag

SEQ ID NO: 13273 - DNA, 2062 bp, Homo sapiens
gcgtgagtgttgcgtggctcctgtccagcagcgccagcttcctggcctcattcctcggctgggagccactgaaggtgagggggctgccaggggtaggctacaggcctccatcacgggggacccctctgaagccaccccctccccaggtcttgctggaagccctgtacttctcactggtggccaagcggctgcacccggatgaagatgacaccctggtagagagcccggctgtgacgcctgtgagcgcacgtgtgccccgcgtacggccaccccacggctttgcactcttcctggccaaggaagaagcccgcaaggtcaagaggctacatggcatgctgcgggtgagcctgggtgcggcctgtgcccctgccacctccgtctcttgtctcccacctcccacccatgcacgcaggacactcctgtccccctttcctcacctcagaaggcccttaggggttcaatgctctgcagcctttgcccggtctccctcctaccccacgccccccacttgctgccccagtccctgccagggcccagctccaatgcccactcctgcctggccctgaaggcccctaagcaccactgcagtggcctgtgtgtctgcccccaggtggggttccgggcagggtgtgtgctgccattaccctggccaggtagagtcttggggcgccccctgccagctcaccttcctgcagccacacctgccgcagccatggctccagccgttgccaaagccctgctgtcactgtgggctggggccaggctgaccacagggcccccccgtccaccagagcctcctggtgtacatgctttttctgctggtgaccctgctggccagctatggggatgcctcatgccatgggcacgcctaccgtctgcaaagcgccatcaagcaggagctgcacagccgggccttcctggccatcacgcggtacgggcatccggtgcactggtctgtcttctgggctttagttttgcctttagtccagccagaccctaggggacatgtggacatgtgtagatacctttgtggctgctagaactggaggtaggtgctgctggcatcagtaggcagaggggagggacacaggtccgtgtcttgcagtgcacaggacgggcccatgacagacaactgtctgccccagaacatccccaggataaggctgagaagcccaggtctagccgtggccagcagggcagtgggagccatgttccctgggtctctggtggccgctcactcgaggcgggcatggggcagtaggggctggagcgtgtgactgatgctgtggcaggtctgaggagctctggccatggatggcccacgtgctgctgccctacgtccacgggaaccagtccagcccagagctggggcccccacggctgcggcaggtgcggctgcaggaaggtgagctggcagggcgtgccccaagacttaaatcgttcctcttgttgagagagcagcctttagcggagctctggcatcagccctgctccctagctgtgtgacctttgccctcttaacaccgccgtttccttctctgtatatgagagatggtaacgttgtctaattgatggctgctgggagggttccctggggtggcgccgaaccagagctcaggcgagctggccagcaggaaacactcctgttgggttttgatgaggccctggccccggcctggggctctgtgtgtttcagcactctacccagaccctcccggccccagggtccacacgtgctcggccgcaggaggcttcagcaccagcgattacgacgttggctgggagagtcctcacaatggctcggggacgtgggcctattcagcgccggatctgctggggtgagcagagcgagggccccgggcgtctacgccaaggacaagggagtagttctccaggagtgccgcggcctcctgaccagcctggctccggggtgccggaagggctggggtgcggcacccacgccacccctctccggcagggcatggtcctggggctcctgtgccgtgtatgacagcgggggctacgtgcaggagctgggcctgagcctggaggagagccgcga

SEQ ID NO: 13274 - DNA, 608 bp, Homo sapiens
gcgtgagtgttgcgtggctcctgtccagcagcgccagcttcctggcctcattcctcggctgggagccactgaaggtcttgctggaagccctgtacttctcactggtggccaagcggctgcacccggatgaagatgacaccctggtagagagcccggctgtgacgcctgtgagcgcacgtgtgccccgcgtacggccaccccacggctttgcactcttcctggccaaggaagaagcccgcaaggtcaagaggctacatggcatgctgcgggtctgaggagctctggccatggatggcccacgtgctgctgccctacgtccacgggaaccagtccagcccagagctggggcccccacggctgcggcaggtgcggctgcaggaagcactctacccagaccctcccggccccagggtccacacgtgctcggccgcaggaggcttcagcaccagcgattacgacgttggctgggagagtcctcacaatggctcggggacgtgggcctattcagcgccggatctgctgggggcatggtcctggggctcctgtgccgtgtatgacagcgggggctacgtgcaggagctgggcctgagcctggaggagagccgcga

SEQ ID NO: 13275 - DNA, 1249 bp, Homo sapiens
aaggacaagggagtagttctccaggagtgccgcggcctcctgaccagcctggctccggggtgccggaagggctggggtgcggcacccacgccacccctctccggcagggcatggtcctggggctcctgtgccgtgtatgacagcgggggctacgtgcaggagctgggcctgagcctggaggagagccgcgaccggctgcgcttcctgcagctgcacaactggctggacaacaggtgggagctccctcccctgccctctccggggtggccgcagtcaccagccaggagcccaccctcactcctccggcccccgctggcctaggcggcttccacagcccctcagccacgcctgcactgcgcggtccccgcagctcccgccctgccacccgctcctactgacccgcaccctctgcgcaggagccgcgctgtgttcctggagctcacgcgctacagcccggccgtggggctgcacgccgccgtcacgctgcgcctcgagttcccggcggccggccgcgccctggccgccctcagcgtccgcccctttgcgctgcgccgcctcagcgcgggcctctcgctgcctctgctcacctcggtacgcccgtccccggccagaccccgcgcctcccaccggcagcgtcccgccccctcgcggggccccgccccggcagcgtctcacccctcgcagcgccccgccccctcgcagcgtcccgccccctcgcagggccccgccccggcagcgtcccgccccctcgtagggccccgccccggcagcgtcccgccccctcgcagggccccgccccggcagcgtccctcccgccctcctgaccgcgccccccacaggtgtgcctgctgctgttcgccgtgcacttcgccgtggccgaggcccgtacttggcacagggaagggcgctggcgcgtgctgcggctcggagcctgggcgcggtggctgctggtggcgctgacggcggccacggcactggtacgcctcgcccagctgggtgccgctgaccgccagtggacccgtttcgtgcgcggccgcccgcgccgcttcactagcttcgaccaggtggcgcagctgagctccgcagcccgtggcctggcggcctcgctgctcttcctgcttttggtcaaggtgagggctgggccggtgggcgcggggctgggcgcacaccccagggctgcaagcagacagatttctcgtccgcaggctgcccagcagctacgcttcgtgcgccagtggtccgtctttgg

SEQ ID NO: 13276 - DNA, 568 bp, Homo sapiens
aaggacaagggagtagttctccaggagtgccgcggcctcctgaccagcctggctccggggtgccggaagggctggggtgcggcacccacgccacccctctccggcagggcatggtcctggggctcctgtgccgtgtatgacagcgggggctacgtgcaggagctgggcctgagcctggaggagagccgcgaccggctgcgcttcctgcagctgcacaactggctggacaacaggtgtgcctgctgctgttcgccgtgcacttcgccgtggccgaggcccgtacttggcacagggaagggcgctggcgcgtgctgcggctcggagcctgggcgcggtggctgctggtggcgctgacggcggccacggcactggtacgcctcgcccagctgggtgccgctgaccgccagtggacccgtttcgtgcgcggccgcccgcgccgcttcactagcttcgaccaggtggcgcagctgagctccgcagcccgtggcctggcggcctcgctgctcttcctgcttttggtcaaggctgcccagcagctacgcttcgtgcgccagtggtccgtctttgg

SEQ ID NO: 13277 - DNA, 748 bp, Homo sapiens
gtcgccctcaacaggtgagccaggccgtgggagggcgcccccgagactgccacctgctcaccacccccctctgctcgtaggtctttggccatcaccctcccagagcccaacggcagcgcaacggggctcacagtctggctgcacgggctcaccgctagtgtgctcccagggctgctgcggcaggccgatccccagcacgtcatcgagtactcgttggccctggtcaccgtgctgaacgaggtgagtgcagcctgggaggggacgtcacatctgctgcatgcgtgcttgggaccaagacctgtacccctgcctggagctttgcagagggctcatcccgggccccagagataaatcccagtgaccctgaagcagcaccccgaccttccgctcccagcagccacacccaccgggccctctccggcgtctgctttccacaatgcagcccccgcccaggagggcccatgtgcttaccctgttttgcccatgaagaaacagctcagtgttgtgggtcagtgcccgcatcacacagcgtctagcacgtaactgcaccccgggagtcgtgggcatctgctggcctcctgccggcctcctgcgctgctgacagcttgctgtgccccctgcctgccccagtacgagcgggccctggacgtggcggcagagcccaagcacgagcggcagcaccgagcccagatacgcaagaacatcacggagactctggtgtccctgagggtccacactgtggatgaca

SEQ ID NO: 13278 - DNA, 480 bp, Homo sapiens
gtcgccctcaacaggtctttggccatcaccctcccagagcccaacggcagcgcaacggggctcacagtctggctgcacgggctcaccgctagtgtgctcccagggctgctgcggcaggccgatccccagcacgtcatcgagtactcgttggccctggtcaccgtgctgaacgagcccccgcccaggagggcccatgtgcttaccctgttttgcccatgaagaaacagctcagtgttgtgggtcagtgcccgcatcacacagcgtctagcacgtaactgcaccccgggagtcgtgggcatctgctggcctcctgccggcctcctgcgctgctgacagcttgctgtgccccctgcctgccccagtacgagcgggccctggacgtggcggcagagcccaagcacgagcggcagcaccgagcccagatacgcaagaacatcacggagactctggtgtccctgagggtccacactgtggatgaca

SEQ ID NO: 13279 - DNA, 1030 bp, Homo sapiens
gaatgcacgggtgagtgcaggcctgcgtggggggagcagcgggatcccccgactctgtgacgtcacggagccctcccgtgatgccgtggggaccgtccctcaggctggcatgacgcggaggatgctggcgccccgctggtgtacgccctgctgctgcggcgctgtcgccagggccactgcgaggagttctgtgtctacaagggcagcctctccagctacggagccgtgctgcccccgggtttcaggccacacttcgaggtgggcctggccgtggtggtgcaggaccagctgggagccgctgtggtcgccctcaacaggtgagccaggccgtgggagggcgcccccgagactgccacctgctcaccacccccctctgctcgtaggtctttggccatcaccctcccagagcccaacggcagcgcaacggggctcacagtctggctgcacgggctcaccgctagtgtgctcccagggctgctgcggcaggccgatccccagcacgtcatcgagtactcgttggccctggtcaccgtgctgaacgaggtgagtgcagcctgggaggggacgtcacatctgctgcatgcgtgcttgggaccaagacctgtacccctgcctggagctttgcagagggctcatcccgggccccagagataaatcccagtgaccctgaagcagcaccccgaccttccgctcccagcagccacacccaccgggccctctccggcgtctgctttccacaatgcagcccccgcccaggagggcccatgtgcttaccctgttttgcccatgaagaaacagctcagtgttgtgggtcagtgcccgcatcacacagcgtctagcacgtaactgcaccccgggagtcgtgggcatctgctggcctcctgccggcctcctgcgctgctgacagcttgctgtgccccctgcctgccccagtacgagcgggccctggacgtggcggcagagcccaagcacgagcggcagcaccgagcccagatacgcaagaacatcacggagactctggtgtccctga

SEQ ID NO: 13280 - DNA, 574 bp, Homo sapiens
gaatgcacgggtgagtgcaggcctgcgtggggggagcagcgggatcccccgactctgtgacgtcacggagccctcccgtgatgccgtggggaccgtccctcaggctggcatgacgcggaggatgctggcgccccgctggtgtacgccctgctgctgcggcgctgtcgccagggccactgcgaggagttctgtgtctacaagggcagcctctccagctacggagccgtgctgcccccgggtttcaggccacacttcgaggtgggcctggccgtggtggtgcaggaccagctgggagccgctgtggtcgccctcaacaggtctttggccatcaccctcccagagcccaacggcagcgcaacggggctcacagtctggctgcacgggctcaccgctagtgtgctcccagggctgctgcggcaggccgatccccagcacgtcatcgagtactcgttggccctggtcaccgtgctgaacgagtacgagcgggccctggacgtggcggcagagcccaagcacgagcggcagcaccgagcccagatacgcaagaacatcacggagactctggtgtccctga

SEQ ID NO: 13281 - DNA, 10693 bp, Homo sapiens
caggtggactctggtgccaacgccacggccacggctcgctggcctgggggcagtgtcagcgcccgctttgagaatgtctgccctgccctggtggccaccttcgtgcccggctgcccctgggagaccaacgataccctgttctcagtggtagcactgccgtggctcagtgagggggagcacgtggtggacgtggtggtggaaaacagcgccagccgggccaacctcagcctgcgggtgacggcggaggagcccatctgtggcctccgcgccacgcccagccccgaggcccgtgtactgcagggagtcctagtggtgagtatggccgaggctccaccaccagcccccaggcaggtgcctgcagacagggtgctcacacagggcgtgaggcctggcttcccagtgagggcagcagcccagttactggggacgtcggccccgggcaggtcctgctggctggctcctcgggctacctggtgggctttaaattcctggaaagtcacggctctgacagtggctccgctaactcattccactgtctcatttcacaaaatgaatttaaaactctgctccctgacctcacacgagcccccgtgagtctctcacgccctctgctgtgttctcgcctggctaaagcgagtggcttttgaggtggagtctgaacccctgatgggaaactgcgggctgcccgcggtgccaccatgctgggtacatgggggacagggctgtctccatcttgcgggtacctgcctcttcaccaggggccttgggaggggccatcagaaatggcgtgacctgtgcagcctgtcctgggttctgtaagccagtgtaggtgcctcccctcactgctccgagctctctgggtgaggagctggggcaagagcgccgggagggtctgagaagactcagagagaggtggactctttgtagctggtactaggtttgctttacagatggggaaactgaggcacagagaggttgaggcattagtagtactacatggctggctggagagccggacagtgagtgtcccagcccgggcttggctcccatggcatgcagagccccgggcacctcctctcctctgtgccccgcgtgggactctccagcccgacgggaggtgtgtccaggaggcgacaggctaagggcagagtcctccacagagcccaggctgacaccattccccccgcagaggtacagccccgtggtggaggccggctcggacatggtcttccggtggaccatcaacgacaagcagtccctgaccttccagaacgtggtcttcaatgtcatttatcagagcgcggcggtcttcaagctctcagtaggtgggcgggggtggggaggggaggggatggggcggggcagggcgggggcgggctccaccttcacctctgccttctgctctgcttcatgctgcccgaggacgctgccatggctgtgggtgagtggagggagggacgccaatcagggccaggcctctcacctgccacctgggctcactgacgcctgtccctgcagctgacggcctccaaccacgtgagcaacgtcaccgtgaactacaacgtaaccgtggagcggatgaacaggatgcagggtctgcaggtctccacagtgccggccgtgctgtcccccaatgccacgctagcactgacggcgggcgtgctggtggactcggccgtggaggtggccttcctgtgagtgactcgggggccggtttggggtgggcaccaggctcttgtcccagccccagcctcagccgagggacccccacatcacggggttgcttttctgagcctcggtttccctgtctgttgggaggtaactgggtgcacaggagccctgaggctgcacgggagccgggagaggcctcagcacagccgggtgggccctgaatggaggcccggggcgtgactgcagagtggagcctcggctgggtcccaagcaccccctgccccgccaccgcccacccctgtcccggttcactcactgcgtcccaccgccccggcaggtggacctttggggatggggagcaggccctccaccagttccagcctccgtacaacgagtccttcccggttccagacccctcggtggcccaggtgctggtggagcacaatgtcatgcacacctacgctgccccaggtgagggatgagggggtgagggggccactgcctttcaggctctgagcacggggtccccccagctccccagtcaagctgccccccttcctccccaacagccctcactgtgacctcacctgggctgatggcttaggcccctactggggtgagggaggggccaggcgtggggggagtggacagggaagctgggcccctgaactgcgccccccgccctccccgggcctggctcttgctgctctgctgccccgagtgcagctgcacttggaggcggtgccgtcctcgccaggcagccctcagtgctgctacacctgtgctccgtcccgcacgtggcttgggagcctgggacccttaaggctgggccgcaggtgcagccgttcaccccgggctcctcaggcggggggcttctgccgagcgggtggggagcaggtgggggtgccgcggctgccccactcgggcctgtccccacaggtgagtacctcctgaccgtgctggcatctaatgccttcgagaacctgacgcagcaggtgcctgtgagcgtgcgcgcctccctgccctccgtggctgtgggtgtgagtgacggcgtcctggtggccggccggcccgtcaccttctacccgcacccgctgccctcgcctgggggtgttctttacacgtgggacttcggggacggctcccctgtcctgacccagagccagccggctgccaaccacacctatgcctcgaggggcacctaccacgtgcgcctggaggtcaacaacacggtgagcggtgcggcggcccaggcggatgtgcgcgtctttgaggagctccgcggactcagcgtggacatgagcctggccgtggagcagggcgcccccgtggtggtcagcgccgcggtgcagacgggcgacaacatcacgtggaccttcgacatgggggacggcaccgtgctgtcgggcccggaggcaacagtggagcatgtgtacctgcgggcacagaactgcacagtgaccgtgggtgcggccagccccgccggccacctggcccggagcctgcacgtgctggtcttcgtcctggaggtgctgcgcgttgaacccgccgcctgcatccccacgcagcctgacgcgcggctcacggcctacgtcaccgggaacccggcccactacctcttcgactggaccttcggggatggctcctccaacacgaccgtgcgggggtgcccgacggtgacacacaacttcacgcggagcggcacgttccccctggcgctggtgctgtccagccgcgtgaacagggcgcattacttcaccagcatctgcgtggagccagaggtgggcaacgtcaccctgcagccagagaggcagtttgtgcagctcggggacgaggcctggctggtggcatgtgcctggcccccgttcccctaccgctacacctgggactttggcaccgaggaagccgcccccacccgtgccaggggccctgaggtgacgttcatctaccgagacccaggctcctatcttgtgacagtcaccgcgtccaacaacatctctgctgccaatgactcagccctggtggaggtgcaggagcccgtgctggtcaccagcatcaaggtcaatggctcccttgggctggagctgcagcagccgtacctgttctctgctgtgggccgtgggcgccccgccagctacctgtgggatctgggggacggtgggtggctcgagggtccggaggtcacccacgcttacaacagcacaggtgacttcaccgttagggtggccggctggaatgaggtgagccgcagcgaggcctggctcaatgtgacggtgaagcggcgcgtgcgggggctcgtcgtcaatgcaagccgcacggtggtgcccctgaatgggagcgtgagcttcagcacgtcgctggaggccggcagtgatgtgcgctattcctgggtgctctgtgaccgctgcacgcccatccctgggggtcctaccatctcttacaccttccgctccgtgggcaccttcaatatcatcgtcacggctgagaacgaggtgggctccgcccaggacagcatcttcgtctatgtcctgcagctcatagaggggctgcaggtggtgggcggtggccgctacttccccaccaaccacacggtacagctgcaggccgtggttagggatggcaccaacgtctcctacagctggactgcctggagggacaggggcccggccctggccggcagcggcaaaggcttctcgctcaccgtgctcgaggccggcacctaccatgtgcagctgcgggccaccaacatgctgggcagcgcctgggccgactgcaccatggacttcgtggagcctgtggggtggctgatggtggccgcctccccgaacccagctgccgtcaacacaagcgtcaccctcagtgccgagctggctggtggcagtggtgtcgtatacacttggtccttggaggaggggctgagctgggagacctccgagccatttaccacccatagcttccccacacccggcctgcacttggtcaccatgacggcagggaacccgctgggctcagccaacgccaccgtggaagtggatgtgcaggtgcctgtgagtggcctcagcatcagggccagcgagcccggaggcagcttcgtggcggccgggtcctctgtgcccttttgggggcagctggccacgggcaccaatgtgagctggtgctgggctgtgcccggcggcagcagcaagcgtggccctcatgtcaccatggtcttcccggatgctggcaccttctccatccggctcaatgcctccaacgcagtcagctgggtctcagccacgtacaacctcacggcggaggagcccatcgtgggcctggtgctgtgggccagcagcaaggtggtggcgcccgggcagctggtccattttcagatcctgctggctgccggctcagctgtcaccttccgcctgcaggtcggcggggccaaccccgaggtgctccccgggccccgtttctcccacagcttcccccgcgtcggagaccacgtggtgagcgtgcggggcaaaaaccacgtgagctgggcccaggcgcaggtgcgcatcgtggtgctggaggccgtgagtgggctgcaggtgcccaactgctgcgagcctggcatcgccacgggcactgagaggaacttcacagcccgcgtgcagcgcggctctcgggtcgcctacgcctggtacttctcgctgcagaaggtccagggcgactcgctggtcatcctgtcgggccgcgacgtcacctacacgcccgtggccgcggggctgttggagatccaggtgcgcgccttcaacgccctgggcagtgagaaccgcacgctggtgctggaggttcaggacgccgtccagtatgtggccctgcagagcggcccctgcttcaccaaccgctcggcgcagtttgaggccgccaccagccccagcccccggcgtgtggcctaccactgggactttggggatgggtcgccagggcaggacacagatgagcccagggccgagcactcctacctgaggcctggggactaccgcgtgcaggtgaacgcctccaacctggtgagcttcttcgtggcgcaggccacggtgaccgtccaggtgctggcctgccgggagccggaggtggacgtggtcctgcccctgcaggtgctgatgcggcgatcacagcgcaactacttggaggcccacgttgacctgcgcgactgcgtcacctaccagactgagtaccgctgggaggtgtatcgcaccgccagctgccagcggccggggcgcccagcgcgtgtggccctgcccggcgtggacgtgagccggcctcggctggtgctgccgcggctggcgctgcctgtggggcactactgctttgtgtttgtcgtgtcatttggggacacgccactgacacagagcatccaggccaatgtgacggtggcccccgagcgcctggtgcccatcattgagggtggctcataccgcgtgtggtcagacacacgggacctggtgctggatgggagcgagtcctacgaccccaacctggaggacggcgaccagacgccgctcagtttccactgggcctgtgtggcttcgacacaggtcagtgcgtggcagggccgtcctccatgcccctcacccgtccacacccatgagcccagagaacacccagcttgccaccagggctggcccgtcctcagtgcctggtgggccccgtcccagcatggggagggggtctcccgcgctgtctcctgggccgggctctgctttaaaactggatggggctctcaggccacgtcgccccttgttctcggcctgcagagggaggctggcgggtgtgcgctgaactttgggccccgcgggagcagcacggtcaccattccacgggagcggctggcggctggcgtggagtacaccttcagcctgaccgtgtggaaggccggccgcaaggaggaggccaccaaccagacggtgggtgccgcccgcccctcggccacttgccttggacagcccagcctccctggtcatctactgttttccgtgttttagtgctggtggaggccgcacgctctcccctctctgtttctgatgcaaattctatgtaacacgacagcctgcttcagctttgcttccttccaaacctgccacagttccacgtacagtcttcaagccacatatgctctagtggcaaaagctacacagtcccctagcaataccaacagtgaggaagagccccttcccaccccagaggtagccactgtccccagcccatgtccctgttgctggatgtggtgggccggttctcaccctcacgctcccctctctggaccggccaggaggcttggtgaccctgagcccgtggtggctgctcctgctgctgtcaggcggggcctgctggtgccccagagtgggcgtctgttccccagtccctgctttcctcagctggcctgattgggggtcttcccagaggggtcgtctgaggggagggtgtgggagcaggttccatcccagctcagcctcctgacccaggccctggctaagggctgcaggagtctgtgagtcaggcctacgtggcagctgcggtcctcacacccacacatacgtctcttctcacacgcatccccccaggggccctcagtgagcattgcctgcctcctgctagggtccagctgggtccagtacaccagaacgcacactccagtgtcctctgccctgtgtatgcccttccgccgtccaagttggaaggtggcaaaccggatgagtatcctgggagggagtgagctcaccggcagtggccaggcccctgggaaacctggagtttgggagcagcatcctccatgggtcccccagtccttccagcaggccaaatagacctgtgttggaggtaaccccactcccacgccaggtgctgatccggagtggccgggtgcccattgtgtccttggagtgtgtgtcctgcaaggcacaggccgtgtacgaagtgagccgcagctcctacgtgtacttggagggccgctgcctcaattgcagcagcggctccaagcgaggggtgagtgttgagcggggtgtgggcgggctggggatgggtcccatggccgaggggacggggcctgcaggcagaagtggggctgacagggcagagggttgcgccccctcaccaccccttctgcctgcagcggtgggctgcacgtacgttcagcaacaagacgctggtgctggatgagaccaccacatccacgggcagtgcaggcatgcgactggtgctgcggcggggcgtgctgcgggacggcgagggatacaccttcacgctcacggtgctgggccgctctggcgaggaggagggctgcgcctccatccgcctgtcccccaaccgcccgccgctggggggctcttgccgcctcttcccactgggcgctgtgcacgccctcaccaccaaggtgcacttcgaatgcacgggtgagtgcaggcctgcgtggggggagcagcgggatcccccgactctgtgacgtcacggagccctcccgtgatgccgtggggaccgtccctcaggctggcatgacgcggaggatgctggcgccccgctggtgtacgccctgctgctgcggcgctgtcgccagggccactgcgaggagttctgtgtctacaagggcagcctctccagctacggagccgtgctgcccccgggtttcaggccacacttcgaggtgggcctggccgtggtggtgcaggaccagctgggagccgctgtggtcgccctcaacaggtgagccaggccgtgggagggcgcccccgagactgccacctgctcaccacccccctctgctcgtaggtctttggccatcaccctcccagagcccaacggcagcgcaacggggctcacagtctggctgcacgggctcaccgctagtgtgctcccagggctgctgcggcaggccgatccccagcacgtcatcgagtactcgttggccctggtcaccgtgctgaacgaggtgagtgcagcctgggaggggacgtcacatctgctgcatgcgtgcttgggaccaagacctgtacccctgcctggagctttgcagagggctcatcccgggccccagagataaatcccagtgaccctgaagcagcaccccgaccttccgctcccagcagccacacccaccgggccctctccggcgtctgctttccacaatgcagcccccgcccaggagggcccatgtgcttaccctgttttgcccatgaagaaacagctcagtgttgtgggtcagtgcccgcatcacacagcgtctagcacgtaactgcaccccgggagtcgtgggcatctgctggcctcctgccggcctcctgcgctgctgacagcttgctgtgccccctgcctgccccagtacgagcgggccctggacgtggcggcagagcccaagcacgagcggcagcaccgagcccagatacgcaagaacatcacggagactctggtgtccctgagggtccacactgtggatgacatccagcagatcgctgctgcgctggcccagtgcatggtaggatggccccacctgctcaccctgccccgcatgcctgccagggcactgggttcagccccccagggcagacgggcagcttggccgaggagctgagcctccagcctgggctccttcctgccatggcgttcctcggtctctgacctgcttcagtagcctcagccgttctgtcctgtgtgaacgcagggtgcctctcgggggacccagggtgtaaagaggggcccagatgtggggagggactaagaagatgctgctctgtgccctccactctcccctcccctcccctcccccttccctcccctagcccctcccctcctcccctcccctagcccttcccctcctcccctcccctagccctttcccttcttcccccccagcccttcccctcctcccctcccctttttctccactcccctctcctctctcccctcctcctccgctctcatgtgaagaggtgccttgtgtggtcggtgggctgcatcacgtggtccccaggtggaggccctgggtcatgcagagccacagaaaatgcttagtgaggaggctgtgggggtccagtcaagtgggctctccagctgcagggctgggggtgggagccaggtgaggacccgtgtagagaggagggcgtgtgcaaggagtggggccaggagcggggctggacactgctggctccacacaggggcccagcagggagctcgtatgccgctcgtgcctgaagcagacgctgcacaagctggaggccatgatgctcatcctgcaggcagagaccaccgcgggcaccgtgacgcccaccgccatcggagacagcatcctcaacatcacaggtgccgcggcccgtgccccatgccacccgcccgccccgtgcggccctttcctctgcctccctcctccccccaaccgcgtcgcctttgccccatcccatcttcgtccccctcccctccccccaattcccatcctcatccccctcccccaattcccattctcctccccctcccccttccctattaccatcccttttctccatctctctccccttttctccatttccccccccgtcctccccgtccttttgtccattcccctcatcttcctcatccccctcatcccccttcccctcccttatcccccttcccctccctttccccctgctcctcttcttctcccttctcttttctctacccttttccttcctttttcctccctctccccatcatccccctcatcttcgtcctcatccccatcaccttccccctcccccctccaccactctctctccagcttcccccttccttctgcctgcacctcgctctctgccccctcaggttccccctttctcccagcccccaccctccggctccccctttttgcctgcccccaccctccctctacctccctgtctctgcactgacctcacgcatgtctgcaggagacctcatccacctggccagctcggacgtgcgggcaccacagccctcagagctgggagccgagtcaccatctcggatggtggcgtcccaggcctacaacctgacc

SEQ ID NO: 13282 - DNA, 1976 bp, Homo sapiens
caggtggactctggtgccaacgccacggccacggctcgctggcctgggggcagtgtcagcgcccgctttgagaatgtctgccctgccctggtggccaccttcgtgcccggctgcccctgggagaccaacgataccctgttctcagtggtagcactgccgtggctcagtgagggggagcacgtggtggacgtggtggtggaaaacagcgccagccgggccaacctcagcctgcgggtgacggcggaggagcccatctgtggcctccgcgccacgcccagccccgaggcccgtgtactgcagggagtcctagtgaggtacagccccgtggtggaggccggctcggacatggtcttccggtggaccatcaacgacaagcagtccctgaccttccagaacgtggtcttcaatgtcatttatcagagcgcggcggtcttcaagctctcagacgctgccatggctgtggctgacggcctccaaccacgtgagcaacgtcaccgtgaactacaacgtaaccgtggagcggatgaacaggatgcagggtctgcaggtctccacagtgccggccgtgctgtcccccaatgccacgctagcactgacggcgggcgtgctggtggactcggccgtggaggtggccttcctgtggacctttggggatggggagcaggccctccaccagttccagcctccgtacaacgagtccttcccggttccagacccctcggtggcccaggtgctggtggagcacaatgtcatgcacacctacgctgccccaggtgctgatccggagtggccgggtgcccattgtgtccttggagtgtgtgtcctgcaaggcacaggccgtgtacgaagtgagccgcagctcctacgtgtacttggagggccgctgcctcaattgcagcagcggctccaagcgagggcggtgggctgcacgtacgttcagcaacaagacgctggtgctggatgagaccaccacatccacgggcagtgcaggcatgcgactggtgctgcggcggggcgtgctgcgggacggcgagggatacaccttcacgctcacggtgctgggccgctctggcgaggaggagggctgcgcctccatccgcctgtcccccaaccgcccgccgctggggggctcttgccgcctcttcccactgggcgctgtgcacgccctcaccaccaaggtgcacttcgaatgcacgggctggcatgacgcggaggatgctggcgccccgctggtgtacgccctgctgctgcggcgctgtcgccagggccactgcgaggagttctgtgtctacaagggcagcctctccagctacggagccgtgctgcccccgggtttcaggccacacttcgaggtgggcctggccgtggtggtgcaggaccagctgggagccgctgtggtcgccctcaacaggtctttggccatcaccctcccagagcccaacggcagcgcaacggggctcacagtctggctgcacgggctcaccgctagtgtgctcccagggctgctgcggcaggccgatccccagcacgtcatcgagtactcgttggccctggtcaccgtgctgaacgagtacgagcgggccctggacgtggcggcagagcccaagcacgagcggcagcaccgagcccagatacgcaagaacatcacggagactctggtgtccctgagggtccacactgtggatgacatccagcagatcgctgctgcgctggcccagtgcatggggcccagcagggagctcgtatgccgctcgtgcctgaagcagacgctgcacaagctggaggccatgatgctcatcctgcaggcagagaccaccgcgggcaccgtgacgcccaccgccatcggagacagcatcctcaacatcacaggagacctcatccacctggccagctcggacgtgcgggcaccacagccctcagagctgggagccgagtcaccatctcggatggtggcgtcccaggcctacaacctgacc

SEQ ID NO: 13283 - DNA, 2035 bp, Homo sapiens
gtggtacggggctgttggcgactctgcctacaggtgggtgccgtaggggtcggggcagcctcttcctgcccagcccttcctgcccctcagcctcacctgtgtggcctcctctcctccacacagcacggggcatgtgtccaggctgagcccgctgagcgtcgacacagtcgctgttggcctggtgtccagcgtggttgtctatcccgtctacctggccatcctttttctcttccggatgtcccggagcaaggtgggctggggctggggacccgggagtactgggaatggagcctgggcctcggcaccatgcctagggccgccactttccagtgctgcagccagagggaaaggcgtccaccaaaggctgctcgggaagggtcaacacacttgagcagccttagctagactgaccagggagaaagagagaagactcagaagccagaatggtgaaagaacgagggcactttgctaagcagacgccacggacgactgcacagcagcacgccagataactcagaagaagcaagcacgcggctgtgcacgcttccgaaatgcactccagaagaaaatctcagtacatctataggaagtgaagaggctgagttagtcccttagaaacgtcccagtggccgggccgggtgtggtggctcacgcctgtaatcccaacacttcaggtggccgaggtgggcggatctgagtccaggagtttgagaccagcctgggcaacatagcaagaccccatctatataaaacattaaaaagggccaggcgcggtggctcacgcctgtaatcccagcactttgggaggccgaggcgggcagatcacttgaggtcaggagttcgagaccagcctggccaacacaatgaaaccccgactctactacaaatacaaaaacttagctgggcatggtggcgggcgcctgtagtcccagctactcgagaggctgaggcaggagaatggcatgaacccaggaggcggagcttgcagtgagccgagattgcgccactgcactccatcctgggcaacggagcaagactccatctccaaaaaaaaaaaaaaaaaatcccacaaagaaaagctcaggctcagagccttcacgatagaatttttctaagcagttaaggaagaattaacaccaatccttcacagactctttccaagaatacagcaggtgggaacgcttcccattcatacggaaacgggaggccgcaccccttaggaatgcacacgtggggtcctcaagaggttacatgcaaactaaccccagcagcacacagagaaggcgcataagccgcgaccaggaggggttgctcccgagtccgtggcaggaaccagaggccacatgtggctgctcgtatttaagttaattaaaatggaacgatggccgggtgtggtggctcacacctgtaatcccagcactttgggaggcggaggcgggcagatcacttgaggtcaggagttccaagaccagcctggccaacacagtgaaaccccgtctctactaaaaatacaaaaaattagctgggcatggtggcaggcacctgtaatcccagctactcaggaggctgagccaggacaatcgcctgaacgcgggaggtggaggttgcagtgagctgagattgcgccattgcactccagcctgggtgacagcgagactccatctaaaaaagaaaatatgaaatttaaaactctgttccttagctgcaccagtctgctgtcaagtgttcagtggcacacgtcgcgaggggctgccatcacggacggtgcagatgtcccatatatccagcattctaggacattctgtcagatggcaccgggctctgtcctgtctgctgaggaggtggcttctcatccctgtcctgagcaggtctgagctgccgcccgctgaccactgccctcgtcctgcaggtggctgggagcccgagccccacacctgccgggcagcaggtgctggacatcgacagctgcctggactcgtccgtgctggacagctccttcctcacgttctcaggcctccacgctgaggtgaggact

SEQ ID NO: 13284 - DNA, 493 bp, Homo sapiens
gtggtacggggctgttggcgactctgcctacagcacggggcatgtgtccaggctgagcccgctgagcgtcgacacagtcgctgttggcctggtgtccagcgtggttgtctatcccgtctacctggccatcctttttctcttccggatgtcccggagcaagctgcaccagtctgctgtcaagtgttcagtggcacacgtcgcgaggggctgccatcacggacggtgcagatgtcccatatatccagcattctaggacattctgtcagatggcaccgggctctgtcctgtctgctgaggaggtggcttctcatccctgtcctgagcaggtctgagctgccgcccgctgaccactgccctcgtcctgcaggtggctgggagcccgagccccacacctgccgggcagcaggtgctggacatcgacagctgcctggactcgtccgtgctggacagctccttcctcacgttctcaggcctccacgctgaggtgaggact

SEQ ID NO: 13285 - DNA, 2702 bp, Homo sapiens
gccaccccgcacagcctgggtagcgtgtggaagatccgagtgtggcacgacaacaaaggtttgtgcggaccctgccaagctctgcccctctgcccccgcattggggcgccctgcgagcctgacctccctcctgcgcctctgcagggctcagccctgcctggttcctgcagcacgtcatcgtcagggacctgcagacggcacgcagcgccttcttcctggtcaatgactggctttcggtggagacggaggccaacgggggcctggtggagaaggaggtgctggccgcgagtaaggcctcgttccatgttcccactccgtgggaggttgggcagggtggtcctgccccgtggcctcctgcagtgcggccctccctgccttctaggcgacgcagcccttttgcgcttccggcgcctgctggtggctgagctgcagcgtggcttctttgacaagcacatctggctctccatatgggaccggccgcctcgtagccgtttcactcgcatccagagggccacctgctgcgttctcctcatctgcctcttcctgggcgccaacgccgtgtggtacggggctgttggcgactctgcctacaggtgggtgccgtaggggtcggggcagcctcttcctgcccagcccttcctgcccctcagcctcacctgtgtggcctcctctcctccacacagcacggggcatgtgtccaggctgagcccgctgagcgtcgacacagtcgctgttggcctggtgtccagcgtggttgtctatcccgtctacctggccatcctttttctcttccggatgtcccggagcaaggtgggctggggctggggacccgggagtactgggaatggagcctgggcctcggcaccatgcctagggccgccactttccagtgctgcagccagagggaaaggcgtccaccaaaggctgctcgggaagggtcaacacacttgagcagccttagctagactgaccagggagaaagagagaagactcagaagccagaatggtgaaagaacgagggcactttgctaagcagacgccacggacgactgcacagcagcacgccagataactcagaagaagcaagcacgcggctgtgcacgcttccgaaatgcactccagaagaaaatctcagtacatctataggaagtgaagaggctgagttagtcccttagaaacgtcccagtggccgggccgggtgtggtggctcacgcctgtaatcccaacacttcaggtggccgaggtgggcggatctgagtccaggagtttgagaccagcctgggcaacatagcaagaccccatctatataaaacattaaaaagggccaggcgcggtggctcacgcctgtaatcccagcactttgggaggccgaggcgggcagatcacttgaggtcaggagttcgagaccagcctggccaacacaatgaaaccccgactctactacaaatacaaaaacttagctgggcatggtggcgggcgcctgtagtcccagctactcgagaggctgaggcaggagaatggcatgaacccaggaggcggagcttgcagtgagccgagattgcgccactgcactccatcctgggcaacggagcaagactccatctccaaaaaaaaaaaaaaaaaatcccacaaagaaaagctcaggctcagagccttcacgatagaatttttctaagcagttaaggaagaattaacaccaatccttcacagactctttccaagaatacagcaggtgggaacgcttcccattcatacggaaacgggaggccgcaccccttaggaatgcacacgtggggtcctcaagaggttacatgcaaactaaccccagcagcacacagagaaggcgcataagccgcgaccaggaggggttgctcccgagtccgtggcaggaaccagaggccacatgtggctgctcgtatttaagttaattaaaatggaacgatggccgggtgtggtggctcacacctgtaatcccagcactttgggaggcggaggcgggcagatcacttgaggtcaggagttccaagaccagcctggccaacacagtgaaaccccgtctctactaaaaatacaaaaaattagctgggcatggtggcaggcacctgtaatcccagctactcaggaggctgagccaggacaatcgcctgaacgcgggaggtggaggttgcagtgagctgagattgcgccattgcactccagcctgggtgacagcgagactccatctaaaaaagaaaatatgaaatttaaaactctgttccttagctgcaccagtctgctgtcaagtgttcagtggcacacgtcgcgaggggctgccatcacggacggtgcagatgtcccatatatccagcattctaggacattctgtcagatggcaccgggctctgtcctgtctgctgaggaggtggcttctcatccctgtcctgagcaggtctgagctgccgcccgctgaccactgccctcgtcctgcaggtggctgggagcccgagccccacacctgccgggcagcaggtgctggacatcgacagctgcctggactcgtccgtgctggacagctccttcctcacgttctcaggcctccacgctgaggtgaggactctactgggggtcctgggctgggctgggggtcctgccgccttggcgcagcttggactcaagacactgtgcacctctcagcaggcctttgttggacagatgaagagtga

SEQ ID NO: 13286 - DNA, 559 bp, Homo sapiens
gccaccccgcacagcctgggtagcgtgtggaagatccgagtgtggcacgacaacaaagggctcagccctgcctggttcctgcagcacgtcatcgtcagggacctgcagacggcacgcagcgccttcttcctggtcaatgactggctttcggtggagacggaggccaacgggggcctggtggagaaggaggtgctggccgcgagcgacgcagcccttttgcgcttccggcgcctgctggtggctgagctgcagcgtggcttctttgacaagcacatctggctctccatatgggaccggccgcctcgtagccgtttcactcgcatccagagggccacctgctgcgttctcctcatctgcctcttcctgggcgccaacgccgtgtggtacggggctgttggcgactctgcctacaggtggctgggagcccgagccccacacctgccgggcagcaggtgctggacatcgacagctgcctggactcgtccgtgctggacagctccttcctcacgttctcaggcctccacgctgagcaggcctttgttggacagatgaagagtga

SEQ ID NO: 13287 - DNA, 866 bp, Homo sapiens
tttgcctttagtccagccagaccctaggggacatgtggacatgtgtagatacctttgtggctgctagaactggaggtaggtgctgctggcatcagtaggcagaggggagggacacaggtccgtgtcttgcagtgcacaggacgggcccatgacagacaactgtctgccccagaacatccccaggataaggctgagaagcccaggtctagccgtggccagcagggcagtgggagccatgttccctgggtctctggtggccgctcactcgaggcgggcatggggcagtaggggctggagcgtgtgactgatgctgtggcaggtctgaggagctctggccatggatggcccacgtgctgctgccctacgtccacgggaaccagtccagcccagagctggggcccccacggctgcggcaggtgcggctgcaggaaggtgagctggcagggcgtgccccaagacttaaatcgttcctcttgttgagagagcagcctttagcggagctctggcatcagccctgctccctagctgtgtgacctttgccctcttaacaccgccgtttccttctctgtatatgagagatggtaacgttgtctaattgatggctgctgggagggttccctggggtggcgccgaaccagagctcaggcgagctggccagcaggaaacactcctgttgggttttgatgaggccctggccccggcctggggctctgtgtgtttcagcactctacccagaccctcccggccccagggtccacacgtgctcggccgcaggaggcttcagcaccagcgattacgacgttggctgggagagtcctcacaatggctcggggacgtgggcctattcagcgccggatctgctgggg

SEQ ID NO: 13288 - DNA, 575 bp, Homo sapiens
tttgcctttagtccagccagaccctaggggacatgtggacatgtgtagatacctttgtggctgctagaactggaggtaggtgctgctggcatcagtaggcagaggggagggacacaggtccgtgtcttgcagtgcacaggacgggcccatgacagacaactgtctgccccagaacatccccaggataaggctgagaagcccaggtctagccgtggccagcagggcagtgggagccatgttccctgggtctctggtggccgctcactcgaggcgggcatggggcagtaggggctggagcgtgtgactgatgctgtggcaggtctgaggagctctggccatggatggcccacgtgctgctgccctacgtccacgggaaccagtccagcccagagctggggcccccacggctgcggcaggtgcggctgcaggaagcactctacccagaccctcccggccccagggtccacacgtgctcggccgcaggaggcttcagcaccagcgattacgacgttggctgggagagtcctcacaatggctcggggacgtgggcctattcagcgccggatctgctgggg

SEQ ID NO: 13289 - DNA, 7671 bp, Homo sapiens
cggagactctggtgtccctgagggtccacactgtggatgacatccagcagatcgctgctgcgctggcccagtgcatggtaggatggccccacctgctcaccctgccccgcatgcctgccagggcactgggttcagccccccagggcagacgggcagcttggccgaggagctgagcctccagcctgggctccttcctgccatggcgttcctcggtctctgacctgcttcagtagcctcagccgttctgtcctgtgtgaacgcagggtgcctctcgggggacccagggtgtaaagaggggcccagatgtggggagggactaagaagatgctgctctgtgccctccactctcccctcccctcccctcccccttccctcccctagcccctcccctcctcccctcccctagcccttcccctcctcccctcccctagccctttcccttcttcccccccagcccttcccctcctcccctcccctttttctccactcccctctcctctctcccctcctcctccgctctcatgtgaagaggtgccttgtgtggtcggtgggctgcatcacgtggtccccaggtggaggccctgggtcatgcagagccacagaaaatgcttagtgaggaggctgtgggggtccagtcaagtgggctctccagctgcagggctgggggtgggagccaggtgaggacccgtgtagagaggagggcgtgtgcaaggagtggggccaggagcggggctggacactgctggctccacacaggggcccagcagggagctcgtatgccgctcgtgcctgaagcagacgctgcacaagctggaggccatgatgctcatcctgcaggcagagaccaccgcgggcaccgtgacgcccaccgccatcggagacagcatcctcaacatcacaggtgccgcggcccgtgccccatgccacccgcccgccccgtgcggccctttcctctgcctccctcctccccccaaccgcgtcgcctttgccccatcccatcttcgtccccctcccctccccccaattcccatcctcatccccctcccccaattcccattctcctccccctcccccttccctattaccatcccttttctccatctctctccccttttctccatttccccccccgtcctccccgtccttttgtccattcccctcatcttcctcatccccctcatcccccttcccctcccttatcccccttcccctccctttccccctgctcctcttcttctcccttctcttttctctacccttttccttcctttttcctccctctccccatcatccccctcatcttcgtcctcatccccatcaccttccccctcccccctccaccactctctctccagcttcccccttccttctgcctgcacctcgctctctgccccctcaggttccccctttctcccagcccccaccctccggctccccctttttgcctgcccccaccctccctctacctccctgtctctgcactgacctcacgcatgtctgcaggagacctcatccacctggccagctcggacgtgcgggcaccacagccctcagagctgggagccgagtcaccatctcggatggtggcgtcccaggcctacaacctgacctctgccctcatgcgcatcctcatgcgctcccgcgtgctcaacgaggagcccctgacgctggcgggcgaggagatcgtggcccagggcaagcgctcggacccgcggagcctgctgtgctatggcggcgccccagggcctggctgccacttctccatccccgaggctttcagcggggccctggccaacctcagtgacgtggtgcagctcatctttctggtggactccaatccctttccctttggctatatcagcaactacaccgtctccaccaaggtggcctcgatggcattccagacacaggccggcgcccagatccccatcgagcggctggcctcagagcgcgccatcaccgtgaaggtgcccaacaactcggactgggctgcccggggccaccgcagctccgccaactccgccaactccgttgtggtccagccccaggcctccgtcggtgctgtggtcaccctggacagcagcaaccctgcggccgggctgcatctgcagctcaactatacgctgctggacggtgcgtgcagcgggtggggcacacgcggccccctggccttgttcttggggggaaggcgtttctcgtagggcttccatgggtgtctctggtgaaatttgctttctgtttcatgggctgctgggggcctggccagagaggagctgggggccacggagaagcaggtgccagctctggtgcagaggctcctatggcctttcaggcccgtggcagagggtgggctcaggagggccatcgtgggtgtcccccgggtggttgagcttcccggcaggcgtgtgacctgcgcgttctgccccaggccactacctgtctgaggaacctgagccctacctggcagtctacctacactcggagccccggcccaatgagcacaactgctcggctagcaggaggatccgcccagagtcactccagggtgctgaccaccggccctacaccttcttcatttccccggggtgagctctgcgggccagcctggcagggcagggcagggcatcatgggtcagcattgcctgggttactggccccatggggacggcaggcagcgaggggactggaccgggtatgggctctgagactgcgacatccaacctggcggagcctgggctcacgtccgctaccccttccctgcccaggagcagagacccagcggggagttaccatctgaacctctccagccacttccgctggtcggcgctgcaggtgtccgtgggcctgtacacgtccctgtgccagtacttcagcgaggaggacatggtgtggcggacagaggggctgctgcccctggaggagacctcgccccgccaggccgtctgcctcacccgccacctcaccgccttcggcgccagcctcttcgtgcccccaagccatgtccgctttgtgtttcctgtgagtgaccctgtgctcctgggagcctctgcagagtcgaggagggcctgggtgggctcggctctatcctgagaaggcacagcttgcacgtgacctcctgggcccggcggctgtgtcctcacaggagccgacagcggatgtaaactacatcgtcatgctgacatgtgctgtgtgcctggtgacctacatggtcatggccgccatcctgcacaagctggaccagttggatgccagccggggccgcgccatccctttctgtgggcagcggggccgcttcaagtacgagatcctcgtcaagacaggctggggccggggctcaggtgaggggcgcagcggggtggcagggcctcccctgctctcactggctgtgctggttgcaccctctgggagtgagtctcgtcgcaggcgtcagaacaaggcagtttttgcagtgctgtgtgaagggctcgtgtgttcatcctgggaatgacctcgtgagcactcactgtccctgaggactaggacagctcctagctggaagtaggtgccagtcagtcagggtgggcagcccacgttctgcacagtagcgtggccccacaagtgacgtgagcatcgctaccactgtgggagactgtgcatccacccgcgatcctgactgcatagctcgtctctcagacggaggcgccagcaccctccccgtggctgtttcttcagtacctccattttcctttcattggaattgcccttctggcattccctttttgttttcgtttttctttttttagagacggagtctcactctgttgcccaggctggagtgcaatggcatgatcttggctcacagcaacttccagctcccgggtttaagccattccccttaagcgattctcctgagtagctgggagtacaggtgcacaccaccacacccagttaatttttcaccatgtcagccaggcgaactcctgacctcaggtgatccgcctgcctcggcctgccagagtgctgggatgacaggtgtgagccaccacacctggctgtgttcccattttttatctctgtgctgctttcctcttcattgcccagttctttcttttgattacctacttttaaaaactgtcggccgggcgcggtggctcacacctgtaatccgagcactttgggaggccaggcaggcaaatcacggggtcaggagatcgagaccatcctggctaacggtgaaaccctgtctctaataaaaagtacaaaaaaattagcccggcgtagtggcaggcgcctgtagtcccagctccttgggagactgaggcaggagaatggcgtgaacccgggaggcggagcttgcagtgagctgagattgcgccactgcactccagcctgggtgacacagcaagactccatctcaaaaaaaaaagaaaaaaaatactgtcacctgggtctgtcactgggagaggaggtgacacagcttcacgctttgcagtctgtgcatgaactgagggacgggtgtgtggtgcgggtcaccggttgtggcatgactgaggcgtggacaggtgtgcagtgcgggtcactggttgtggtgtggactgaggcgtgtgcagccatgtttgcatgtcacaagttacagttctttccatgtaacttaatcatgtccttgaggtcctgctgttaattggacaaattgcagtaaccgcagctccttgtgtatggcagagccgtgcaaagccgggactgcctgtgtggctccttgagtgcgcacaggccaaagctgagatgacttgcctgggatgccacacgtgttgggcagcagaccgagcctcccacccctccctcttgcctcccaggtaccacggcccacgtgggcatcatgctgtatggggtggacagccggagcggccaccggcacctggacggcgacagagccttccaccgcaacagcctggacatcttccggatcgccaccccgcacagcctgggtagcgtgtggaagatccgagtgtggcacgacaacaaaggtttgtgcggaccctgccaagctctgcccctctgcccccgcattggggcgccctgcgagcctgacctccctcctgcgcctctgcagggctcagccctgcctggttcctgcagcacgtcatcgtcagggacctgcagacggcacgcagcgccttcttcctggtcaatgactggctttcggtggagacggaggccaacgggggcctggtggagaaggaggtgctggccgcgagtaaggcctcgttccatgttcccactccgtgggaggttgggcagggtggtcctgccccgtggcctcctgcagtgcggccctccctgccttctaggcgacgcagcccttttgcgcttccggcgcctgctggtggctgagctgcagcgtggcttctttgacaagcacatctggctctccatatgggaccggccgcctcgtagccgtttcactcgcatccagagggccacctgctgcgttctcctcatctgcctcttcctgggcgccaacgccgtgtggtacggggctgttggcgactctgcctacaggtgggtgccgtaggggtcggggcagcctcttcctgcccagcccttcctgcccctcagcctcacctgtgtggcctcctctcctccacacagcacggggcatgtgtccaggctgagcccgctgagcgtcgacacagtcgctgttggcctggtgtccagcgtggttgtctatcccgtctacctggccatcctttttctcttccggatgtcccggagcaaggtgggctggggctggggacccgggagtactgggaatggagcctgggcctcggcaccatgcctagggccgccactttccagtgctgcagccagagggaaaggcgtccaccaaaggctgctcgggaagggtcaacacacttgagcagccttagctagactgaccagggagaaagagagaagactcagaagccagaatggtgaaagaacgagggcactttgctaagcagacgccacggacgactgcacagcagcacgccagataactcagaagaagcaagcacgcggctgtgcacgcttccgaaatgcactccagaagaaaatctcagtacatctataggaagtgaagaggctgagttagtcccttagaaacgtcccagtggccgggccgggtgtggtggctcacgcctgtaatcccaacacttcaggtggccgaggtgggcggatctgagtccaggagtttgagaccagcctgggcaacatagcaagaccccatctatataaaacattaaaaagggccaggcgcggtggctcacgcctgtaatcccagcactttgggaggccgaggcgggcagatcacttgaggtcaggagttcgagaccagcctggccaacacaatgaaaccccgactctactacaaatacaaaaacttagctgggcatggtggcgggcgcctgtagtcccagctactcgagaggctgaggcaggagaatggcatgaacccaggaggcggagcttgcagtgagccgagattgcgccactgcactccatcctgggcaacggagcaagactccatctccaaaaaaaaaaaaaaaaaatcccacaaagaaaagctcaggctcagagccttcacgatagaatttttctaagcagttaaggaagaattaacaccaatccttcacagactctttccaagaatacagcaggtgggaacgcttcccattcatacggaaacgggaggccgcaccccttaggaatgcacacgtggggtcctcaagaggttacatgcaaactaaccccagcagcacacagagaaggcgcataagccgcgaccaggaggggttgctcccgagtccgtggcaggaaccagaggccacatgtggctgctcgtatttaagttaattaaaatggaacgatggccgggtgtggtggctcacacctgtaatcccagcactttgggaggcggaggcgggcagatcacttgaggtcaggagttccaagaccagcctggccaacacagtgaaaccccgtctctactaaaaatacaaaaaattagctgggcatggtggcaggcacctgtaatcccagctactcaggaggctgagccaggacaatcgcctgaacgcgggaggtggaggttgcagtgagctgagattgcgccattgcactccagcctgggtgacagcgagactccatctaaaaaagaaaatatgaaatttaaaactctgttccttagctgcaccagtctgctgtcaagtgttcagtggcacacgtcgcgaggggctgccatcacggacggtgcagatgtcccatatatccagcattctaggacattctgtcagatggcaccgggctctgtcctgtctgctgaggaggtggcttctcatccctgtcctgagcaggtctgagctgccgcccgctgaccactgccctcgtcctgcaggtggctgggagcccgagccccacacctgccgggcagcaggtgctggacatcgacagctgcctggactcgtccgtgctggacagctccttcctcacgttctcaggcctccacgctgaggtgaggactctactgggggtcctgggctgggctgggggtcctgccgccttggcgcagcttggactcaagacactgtgcacctctcagcaggcctttgttggacagatgaagagtgacttgtttctggatgattctaagag

SEQ ID NO: 13290 - DNA, 1822 bp, Homo sapiens
cggagactctggtgtccctgagggtccacactgtggatgacatccagcagatcgctgctgcgctggcccagtgcatggggcccagcagggagctcgtatgccgctcgtgcctgaagcagacgctgcacaagctggaggccatgatgctcatcctgcaggcagagaccaccgcgggcaccgtgacgcccaccgccatcggagacagcatcctcaacatcacaggagacctcatccacctggccagctcggacgtgcgggcaccacagccctcagagctgggagccgagtcaccatctcggatggtggcgtcccaggcctacaacctgacctctgccctcatgcgcatcctcatgcgctcccgcgtgctcaacgaggagcccctgacgctggcgggccactacctgtctgaggaacctgagccctacctggcagtctacctacactcggagccccggcccaatgagcacaactgctcggctagcaggaggatccgcccagagtcactccagggtgctgaccaccggccctacaccttcttcatttccccggggagcagagacccagcggggagttaccatctgaacctctccagccacttccgctggtcggcgctgcaggtgtccgtgggcctgtacacgtccctgtgccagtacttcagcgaggaggacatggtgtggcggacagaggggctgctgcccctggaggagacctcgccccgccaggccgtctgcctcacccgccacctcaccgccttcggcgccagcctcttcgtgcccccaagccatgtccgctttgtgtttcctgagccgacagcggatgtaaactacatcgtcatgctgacatgtgctgtgtgcctggtgacctacatggtcatggccgccatcctgcacaagctggaccagttggatgccagccggggccgcgccatccctttctgtgggcagcggggccgcttcaagtacgagatcctcgtcaagacaggctggggccggggctcaggtaccacggcccacgtgggcatcatgctgtatggggtggacagccggagcggccaccggcacctggacggcgacagagccttccaccgcaacagcctggacatcttccggatcgccaccccgcacagcctgggtagcgtgtggaagatccgagtgtggcacgacaacaaagggctcagccctgcctggttcctgcagcacgtcatcgtcagggacctgcagacggcacgcagcgccttcttcctggtcaatgactggctttcggtggagacggaggccaacgggggcctggtggagaaggaggtgctggccgcgagcgacgcagcccttttgcgcttccggcgcctgctggtggctgagctgcagcgtggcttctttgacaagcacatctggctctccatatgggaccggccgcctcgtagccgtttcactcgcatccagagggccacctgctgcgttctcctcatctgcctcttcctgggcgccaacgccgtgtggtacggggctgttggcgactctgcctacagcacggggcatgtgtccaggctgagcccgctgagcgtcgacacagtcgctgttggcctggtgtccagcgtggttgtctatcccgtctacctggccatcctttttctcttccggatgtcccggagcaaggtggctgggagcccgagccccacacctgccgggcagcaggtgctggacatcgacagctgcctggactcgtccgtgctggacagctccttcctcacgttctcaggcctccacgctgagcaggcctttgttggacagatgaagagtgacttgtttctggatgattctaagag

SEQ ID NO: 13291 - DNA, 11457 bp, Homo sapiens
ctgctggggacagacgtgcaggtggaagcggcacctgccgccctggagctcgtgtgcccgtcctcggtgcagagtgacgagagcctcgacctcagcatccagaaccgcggtggttcaggcctggaggccgcctacagcatcgtggccctgggcgaggagccggcccgaggtgagtgtctgctgcccactccccttcctccccagggccatccagatggggcagagcctggtacccccgtcttgggcccacactgaccgttgacaccctcgttcccaccggtctccagcggtgcacccgctctgcccctcggacacggagatcttccctggcaacgggcactgctaccgcctggtggtggagaaggcggcctggctgcaggcgcaggagcagtgtcaggcctgggccggggccgccctggcaatggtggacagtcccgccgtgcagcgcttcctggtctcccgggtcaccaggtgcctgcccccaccccccgaggggccataggttgggagatctctgaagcactggggcagagcctgcggctggggagtctcaggaggaaggaggtgggagctgggccggccctggtgagcaggtggcgccggccggtggggccgttcctgtcagctctgcagatgcagaggtggacatgagctgggggcagcctccggacactcctgggcacgccatacgggaggtggcctgcacggggatccctgccggtacccacaggccccgtgggtgggtgctgctgtgagcctgggctggtgggccctggtctccgggctctgagcctcagtttccccatctggaaagggggacagtgatggggctcccagcgggctgctgtgagggtgggaggatggaggagtgccctgagccccctgccatcccacacccgcccccaggagcctagacgtgtggatcggcttctcgactgtgcagggggtggaggtgggcccagcgccgcagggcgaggccttcagcctggagagctgccagaactggctgcccggggagccacacccagccacagccgagcactgcgtccggctcgggcccaccgggtggtgtaacaccgacctgtgctcagcgccgcacagctacgtctgcgagctgcagcccggaggtgtgcggggggccaggcaggggcctgagacgctggctgtggttaggggcctgccgagcgcccgcggtggagcctgggctgaggaggaggggctggtgggggggttttcgggcggctcggtccccagtctgttcgtcctggtgtcctgggccctggcccggcgcctcactgtgcactcgccaccccaggcccagtgcaggatgccgagaacctcctcgtgggagcgcccagtggggacctgcagggacccctgacgcctctggcacagcaggacggcctctcagccccgcacgagcccgtggaggtagtcggccccccacgttctacaacctgccctcctgcctgcccctggaggccttgcctgccctgcccactgtgggtctcgccaaaaaacttgggggccttaatgttgcttgtgcccagtgaagatggttgggaaaatccagagtgcagagaggaaagcgtttactcacattacctccaggccttttctctgagcgtgtgtgagttattcctgaaaggcaggtcaggggtcctgccccccatggacagtttccaccggagtcttcctctcgagcgacaggagccaggcctgtgggggtctgatggctcgctctccttccctcccctcttcctgggaagttcgggtagggggagtctgggcttcaggctgggatggggtctgtggagctgaggcggccccctgcccaccaggtcatggtattcccgggcctgcgtctgagccgtgaagccttcctcaccacggccgaatttgggacccaggagctccggcggcccgcccagctgcggctgcaggtgtaccggctcctcagcacagcaggtgggactctgggtggtgggtggtgggtggtgggcgccgcaggactcggggtggcctctctgagctttcacgtctgctggtcctgtggccaccagagtggttcccagtcttaggtggacagagcaggggttccagagacaccagctcattccaggtgtcctgggggtggattgggtggggcctgcctgggggccggcctgggtcagtcggctggccggagacggacgcagcactgggctgggagtgctgcccaggtggggagacctgtcctcacagcaaggccaggattgctggtgcaggcagttgggcatctctgacggtggcctgtgggcaaatcagggccccaacaccctcccctcctcacagggaccccggagaacggcagcgagcctgagagcaggtccccggacaacaggacccagctggcccccgcgtgcatgccagggggacgctggtgccctggagccaacatctgcttgccgctggacgcctcctgccacccccaggcctgcgccaatggctgcacgtcagggccagggctacccggggccccctatgcgctatggagagagttcctcttctccgttcccgcggggccccccgcgcagtactcggtgtgtggccctgacctgggtctgttccctgcatctcctcaggccaccttcctgtctgctgcccagggtctgggtctgtgcaccagacacacccagcctgcaggcccctcccacgtccttgccacctctgacctccgacctctgcagtgccctcggccctctcccagtgggagaagctctcgcctgggcccttggcacgagctgtgcctcctcttcctctctcccagcacagctgctccttcctgtctgccaggtcttggcctgtgtcctctccccgtgtgtcccccggtctgcaactgtcctgcctgtccttgtcacgagcactgtggggaggctccttgaggtgtggctgacgaagcggggagccctgcgtgtccaccctcatccgtcgtgcgggggtccacgggccatgaccgtgaggacgtgatgcagccctgcctccctctccacaggtcaccctccacggccaggatgtcctcatgctccctggtgacctcgttggcttgcagcacgacgctggccctggcgccctcctgcactgctcgccggctcccggccaccctggtccccgggccccgtacctctccgccaacgcctcgtcatggctgccccacttgccagcccagctggagggcacttgggcctgccctgcctgtgccctgcggctgcttgcagccacggaacagctcaccgtgctgctgggcttgaggcccaaccctggactgcggctgcctgggcgctatgaggtccgggcagaggtgggcaatggcgtgtccaggcacaacctctcctgcagctttgacgtggtctccccagtggctgggctgcgggtcatctaccctgccccccgcgacggccgcctctacgtgcccaccaacggctcagccttggtgctccaggtggactctggtgccaacgccacggccacggctcgctggcctgggggcagtgtcagcgcccgctttgagaatgtctgccctgccctggtggccaccttcgtgcccggctgcccctgggagaccaacgataccctgttctcagtggtagcactgccgtggctcagtgagggggagcacgtggtggacgtggtggtggaaaacagcgccagccgggccaacctcagcctgcgggtgacggcggaggagcccatctgtggcctccgcgccacgcccagccccgaggcccgtgtactgcagggagtcctagtggtgagtatggccgaggctccaccaccagcccccaggcaggtgcctgcagacagggtgctcacacagggcgtgaggcctggcttcccagtgagggcagcagcccagttactggggacgtcggccccgggcaggtcctgctggctggctcctcgggctacctggtgggctttaaattcctggaaagtcacggctctgacagtggctccgctaactcattccactgtctcatttcacaaaatgaatttaaaactctgctccctgacctcacacgagcccccgtgagtctctcacgccctctgctgtgttctcgcctggctaaagcgagtggcttttgaggtggagtctgaacccctgatgggaaactgcgggctgcccgcggtgccaccatgctgggtacatgggggacagggctgtctccatcttgcgggtacctgcctcttcaccaggggccttgggaggggccatcagaaatggcgtgacctgtgcagcctgtcctgggttctgtaagccagtgtaggtgcctcccctcactgctccgagctctctgggtgaggagctggggcaagagcgccgggagggtctgagaagactcagagagaggtggactctttgtagctggtactaggtttgctttacagatggggaaactgaggcacagagaggttgaggcattagtagtactacatggctggctggagagccggacagtgagtgtcccagcccgggcttggctcccatggcatgcagagccccgggcacctcctctcctctgtgccccgcgtgggactctccagcccgacgggaggtgtgtccaggaggcgacaggctaagggcagagtcctccacagagcccaggctgacaccattccccccgcagaggtacagccccgtggtggaggccggctcggacatggtcttccggtggaccatcaacgacaagcagtccctgaccttccagaacgtggtcttcaatgtcatttatcagagcgcggcggtcttcaagctctcagtaggtgggcgggggtggggaggggaggggatggggcggggcagggcgggggcgggctccaccttcacctctgccttctgctctgcttcatgctgcccgaggacgctgccatggctgtgggtgagtggagggagggacgccaatcagggccaggcctctcacctgccacctgggctcactgacgcctgtccctgcagctgacggcctccaaccacgtgagcaacgtcaccgtgaactacaacgtaaccgtggagcggatgaacaggatgcagggtctgcaggtctccacagtgccggccgtgctgtcccccaatgccacgctagcactgacggcgggcgtgctggtggactcggccgtggaggtggccttcctgtgagtgactcgggggccggtttggggtgggcaccaggctcttgtcccagccccagcctcagccgagggacccccacatcacggggttgcttttctgagcctcggtttccctgtctgttgggaggtaactgggtgcacaggagccctgaggctgcacgggagccgggagaggcctcagcacagccgggtgggccctgaatggaggcccggggcgtgactgcagagtggagcctcggctgggtcccaagcaccccctgccccgccaccgcccacccctgtcccggttcactcactgcgtcccaccgccccggcaggtggacctttggggatggggagcaggccctccaccagttccagcctccgtacaacgagtccttcccggttccagacccctcggtggcccaggtgctggtggagcacaatgtcatgcacacctacgctgccccaggtgagggatgagggggtgagggggccactgcctttcaggctctgagcacggggtccccccagctccccagtcaagctgccccccttcctccccaacagccctcactgtgacctcacctgggctgatggcttaggcccctactggggtgagggaggggccaggcgtggggggagtggacagggaagctgggcccctgaactgcgccccccgccctccccgggcctggctcttgctgctctgctgccccgagtgcagctgcacttggaggcggtgccgtcctcgccaggcagccctcagtgctgctacacctgtgctccgtcccgcacgtggcttgggagcctgggacccttaaggctgggccgcaggtgcagccgttcaccccgggctcctcaggcggggggcttctgccgagcgggtggggagcaggtgggggtgccgcggctgccccactcgggcctgtccccacaggtgagtacctcctgaccgtgctggcatctaatgccttcgagaacctgacgcagcaggtgcctgtgagcgtgcgcgcctccctgccctccgtggctgtgggtgtgagtgacggcgtcctggtggccggccggcccgtcaccttctacccgcacccgctgccctcgcctgggggtgttctttacacgtgggacttcggggacggctcccctgtcctgacccagagccagccggctgccaaccacacctatgcctcgaggggcacctaccacgtgcgcctggaggtcaacaacacggtgagcggtgcggcggcccaggcggatgtgcgcgtctttgaggagctccgcggactcagcgtggacatgagcctggccgtggagcagggcgcccccgtggtggtcagcgccgcggtgcagacgggcgacaacatcacgtggaccttcgacatgggggacggcaccgtgctgtcgggcccggaggcaacagtggagcatgtgtacctgcgggcacagaactgcacagtgaccgtgggtgcggccagccccgccggccacctggcccggagcctgcacgtgctggtcttcgtcctggaggtgctgcgcgttgaacccgccgcctgcatccccacgcagcctgacgcgcggctcacggcctacgtcaccgggaacccggcccactacctcttcgactggaccttcggggatggctcctccaacacgaccgtgcgggggtgcccgacggtgacacacaacttcacgcggagcggcacgttccccctggcgctggtgctgtccagccgcgtgaacagggcgcattacttcaccagcatctgcgtggagccagaggtgggcaacgtcaccctgcagccagagaggcagtttgtgcagctcggggacgaggcctggctggtggcatgtgcctggcccccgttcccctaccgctacacctgggactttggcaccgaggaagccgcccccacccgtgccaggggccctgaggtgacgttcatctaccgagacccaggctcctatcttgtgacagtcaccgcgtccaacaacatctctgctgccaatgactcagccctggtggaggtgcaggagcccgtgctggtcaccagcatcaaggtcaatggctcccttgggctggagctgcagcagccgtacctgttctctgctgtgggccgtgggcgccccgccagctacctgtgggatctgggggacggtgggtggctcgagggtccggaggtcacccacgcttacaacagcacaggtgacttcaccgttagggtggccggctggaatgaggtgagccgcagcgaggcctggctcaatgtgacggtgaagcggcgcgtgcgggggctcgtcgtcaatgcaagccgcacggtggtgcccctgaatgggagcgtgagcttcagcacgtcgctggaggccggcagtgatgtgcgctattcctgggtgctctgtgaccgctgcacgcccatccctgggggtcctaccatctcttacaccttccgctccgtgggcaccttcaatatcatcgtcacggctgagaacgaggtgggctccgcccaggacagcatcttcgtctatgtcctgcagctcatagaggggctgcaggtggtgggcggtggccgctacttccccaccaaccacacggtacagctgcaggccgtggttagggatggcaccaacgtctcctacagctggactgcctggagggacaggggcccggccctggccggcagcggcaaaggcttctcgctcaccgtgctcgaggccggcacctaccatgtgcagctgcgggccaccaacatgctgggcagcgcctgggccgactgcaccatggacttcgtggagcctgtggggtggctgatggtggccgcctccccgaacccagctgccgtcaacacaagcgtcaccctcagtgccgagctggctggtggcagtggtgtcgtatacacttggtccttggaggaggggctgagctgggagacctccgagccatttaccacccatagcttccccacacccggcctgcacttggtcaccatgacggcagggaacccgctgggctcagccaacgccaccgtggaagtggatgtgcaggtgcctgtgagtggcctcagcatcagggccagcgagcccggaggcagcttcgtggcggccgggtcctctgtgcccttttgggggcagctggccacgggcaccaatgtgagctggtgctgggctgtgcccggcggcagcagcaagcgtggccctcatgtcaccatggtcttcccggatgctggcaccttctccatccggctcaatgcctccaacgcagtcagctgggtctcagccacgtacaacctcacggcggaggagcccatcgtgggcctggtgctgtgggccagcagcaaggtggtggcgcccgggcagctggtccattttcagatcctgctggctgccggctcagctgtcaccttccgcctgcaggtcggcggggccaaccccgaggtgctccccgggccccgtttctcccacagcttcccccgcgtcggagaccacgtggtgagcgtgcggggcaaaaaccacgtgagctgggcccaggcgcaggtgcgcatcgtggtgctggaggccgtgagtgggctgcaggtgcccaactgctgcgagcctggcatcgccacgggcactgagaggaacttcacagcccgcgtgcagcgcggctctcgggtcgcctacgcctggtacttctcgctgcagaaggtccagggcgactcgctggtcatcctgtcgggccgcgacgtcacctacacgcccgtggccgcggggctgttggagatccaggtgcgcgccttcaacgccctgggcagtgagaaccgcacgctggtgctggaggttcaggacgccgtccagtatgtggccctgcagagcggcccctgcttcaccaaccgctcggcgcagtttgaggccgccaccagccccagcccccggcgtgtggcctaccactgggactttggggatgggtcgccagggcaggacacagatgagcccagggccgagcactcctacctgaggcctggggactaccgcgtgcaggtgaacgcctccaacctggtgagcttcttcgtggcgcaggccacggtgaccgtccaggtgctggcctgccgggagccggaggtggacgtggtcctgcccctgcaggtgctgatgcggcgatcacagcgcaactacttggaggcccacgttgacctgcgcgactgcgtcacctaccagactgagtaccgctgggaggtgtatcgcaccgccagctgccagcggccggggcgcccagcgcgtgtggccctgcccggcgtggacgtgagccggcctcggctggtgctgccgcggctggcgctgcctgtggggcactactgctttgtgtttgtcgtgtcatttggggacacgccactgacacagagcatccaggccaatgtgacggtggcccccgagcgcctggtgcccatcattgagggtggctcataccgcgtgtggtcagacacacgggacctggtgctggatgggagcgagtcctacgaccccaacctggaggacggcgaccagacgccgctcagtttccactgggcctgtgtggcttcgacacaggtcagtgcgtggcagggccgtcctccatgcccctcacccgtccacacccatgagcccagagaacacccagcttgccaccagggctggcccgtcctcagtgcctggtgggccccgtcccagcatggggagggggtctcccgcgctgtctcctgggccgggctctgctttaaaactggatggggctctcaggccacgtcgccccttgttctcggcctgcagagggaggctggcgggtgtgcgctgaactttgggccccgcgggagcagcacggtcaccattccacgggagcggctggcggctggcgtggagtacaccttcagcctgaccgtgtggaaggccggccgcaaggaggaggccaccaaccagacggtgggtgccgcccgcccctcggccacttgccttggacagcccagcctccctggtcatctactgttttccgtgttttagtgctggtggaggccgcacgctctcccctctctgtttctgatgcaaattctatgtaacacgacagcctgcttcagctttgcttccttccaaacctgccacagttccacgtacagtcttcaagccacatatgctctagtggcaaaagctacacagtcccctagcaataccaacagtgaggaagagccccttcccaccccagaggtagccactgtccccagcccatgtccctgttgctggatgtggtgggccggttctcaccctcacgctcccctctctggaccggccaggaggcttggtgaccctgagcccgtggtggctgctcctgctgctgtcaggcggggcctgctggtgccccagagtgggcgtctgttccccagtccctgctttcctcagctggcctgattgggggtcttcccagaggggtcgtctgaggggagggtgtgggagcaggttccatcccagctcagcctcctgacccaggccctggctaagggctgcaggagtctgtgagtcaggcctacgtggcagctgcggtcctcacacccacacatacgtctcttctcacacgcatccccccaggggccctcagtgagcattgcctgcctcctgctagggtccagctgggtccagtacaccagaacgcacactccagtgtcctctgccctgtgtatgcccttccgccgtccaagttggaaggtggcaaaccggatgagtatcctgggagggagtgagctcaccggcagtggccaggcccctgggaaacctggagtttgggagcagcatcctccatgggtcccccagtccttccagcaggccaaatagacctgtgttggaggtaaccccactcccacgccaggtgctgatccggagtggccgggtgcccattgtgtccttggagtgtgtgtcctgcaaggcacaggccgtgtacgaagtgagccgcagctcctacgtgtacttggagggccgctgcctcaattgcagcagcggctccaagcgaggggtgagtgttgagcggggtgtgggcgggctggggatgggtcccatggccgaggggacggggcctgcaggcagaagtggggctgacagggcagagggttgcgccccctcaccaccccttctgcctgcagcggtgggctgcacgtacgttcagcaacaagacgctggtgctggatgagaccaccacatccacgggcagtgcaggcatgcgactggtgctgcggcggggcgtgctgcgggacggcgagggatacaccttcacgctcacggtgctgggccgctctggcgaggaggagggctgcgcct

SEQ ID NO: 13292 - DNA, 2545 bp, Homo sapiens
ctgctggggacagacgtgcaggtggaagcggcacctgccgccctggagctcgtgtgcccgtcctcggtgcagagtgacgagagcctcgacctcagcatccagaaccgcggtggttcaggcctggaggccgcctacagcatcgtggccctgggcgaggagccggcccgagcggtgcacccgctctgcccctcggacacggagatcttccctggcaacgggcactgctaccgcctggtggtggagaaggcggcctggctgcaggcgcaggagcagtgtcaggcctgggccggggccgccctggcaatggtggacagtcccgccgtgcagcgcttcctggtctcccgggtcaccagggggtggaggtgggcccagcgccgcagggcgaggccttcagcctggagagctgccagaactggctgcccggggagccacacccagccacagccgagcactgcgtccggctcgggcccaccgggtggtgtaacaccgacctgtgctcagcgccgcacagctacgtctgcgagctgcagcccggaggcccagtgcaggatgccgagaacctcctcgtgggagcgcccagtggggacctgcagggacccctgacgcctctggcacagcaggacggcctctcagccccgcacgagcccgtggaggtcatggtattcccgggcctgcgtctgagccgtgaagccttcctcaccacggccgaatttgggacccaggagctccggcggcccgcccagctgcggctgcaggtgtaccggctcctcagcacagcagggaccccggagaacggcagcgagcctgagagcaggtccccggacaacaggacccagctggcccccgcgtgcatgccagggggacgctggtgccctggagccaacatctgcttgccgctggacgcctcctgccacccccaggcctgcgccaatggctgcacgtcagggccagggctacccggggccccctatgcgctatggagagagttcctcttctccgttcccgcggggccccccgcgcagtactcggtcaccctccacggccaggatgtcctcatgctccctggtgacctcgttggcttgcagcacgacgctggccctggcgccctcctgcactgctcgccggctcccggccaccctggtccccgggccccgtacctctccgccaacgcctcgtcatggctgccccacttgccagcccagctggagggcacttgggcctgccctgcctgtgccctgcggctgcttgcagccacggaacagctcaccgtgctgctgggcttgaggcccaaccctggactgcggctgcctgggcgctatgaggtccgggcagaggtgggcaatggcgtgtccaggcacaacctctcctgcagctttgacgtggtctccccagtggctgggctgcgggtcatctaccctgccccccgcgacggccgcctctacgtgcccaccaacggctcagccttggtgctccaggtggactctggtgccaacgccacggccacggctcgctggcctgggggcagtgtcagcgcccgctttgagaatgtctgccctgccctggtggccaccttcgtgcccggctgcccctgggagaccaacgataccctgttctcagtggtagcactgccgtggctcagtgagggggagcacgtggtggacgtggtggtggaaaacagcgccagccgggccaacctcagcctgcgggtgacggcggaggagcccatctgtggcctccgcgccacgcccagccccgaggcccgtgtactgcagggagtcctagtgaggtacagccccgtggtggaggccggctcggacatggtcttccggtggaccatcaacgacaagcagtccctgaccttccagaacgtggtcttcaatgtcatttatcagagcgcggcggtcttcaagctctcactgacggcctccaaccacgtgagcaacgtcaccgtgaactacaacgtaaccgtggagcggatgaacaggatgcagggtctgcaggtctccacagtgccggccgtgctgtcccccaatgccacgctagcactgacggcgggcgtgctggtggactcggccgtggaggtggccttcctgtggacctttggggatggggagcaggccctccaccagttccagcctccgtacaacgagtccttcccggttccagacccctcggtggcccaggtgctggtggagcacaatgtcatgcacacctacgctgccccaggtgctgatccggagtggccgggtgcccattgtgtccttggagtgtgtgtcctgcaaggcacaggccgtgtacgaagtgagccgcagctcctacgtgtacttggagggccgctgcctcaattgcagcagcggctccaagcgagggcggtgggctgcacgtacgttcagcaacaagacgctggtgctggatgagaccaccacatccacgggcagtgcaggcatgcgactggtgctgcggcggggcgtgctgcgggacggcgagggatacaccttcacgctcacggtgctgggccgctctggcgaggaggagggctgcgcct

SEQ ID NO: 13293 - DNA, 519 bp, Homo sapiens
gcgtggctcctgtccagcagcgccagcttcctggcctcattcctcggctgggagccactgaaggtgagggggctgccaggggtaggctacaggcctccatcacgggggacccctctgaagccaccccctccccaggtcttgctggaagccctgtacttctcactggtggccaagcggctgcacccggatgaagatgacaccctggtagagagcccggctgtgacgcctgtgagcgcacgtgtgccccgcgtacggccaccccacggctttgcactcttcctggccaaggaagaagcccgcaaggtcaagaggctacatggcatgctgcgggtgagcctgggtgcggcctgtgcccctgccacctccgtctcttgtctcccacctcccacccatgcacgcaggacactcctgtccccctttcctcacctcagaaggcccttaggggttcaatgctctgcagcctttgcccggtctccctcctaccccacgccccccacttgctgccccagtccctgccag

SEQ ID NO: 13294 - DNA, 447 bp, Homo sapiens
gcgtggctcctgtccagcagcgccagcttcctggcctcattcctcggctgggagccactgaaggtcttgctggaagccctgtacttctcactggtggccaagcggctgcacccggatgaagatgacaccctggtagagagcccggctgtgacgcctgtgagcgcacgtgtgccccgcgtacggccaccccacggctttgcactcttcctggccaaggaagaagcccgcaaggtcaagaggctacatggcatgctgcgggtgagcctgggtgcggcctgtgcccctgccacctccgtctcttgtctcccacctcccacccatgcacgcaggacactcctgtccccctttcctcacctcagaaggcccttaggggttcaatgctctgcagcctttgcccggtctccctcctaccccacgccccccacttgctgccccagtccctgccag

SEQ ID NO: 13295 - DNA, 6554 bp, Homo sapiens
ttcatgctgcccgaggacgctgccatggctgtgggtgagtggagggagggacgccaatcagggccaggcctctcacctgccacctgggctcactgacgcctgtccctgcagctgacggcctccaaccacgtgagcaacgtcaccgtgaactacaacgtaaccgtggagcggatgaacaggatgcagggtctgcaggtctccacagtgccggccgtgctgtcccccaatgccacgctagcactgacggcgggcgtgctggtggactcggccgtggaggtggccttcctgtgagtgactcgggggccggtttggggtgggcaccaggctcttgtcccagccccagcctcagccgagggacccccacatcacggggttgcttttctgagcctcggtttccctgtctgttgggaggtaactgggtgcacaggagccctgaggctgcacgggagccgggagaggcctcagcacagccgggtgggccctgaatggaggcccggggcgtgactgcagagtggagcctcggctgggtcccaagcaccccctgccccgccaccgcccacccctgtcccggttcactcactgcgtcccaccgccccggcaggtggacctttggggatggggagcaggccctccaccagttccagcctccgtacaacgagtccttcccggttccagacccctcggtggcccaggtgctggtggagcacaatgtcatgcacacctacgctgccccaggtgagggatgagggggtgagggggccactgcctttcaggctctgagcacggggtccccccagctccccagtcaagctgccccccttcctccccaacagccctcactgtgacctcacctgggctgatggcttaggcccctactggggtgagggaggggccaggcgtggggggagtggacagggaagctgggcccctgaactgcgccccccgccctccccgggcctggctcttgctgctctgctgccccgagtgcagctgcacttggaggcggtgccgtcctcgccaggcagccctcagtgctgctacacctgtgctccgtcccgcacgtggcttgggagcctgggacccttaaggctgggccgcaggtgcagccgttcaccccgggctcctcaggcggggggcttctgccgagcgggtggggagcaggtgggggtgccgcggctgccccactcgggcctgtccccacaggtgagtacctcctgaccgtgctggcatctaatgccttcgagaacctgacgcagcaggtgcctgtgagcgtgcgcgcctccctgccctccgtggctgtgggtgtgagtgacggcgtcctggtggccggccggcccgtcaccttctacccgcacccgctgccctcgcctgggggtgttctttacacgtgggacttcggggacggctcccctgtcctgacccagagccagccggctgccaaccacacctatgcctcgaggggcacctaccacgtgcgcctggaggtcaacaacacggtgagcggtgcggcggcccaggcggatgtgcgcgtctttgaggagctccgcggactcagcgtggacatgagcctggccgtggagcagggcgcccccgtggtggtcagcgccgcggtgcagacgggcgacaacatcacgtggaccttcgacatgggggacggcaccgtgctgtcgggcccggaggcaacagtggagcatgtgtacctgcgggcacagaactgcacagtgaccgtgggtgcggccagccccgccggccacctggcccggagcctgcacgtgctggtcttcgtcctggaggtgctgcgcgttgaacccgccgcctgcatccccacgcagcctgacgcgcggctcacggcctacgtcaccgggaacccggcccactacctcttcgactggaccttcggggatggctcctccaacacgaccgtgcgggggtgcccgacggtgacacacaacttcacgcggagcggcacgttccccctggcgctggtgctgtccagccgcgtgaacagggcgcattacttcaccagcatctgcgtggagccagaggtgggcaacgtcaccctgcagccagagaggcagtttgtgcagctcggggacgaggcctggctggtggcatgtgcctggcccccgttcccctaccgctacacctgggactttggcaccgaggaagccgcccccacccgtgccaggggccctgaggtgacgttcatctaccgagacccaggctcctatcttgtgacagtcaccgcgtccaacaacatctctgctgccaatgactcagccctggtggaggtgcaggagcccgtgctggtcaccagcatcaaggtcaatggctcccttgggctggagctgcagcagccgtacctgttctctgctgtgggccgtgggcgccccgccagctacctgtgggatctgggggacggtgggtggctcgagggtccggaggtcacccacgcttacaacagcacaggtgacttcaccgttagggtggccggctggaatgaggtgagccgcagcgaggcctggctcaatgtgacggtgaagcggcgcgtgcgggggctcgtcgtcaatgcaagccgcacggtggtgcccctgaatgggagcgtgagcttcagcacgtcgctggaggccggcagtgatgtgcgctattcctgggtgctctgtgaccgctgcacgcccatccctgggggtcctaccatctcttacaccttccgctccgtgggcaccttcaatatcatcgtcacggctgagaacgaggtgggctccgcccaggacagcatcttcgtctatgtcctgcagctcatagaggggctgcaggtggtgggcggtggccgctacttccccaccaaccacacggtacagctgcaggccgtggttagggatggcaccaacgtctcctacagctggactgcctggagggacaggggcccggccctggccggcagcggcaaaggcttctcgctcaccgtgctcgaggccggcacctaccatgtgcagctgcgggccaccaacatgctgggcagcgcctgggccgactgcaccatggacttcgtggagcctgtggggtggctgatggtggccgcctccccgaacccagctgccgtcaacacaagcgtcaccctcagtgccgagctggctggtggcagtggtgtcgtatacacttggtccttggaggaggggctgagctgggagacctccgagccatttaccacccatagcttccccacacccggcctgcacttggtcaccatgacggcagggaacccgctgggctcagccaacgccaccgtggaagtggatgtgcaggtgcctgtgagtggcctcagcatcagggccagcgagcccggaggcagcttcgtggcggccgggtcctctgtgcccttttgggggcagctggccacgggcaccaatgtgagctggtgctgggctgtgcccggcggcagcagcaagcgtggccctcatgtcaccatggtcttcccggatgctggcaccttctccatccggctcaatgcctccaacgcagtcagctgggtctcagccacgtacaacctcacggcggaggagcccatcgtgggcctggtgctgtgggccagcagcaaggtggtggcgcccgggcagctggtccattttcagatcctgctggctgccggctcagctgtcaccttccgcctgcaggtcggcggggccaaccccgaggtgctccccgggccccgtttctcccacagcttcccccgcgtcggagaccacgtggtgagcgtgcggggcaaaaaccacgtgagctgggcccaggcgcaggtgcgcatcgtggtgctggaggccgtgagtgggctgcaggtgcccaactgctgcgagcctggcatcgccacgggcactgagaggaacttcacagcccgcgtgcagcgcggctctcgggtcgcctacgcctggtacttctcgctgcagaaggtccagggcgactcgctggtcatcctgtcgggccgcgacgtcacctacacgcccgtggccgcggggctgttggagatccaggtgcgcgccttcaacgccctgggcagtgagaaccgcacgctggtgctggaggttcaggacgccgtccagtatgtggccctgcagagcggcccctgcttcaccaaccgctcggcgcagtttgaggccgccaccagccccagcccccggcgtgtggcctaccactgggactttggggatgggtcgccagggcaggacacagatgagcccagggccgagcactcctacctgaggcctggggactaccgcgtgcaggtgaacgcctccaacctggtgagcttcttcgtggcgcaggccacggtgaccgtccaggtgctggcctgccgggagccggaggtggacgtggtcctgcccctgcaggtgctgatgcggcgatcacagcgcaactacttggaggcccacgttgacctgcgcgactgcgtcacctaccagactgagtaccgctgggaggtgtatcgcaccgccagctgccagcggccggggcgcccagcgcgtgtggccctgcccggcgtggacgtgagccggcctcggctggtgctgccgcggctggcgctgcctgtggggcactactgctttgtgtttgtcgtgtcatttggggacacgccactgacacagagcatccaggccaatgtgacggtggcccccgagcgcctggtgcccatcattgagggtggctcataccgcgtgtggtcagacacacgggacctggtgctggatgggagcgagtcctacgaccccaacctggaggacggcgaccagacgccgctcagtttccactgggcctgtgtggcttcgacacaggtcagtgcgtggcagggccgtcctccatgcccctcacccgtccacacccatgagcccagagaacacccagcttgccaccagggctggcccgtcctcagtgcctggtgggccccgtcccagcatggggagggggtctcccgcgctgtctcctgggccgggctctgctttaaaactggatggggctctcaggccacgtcgccccttgttctcggcctgcagagggaggctggcgggtgtgcgctgaactttgggccccgcgggagcagcacggtcaccattccacgggagcggctggcggctggcgtggagtacaccttcagcctgaccgtgtggaaggccggccgcaaggaggaggccaccaaccagacggtgggtgccgcccgcccctcggccacttgccttggacagcccagcctccctggtcatctactgttttccgtgttttagtgctggtggaggccgcacgctctcccctctctgtttctgatgcaaattctatgtaacacgacagcctgcttcagctttgcttccttccaaacctgccacagttccacgtacagtcttcaagccacatatgctctagtggcaaaagctacacagtcccctagcaataccaacagtgaggaagagccccttcccaccccagaggtagccactgtccccagcccatgtccctgttgctggatgtggtgggccggttctcaccctcacgctcccctctctggaccggccaggaggcttggtgaccctgagcccgtggtggctgctcctgctgctgtcaggcggggcctgctggtgccccagagtgggcgtctgttccccagtccctgctttcctcagctggcctgattgggggtcttcccagaggggtcgtctgaggggagggtgtgggagcaggttccatcccagctcagcctcctgacccaggccctggctaagggctgcaggagtctgtgagtcaggcctacgtggcagctgcggtcctcacacccacacatacgtctcttctcacacgcatccccccaggggccctcagtgagcattgcctgcctcctgctagggtccagctgggtccagtacaccagaacgcacactccagtgtcctctgccctgtgtatgcccttccgccgtccaagttggaaggtggcaaaccggatgagtatcctgggagggagtgagctcaccggcagtggccaggcccctgggaaacctggagtttgggagcagcatcctccatgggtcccccagtccttccagcaggccaaatagacctgtgttggaggtaaccccactcccacgccaggtgctgatccggagtggccgggtgcccattgtgtccttggagtgtgtgtcctgcaaggcacaggccgtgtacgaagtgagccgcagctcctacgtgtacttggagggccgctgcctcaattgcagcagcggctccaagcgaggggtgagtgttgagcggggtgtgggcgggctggggatgggtcccatggccgaggggacggggcctgcaggcagaagtggggctgacagggcagagggttgcgccccctcaccaccccttctgcctgcagcggtgggctgcacgtacgttcagcaacaagacgctggtgctggatgagaccaccacatccacgggcagtgcaggcatgcgactggtgctgcggcggggcgtgctgcgggacggcgagggatacaccttcacgctcacggtgctgggccgctctggcg

SEQ ID NO: 13296 - DNA, 722 bp, Homo sapiens
ttcatgctgcccgaggacgctgccatggctgtgggtgagtggagggagggacgccaatcagggccaggcctctcacctgccacctgggctcactgacgcctgtccctgcagctgacggcctccaaccacgtgagcaacgtcaccgtgaactacaacgtaaccgtggagcggatgaacaggatgcagggtctgcaggtctccacagtgccggccgtgctgtcccccaatgccacgctagcactgacggcgggcgtgctggtggactcggccgtggaggtggccttcctgtggacctttggggatggggagcaggccctccaccagttccagcctccgtacaacgagtccttcccggttccagacccctcggtggcccaggtgctggtggagcacaatgtcatgcacacctacgctgccccaggtgctgatccggagtggccgggtgcccattgtgtccttggagtgtgtgtcctgcaaggcacaggccgtgtacgaagtgagccgcagctcctacgtgtacttggagggccgctgcctcaattgcagcagcggctccaagcgagggcggtgggctgcacgtacgttcagcaacaagacgctggtgctggatgagaccaccacatccacgggcagtgcaggcatgcgactggtgctgcggcggggcgtgctgcgggacggcgagggatacaccttcacgctcacggtgctgggccgctctggcg

SEQ ID NO: 13297 - DNA, 1533 bp, Homo sapiens
gcagccttccacatcgctgccccgctccctgtcactgccacacgctgggacttcggagacggctccgccgaggtggatgccgctgggccggctgcctcgcatcgctatgtgctgcctgggcgctatcacgtgacggccgtgctggccctgggggccggctcagccctgctggggacagacgtgcaggtggaagcggcacctgccgccctggagctcgtgtgcccgtcctcggtgcagagtgacgagagcctcgacctcagcatccagaaccgcggtggttcaggcctggaggccgcctacagcatcgtggccctgggcgaggagccggcccgaggtgagtgtctgctgcccactccccttcctccccagggccatccagatggggcagagcctggtacccccgtcttgggcccacactgaccgttgacaccctcgttcccaccggtctccagcggtgcacccgctctgcccctcggacacggagatcttccctggcaacgggcactgctaccgcctggtggtggagaaggcggcctggctgcaggcgcaggagcagtgtcaggcctgggccggggccgccctggcaatggtggacagtcccgccgtgcagcgcttcctggtctcccgggtcaccaggtgcctgcccccaccccccgaggggccataggttgggagatctctgaagcactggggcagagcctgcggctggggagtctcaggaggaaggaggtgggagctgggccggccctggtgagcaggtggcgccggccggtggggccgttcctgtcagctctgcagatgcagaggtggacatgagctgggggcagcctccggacactcctgggcacgccatacgggaggtggcctgcacggggatccctgccggtacccacaggccccgtgggtgggtgctgctgtgagcctgggctggtgggccctggtctccgggctctgagcctcagtttccccatctggaaagggggacagtgatggggctcccagcgggctgctgtgagggtgggaggatggaggagtgccctgagccccctgccatcccacacccgcccccaggagcctagacgtgtggatcggcttctcgactgtgcagggggtggaggtgggcccagcgccgcagggcgaggccttcagcctggagagctgccagaactggctgcccggggagccacacccagccacagccgagcactgcgtccggctcgggcccaccgggtggtgtaacaccgacctgtgctcagcgccgcacagctacgtctgcgagctgcagcccggaggtgtgcggggggccaggcaggggcctgagacgctggctgtggttaggggcctgccgagcgcccgcggtggagcctgggctgaggaggaggggctggtgggggggttttcgggcggctcggtccccagtctgttcgtcctggtgtcctgggccctggcccggcgcctcactgtgcactcgccaccccaggcccagtgcaggatgccgagaacctcctcgtgggagcgcccagtggggacctg

SEQ ID NO: 13298 - DNA, 571 bp, Homo sapiens
gcagccttccacatcgctgccccgctccctgtcactgccacacgctgggacttcggagacggctccgccgaggtggatgccgctgggccggctgcctcgcatcgctatgtgctgcctgggcgctatcacgtgacggccgtgctggccctgggggccggctcagccctgctggggacagacgtgcaggtggaagcggcacctgccgccctggagctcgtgtgcccgtcctcggtgcagagtgacgagagcctcgacctcagcatccagaaccgcggtggttcaggcctggaggccgcctacagcatcgtggccctgggcgaggagccggcccgagcggtgcacccgctctgcccctcggacacggagatcttccctggcaacgggcactgctaccgcctggtggtggagaaggcggcctggctgcaggcgcaggagcagtgtcaggcctgggccggggccgccctggcaatggtggacagtcccgccgtgcagcgcttcctggtctcccgggtcaccaggcccagtgcaggatgccgagaacctcctcgtgggagcgcccagtggggacctg

SEQ ID NO: 13299 - DNA, 946 bp, Homo sapiens
acgacaacaaaggtttgtgcggaccctgccaagctctgcccctctgcccccgcattggggcgccctgcgagcctgacctccctcctgcgcctctgcagggctcagccctgcctggttcctgcagcacgtcatcgtcagggacctgcagacggcacgcagcgccttcttcctggtcaatgactggctttcggtggagacggaggccaacgggggcctggtggagaaggaggtgctggccgcgagtaaggcctcgttccatgttcccactccgtgggaggttgggcagggtggtcctgccccgtggcctcctgcagtgcggccctccctgccttctaggcgacgcagcccttttgcgcttccggcgcctgctggtggctgagctgcagcgtggcttctttgacaagcacatctggctctccatatgggaccggccgcctcgtagccgtttcactcgcatccagagggccacctgctgcgttctcctcatctgcctcttcctgggcgccaacgccgtgtggtacggggctgttggcgactctgcctacaggtgggtgccgtaggggtcggggcagcctcttcctgcccagcccttcctgcccctcagcctcacctgtgtggcctcctctcctccacacagcacggggcatgtgtccaggctgagcccgctgagcgtcgacacagtcgctgttggcctggtgtccagcgtggttgtctatcccgtctacctggccatcctttttctcttccggatgtcccggagcaaggtgggctggggctggggacccgggagtactgggaatggagcctgggcctcggcaccatgcctagggccgccactttccagtgctgcagccagagggaaaggcgtccaccaaaggctgctcgggaagggtcaacacacttgagcagccttagctagactgaccagggagaaagagagaagact

SEQ ID NO: 13300 - DNA, 596 bp, Homo sapiens
acgacaacaaagggctcagccctgcctggttcctgcagcacgtcatcgtcagggacctgcagacggcacgcagcgccttcttcctggtcaatgactggctttcggtggagacggaggccaacgggggcctggtggagaaggaggtgctggccgcgagcgacgcagcccttttgcgcttccggcgcctgctggtggctgagctgcagcgtggcttctttgacaagcacatctggctctccatatgggaccggccgcctcgtagccgtttcactcgcatccagagggccacctgctgcgttctcctcatctgcctcttcctgggcgccaacgccgtgtggtacggggctgttggcgactctgcctacagcacggggcatgtgtccaggctgagcccgctgagcgtcgacacagtcgctgttggcctggtgtccagcgtggttgtctatcccgtctacctggccatcctttttctcttccggatgtcccggagcaagtgctgcagccagagggaaaggcgtccaccaaaggctgctcgggaagggtcaacacacttgagcagccttagctagactgaccagggagaaagagagaagact

SEQ ID NO: 13301 - DNA, 2573 bp, Homo sapiens
ctgcctggttcctgcagcacgtcatcgtcagggacctgcagacggcacgcagcgccttcttcctggtcaatgactggctttcggtggagacggaggccaacgggggcctggtggagaaggaggtgctggccgcgagtaaggcctcgttccatgttcccactccgtgggaggttgggcagggtggtcctgccccgtggcctcctgcagtgcggccctccctgccttctaggcgacgcagcccttttgcgcttccggcgcctgctggtggctgagctgcagcgtggcttctttgacaagcacatctggctctccatatgggaccggccgcctcgtagccgtttcactcgcatccagagggccacctgctgcgttctcctcatctgcctcttcctgggcgccaacgccgtgtggtacggggctgttggcgactctgcctacaggtgggtgccgtaggggtcggggcagcctcttcctgcccagcccttcctgcccctcagcctcacctgtgtggcctcctctcctccacacagcacggggcatgtgtccaggctgagcccgctgagcgtcgacacagtcgctgttggcctggtgtccagcgtggttgtctatcccgtctacctggccatcctttttctcttccggatgtcccggagcaaggtgggctggggctggggacccgggagtactgggaatggagcctgggcctcggcaccatgcctagggccgccactttccagtgctgcagccagagggaaaggcgtccaccaaaggctgctcgggaagggtcaacacacttgagcagccttagctagactgaccagggagaaagagagaagactcagaagccagaatggtgaaagaacgagggcactttgctaagcagacgccacggacgactgcacagcagcacgccagataactcagaagaagcaagcacgcggctgtgcacgcttccgaaatgcactccagaagaaaatctcagtacatctataggaagtgaagaggctgagttagtcccttagaaacgtcccagtggccgggccgggtgtggtggctcacgcctgtaatcccaacacttcaggtggccgaggtgggcggatctgagtccaggagtttgagaccagcctgggcaacatagcaagaccccatctatataaaacattaaaaagggccaggcgcggtggctcacgcctgtaatcccagcactttgggaggccgaggcgggcagatcacttgaggtcaggagttcgagaccagcctggccaacacaatgaaaccccgactctactacaaatacaaaaacttagctgggcatggtggcgggcgcctgtagtcccagctactcgagaggctgaggcaggagaatggcatgaacccaggaggcggagcttgcagtgagccgagattgcgccactgcactccatcctgggcaacggagcaagactccatctccaaaaaaaaaaaaaaaaaatcccacaaagaaaagctcaggctcagagccttcacgatagaatttttctaagcagttaaggaagaattaacaccaatccttcacagactctttccaagaatacagcaggtgggaacgcttcccattcatacggaaacgggaggccgcaccccttaggaatgcacacgtggggtcctcaagaggttacatgcaaactaaccccagcagcacacagagaaggcgcataagccgcgaccaggaggggttgctcccgagtccgtggcaggaaccagaggccacatgtggctgctcgtatttaagttaattaaaatggaacgatggccgggtgtggtggctcacacctgtaatcccagcactttgggaggcggaggcgggcagatcacttgaggtcaggagttccaagaccagcctggccaacacagtgaaaccccgtctctactaaaaatacaaaaaattagctgggcatggtggcaggcacctgtaatcccagctactcaggaggctgagccaggacaatcgcctgaacgcgggaggtggaggttgcagtgagctgagattgcgccattgcactccagcctgggtgacagcgagactccatctaaaaaagaaaatatgaaatttaaaactctgttccttagctgcaccagtctgctgtcaagtgttcagtggcacacgtcgcgaggggctgccatcacggacggtgcagatgtcccatatatccagcattctaggacattctgtcagatggcaccgggctctgtcctgtctgctgaggaggtggcttctcatccctgtcctgagcaggtctgagctgccgcccgctgaccactgccctcgtcctgcaggtggctgggagcccgagccccacacctgccgggcagcaggtgctggacatcgacagctgcctggactcgtccgtgctggacagctccttcctcacgttctcaggcctccacgctgaggtgaggactctactgggggtcctgggctgggctgggggtcctgccgccttggcgcagcttggactcaagacactgtgcacctctcagcaggcctttgttggacagatgaagagtgacttgtttctggatgattctaagag

SEQ ID NO: 13302 - DNA, 603 bp, Homo sapiens
ctgcctggttcctgcagcacgtcatcgtcagggacctgcagacggcacgcagcgccttcttcctggtcaatgactggctttcggtggagacggaggccaacgggggcctggtggagaaggaggtgctggccgcgagcgacgcagcccttttgcgcttccggcgcctgctggtggctgagctgcagcgtggcttctttgacaagcacatctggctctccatatgggaccggccgcctcgtagccgtttcactcgcatccagagggccacctgctgcgttctcctcatctgcctcttcctgggcgccaacgccgtgtggtacggggctgttggcgactctgcctacaggtggctgggagcccgagccccacacctgccgggcagcaggtgctggacatcgacagctgcctggactcgtccgtgctggacagctccttcctcacgttctcaggcctccacgctgaggtgaggactctactgggggtcctgggctgggctgggggtcctgccgccttggcgcagcttggactcaagacactgtgcacctctcagcaggcctttgttggacagatgaagagtgacttgtttctggatgattctaagag

SEQ ID NO: 13303 - DNA, 3299 bp, Homo sapiens
gtttgtttgcggaagtaggaggaagtagaagtgctgagtaagccgaggtgagtgacctcgcgggtgggcggggcctgggggtccgttccccaacttcctcggcgctccggactcccaagtctccgccggaccctcctttggatattcctcgtgtctccgattctgagacagagggggaagacggtggggcctccccacctgccccgcagaagatgcagttctttggccgcctggtcaataccttcagtggcgtcaccaacttgttctctaacccattccgggtgaaggaggtggctgtggccgactacacctcgagtgaccgagttcgggaggaagggcagctgattctgttccagaacactcccaaccgcacctgggactgcgtcctggtcaaccccaggaactcacagagtggattccgactcttccagctggagttggaggctgacgccctagtgaatttccatcagtattcttcccagctgctacccttctatgagagctcccctcaggtcctgcacactgaggtcctgcagcacctgaccgacctcatccgtaaccaccccagctggtcagtggcccacctggctgtggagctagggatccgcgagtgcttccatcacagccgtatcatcagctgtgccaattgcgcggagaacgaggagggctgcacacccctgcacctggcctgccgcaagggtgatggggagatcctggtggagctggtgcagtactgccacactcagatggatgtcaccgactacaagggagagaccgtcttccattatgctgtccagggtgacaattctcaggtgctgcagctccttggaaggaacgcagtggctggcctgaaccaggtgaataaccaagggctgaccccgctgcacctggcctgccagctggggaagcaggagatggtccgcgtgctgctgctgtgcaatgctcggtgcaacatcatgggccccaacggctaccccatccactcggccatgaagttctctcagaaggggtgtgcggagatgatcatcagcatggacagcagccagatccacagcaaagacccccgttacggagccagccccctccactgggccaagaacgcagagatggcccgcatgctgctgaaacggggctgcaacgtgaacagcaccagctccgcggggaacacggccctgcacgtggcggtgatgcgcaaccgcttcgactgtgccatagtgctgctgacccacggggccaacgcggatgcccgcggagagcacggcaacaccccgctgcacctggccatgtcgaaagacaacgtggagatgatcaaggccctcatcgtgttcggagcagaagtggacaccccgaatgactttggggagactcctacattcctagcctccaaaatcggcagacttgtcaccaggaaggcgatcttgactctgctgagaaccgtgggggccgaatactgcttcccacccatccacggggtccccgcggagcagggctctgcagcgccacatcatcccttctccctggaaagagctcagcccccaccgatcagcctaaacaacctagaactacaggatctcatgcacatctcacgggcccggaagccagcgttcatcctgggctccatgagggacgagaagcggacccacgaccacctgctgtgcctggatggaggaggagtgaaaggcctcatcatcatccagctcctcatcgccatcgagaaggcctcgggtgtggccaccaaggacctgtttgactgggtggcgggcaccagcactggaggcatcctggccctggccattctgcacagtaagtccatggcctacatgcgcggcatgtactttcgcatgaaggatgaggtgttccggggctccaggccctacgagtcggggcccctggaggagttcctgaagcgggagtttggggagcacaccaagatgacggacgtcaggaaacccaaggtgatgctgacagggacactgtctgaccggcagccggctgaactccacctcttccggaactacgatgctccagaaactgtccgggagcctcgtttcaaccagaacgttaacctcaggcctccagctcagccctcagaccagctggtgtggcgggcggcccgaagcagcggggcagctcctacttacttccgacccaatgggcgcttcctggacggtgggctgctggccaacaaccccacgctggatgccatgaccgagatccatgagtacaatcaggacctgatccgcaagggtcaggccaacaaggtgaagaaactctccatcgttgtctccctggggacagggaggtccccacaagtgcctgtgacctgtgtggatgtcttccgtcccagcaacccctgggagctggccaagactgtttttggggccaaggaactgggcaagatggtggtggactgttgcacggatccagacgggcgggctgtggaccgggcacgggcctggtgcgagatggtcggcatccagtacttcagattgaacccccagctggggacggacatcatgctggatgaggtcagtgacacagtgctggtcaacgccctctgggagaccgaggtctacatctatgagcaccgcgaggagttccagaagctcatccagctgctgctctcaccctgagggtccccagcctctcaccggccccagctgacctcgtccattcagcccctgccaggccaagcccagccactgccctcccgggcagatctgggcccaggcacctctgagtccatagaccaggcctgggagaatgccaagctgcctgcccgaggctggtcctgaaggcctgtctcccactaaccccgccttccagcactttctgtcattccaggctgggaaagtctagagccccctttggcccctttccctgactgtcaaggacaactgactcccccatcagctcaaacattaagggtacccgggcacaaccgtacccctgcccccagccccagcctccctgagggcctgccgggctgcctctgccccagcccccagcaagggcactcccaggcttcctggtgggtgcagcccactccctctgccctctgctccgttccctgggggctgggactaaagaaatgggtgtcccccaccccatcagctgggaaagcccaggccgcaggagtgggatgcccgttggactttgcccctcacactggcccagcccctcacactgccccaccccgagaaccctcagctctcaaaggtcactcctgggagtttcttcttcccaatggaagtggcttaagagccaaaactgaaataaatcatttggattcaagttca

SEQ ID NO: 13304 - DNA, 3060 bp, Homo sapiens
gggggtccgttccccaacttcctcggcgctccggactcccaagtctccgccggaccctcctttggatattcctcgtgtctccgattctgagacagagggggaagacggtggggcctccccacctgccccgcagaagatgcagttctttggccgcctggtcaataccttcagtggcgtcaccaacttgttctctaacccattccgggtgaaggaggtggctgtggccgactacacctcgagtgaccgagttcgggaggaagggcagctgattctgttccagaacactcccaaccgcacctgggactgcgtcctggtcaaccccaggaactcacagagtggattccgactcttccagctggagttggaggctgacgccctagtgaatttccatcagtattcttcccagctgctacccttctatgagagctcccctcaggtcctgcacactgaggtcctgcagcacctgaccgacctcatccgtaaccaccccagctggtcagtggcccacctggctgtggagctagggatccgcgagtgcttccatcacagccgtatcatcagctgtgccaattgcgcggagaacgaggagggctgcacacccctgcacctggcctgccgcaagggtgatggggagatcctggtggagctggtgcagtactgccacactcagatggatgtcaccgactacaagggagagaccgtcttccattatgctgtccagggtgacaattctcaggtgctgcagctccttggaaggaacgcagtggctggcctgaaccaggtgaataaccaagggctgaccccgctgcacctggcctgccagctggggaagcaggagatggtccgcgtgctgctgctgtgcaatgctcggtgcaacatcatgggccccaacggctaccccatccactcggccatgaagttctctcagaaggggtgtgcggagatgatcatcagcatggacagcagccagatccacagcaaagacccccgttacggagccagccccctccactgggccaagaacgcagagatggcccgcatgctgctgaaacggggctgcaacgtgaacagcaccagctccgcggggaacacggccctgcacgtggcggtgatgcgcaaccgcttcgactgtgccatagtgctgctgacccacggggccaacgcggatgcccgcggagagcacggcaacaccccgctgcacctggccatgtcgaaagacaacgtggagatgatcaaggccctcatcgtgttcggagcagaagtggacaccccgaatgactttggggagactcctacattcctagcctccaaaatcggcagacaactacaggatctcatgcacatctcacgggcccggaagccagcgttcatcctgggctccatgagggacgagaagcggacccacgaccacctgctgtgcctggatggaggaggagtgaaaggcctcatcatcatccagctcctcatcgccatcgagaaggcctcgggtgtggccaccaaggacctgtttgactgggtggcgggcaccagcactggaggcatcctggccctggccattctgcacagtaagtccatggcctacatgcgcggcatgtactttcgcatgaaggatgaggtgttccggggctccaggccctacgagtcggggcccctggaggagttcctgaagcgggagtttggggagcacaccaagatgacggacgtcaggaaacccaaggtgatgctgacagggacactgtctgaccggcagccggctgaactccacctcttccggaactacgatgctccagaaactgtccgggagcctcgtttcaaccagaacgttaacctcaggcctccagctcagccctcagaccagctggtgtggcgggcggcccgaagcagcggggcagctcctacttacttccgacccaatgggcgcttcctggacggtgggctgctggccaacaaccccacgctggatgccatgaccgagatccatgagtacaatcaggacctgatccgcaagggtcaggccaacaaggtgaagaaactctccatcgttgtctccctggggacagggaggtccccacaagtgcctgtgacctgtgtggatgtcttccgtcccagcaacccctgggagctggccaagactgtttttggggccaaggaactgggcaagatggtggtggactgttgcacggatccagacgggcgggctgtggaccgggcacgggcctggtgcgagatggtcggcatccagtacttcagattgaacccccagctggggacggacatcatgctggatgaggtcagtgacacagtgctggtcaacgccctctgggagaccgaggtctacatctatgagcaccgcgaggagttccagaagctcatccagctgctgctctcaccctgagggtccccagcctctcaccggccccagctgacctcgtccattcagcccctgccaggccaagcccagccactgccctcccgggcagatctgggcccaggcacctctgagtccatagaccaggcctgggagaatgccaagctgcctgcccgaggctggtcctgaaggcctgtctcccactaaccccgccttccagcactttctgtcattccaggctgggaaagtctagagccccctttggcccctttccctgactgtcaaggacaactgactcccccatcagctcaaacattaagggtacccgggcacaaccgtacccctgcccccagccccagcctccctgagggcctgccgggctgcctctgccccagcccccagcaagggcactcccaggcttcctggtgggtgcagcccactccctctgccctctgctccgttccctgggggctgggactaaagaaatgggtgtcccccaccccatcagctgggaaagcccaggccgcaggagtgggatgcccgttggactttgcccctcacactggcccagcccctcacactgccccaccccgagaaccctcagctctcaaaggtcactcctgggagtttcttcttcccaatggaagtggcttaagagccaaaactgaaataaatcatttggattcaagttc

SEQ ID NO: 13305 - DNA, 3011 bp, Homo sapiens
tttgtttgcggaagtaggaggaagtagaagtgctgagtaagccgagacagagggggaagacggtggggcctccccacctgccccgcagaagatgcagttctttggccgcctggtcaataccttcagtggcgtcaccaacttgttctctaacccattccgggtgaaggaggtggctgtggccgactacacctcgagtgaccgagttcgggaggaagggcagctgattctgttccagaacactcccaaccgcacctgggactgcgtcctggtcaaccccaggaactcacagagtggattccgactcttccagctggagttggaggctgacgccctagtgaatttccatcagtattcttcccagctgctacccttctatgagagctcccctcaggtcctgcacactgaggtcctgcagcacctgaccgacctcatccgtaaccaccccagctggtcagtggcccacctggctgtggagctagggatccgcgagtgcttccatcacagccgtatcatcagctgtgccaattgcgcggagaacgaggagggctgcacacccctgcacctggcctgccgcaagggtgatggggagatcctggtggagctggtgcagtactgccacactcagatggatgtcaccgactacaagggagagaccgtcttccattatgctgtccagggtgacaattctcaggtgctgcagctccttggaaggaacgcagtggctggcctgaaccaggtgaataaccaagggctgaccccgctgcacctggcctgccagctggggaagcaggagatggtccgcgtgctgctgctgtgcaatgctcggtgcaacatcatgggccccaacggctaccccatccactcggccatgaagttctctcagaaggggtgtgcggagatgatcatcagcatggacagcagccagatccacagcaaagacccccgttacggagccagccccctccactgggccaagaacgcagagatggcccgcatgctgctgaaacggggctgcaacgtgaacagcaccagctccgcggggaacacggccctgcacgtggcggtgatgcgcaaccgcttcgactgtgccatagtgctgctgacccacggggccaacgcggatgcccgcggagagcacggcaacaccccgctgcacctggccatgtcgaaagacaacgtggagatgatcaaggccctcatcgtgttcggagcagaagtggacaccccgaatgactttggggagactcctacattcctagcctccaaaatcggcagacaactacaggatctcatgcacatctcacgggcccggaagccagcgttcatcctgggctccatgagggacgagaagcggacccacgaccacctgctgtgcctggatggaggaggagtgaaaggcctcatcatcatccagctcctcatcgccatcgagaaggcctcgggtgtggccaccaaggacctgtttgactgggtggcgggcaccagcactggaggcatcctggccctggccattctgcacagtaagtccatggcctacatgcgcggcatgtactttcgcatgaaggatgaggtgttccggggctccaggccctacgagtcggggcccctggaggagttcctgaagcgggagtttggggagcacaccaagatgacggacgtcaggaaacccaaggtgatgctgacagggacactgtctgaccggcagccggctgaactccacctcttccggaactacgatgctccagaaactgtccgggagcctcgtttcaaccagaacgttaacctcaggcctccagctcagccctcagaccagctggtgtggcgggcggcccgaagcagcggggcagctcctacttacttccgacccaatgggcgcttcctggacggtgggctgctggccaacaaccccacgctggatgccatgaccgagatccatgagtacaatcaggacctgatccgcaagggtcaggccaacaaggtgaagaaactctccatcgttgtctccctggggacagggaggtccccacaagtgcctgtgacctgtgtggatgtcttccgtcccagcaacccctgggagctggccaagactgtttttggggccaaggaactgggcaagatggtggtggactgttgcacggatccagacgggcgggctgtggaccgggcacgggcctggtgcgagatggtcggcatccagtacttcagattgaacccccagctggggacggacatcatgctggatgaggtcagtgacacagtgctggtcaacgccctctgggagaccgaggtctacatctatgagcaccgcgaggagttccagaagctcatccagctgctgctctcaccctgagggtccccagcctctcaccggccccagctgacctcgtccattcagcccctgccaggccaagcccagccactgccctcccgggcagatctgggcccaggcacctctgagtccatagaccaggcctgggagaatgccaagctgcctgcccgaggctggtcctgaaggcctgtctcccactaaccccgccttccagcactttctgtcattccaggctgggaaagtctagagccccctttggcccctttccctgactgtcaaggacaactgactcccccatcagctcaaacattaagggtacccgggcacaaccgtacccctgcccccagccccagcctccctgagggcctgccgggctgcctctgccccagcccccagcaagggcactcccaggcttcctggtgggtgcagcccactccctctgccctctgctccgttccctgggggctgggactaaagaaatgggtgtcccccaccccatcagctgggaaagcccaggccgcaggagtgggatgcccgttggactttgcccctcacactggcccagcccctcacactgccccaccccgagaaccctcagctctcaaaggtcactcctgggagtttcttcttcccaatggaagtggcttaagagccaaaactgaaataaatcatttggattcaa

SEQ ID NO: 13306 - DNA, 501 bp, Homo sapiens
tcagatgccactttgttcagcaggcttcccagatcatccccaggctgactcaggttcctgtgtacaagacagagggggaagacggtggggcctccccacctgccccgcagaagatgcagttctttggccgcctggtcaataccttcagtggcgtcaccaacttgttctctaacccattccgggtgaaggaggtggctgtggccgactacacctcgagtgaccgagttcgggaggaagggcagctgattctgttccagaacactcccaaccgcacctgggactgcgtcctggtcaaccccaggaactcacagagtggattccgacgcctgggctccagtccctgtgtcctgagccccatgaggctgttactggtgctgctcgtctgcccatcctctccagtaacagccacctgaacactgcaattcctgggtttccatcattccttccagcctgactcttccagctggagttggaggctgacgccctagtgaatttccatca

SEQ ID NO: 13307 - DNA, 539 bp, Homo sapiens
tttgtttgcggaagtaggaggaagtagaagtgctgagtaagccgagacagagggggaagacggtggggcctccccacctgccccgcagaagatgcagttctttggccgcctggtcaataccttcagtggcgtcaccaacttgttctctaacccattccgggtgaaggaggtggctgtggccgactacacctcgagtgaccgagttcgggaggaagggcagctgattctgttccagaacactcccaaccgcacctgggactgcgtcctggtcaaccccaggaactcacagagtggattccgacgcctgggctccagtccctgtgtcctgagccccatgaggctgttactggtgctgctcgtctgcccatcctctccagtaacagccacctgaacactgcaattcctgggtttccatcattccttccagcctgatcacatgcccagtagttaactgttaatcaacgcactctctgtggaacaacaggctggtcccgttgagccaacactctctgggcactgccttcactagactctggctg

SEQ ID NO: 13308 - DNA, 471 bp, Homo sapiens
gtgagtgacctcgcgggtgggcggggcctgggggtccgttccccaacttcctcggcgctccggactcccaagtctccgccggaccctcctttggatattcctcgtgtctccgattctgagacagagggggaagacggtggggcctccccacctgccccgcagaagatgcagttctttggccgcctggtcaataccttcagtggcgtcaccaacttgttctctaacccattccgggtgaaggaggtggctgtggccgactacacctcgagtgaccgagttcgggaggaagggcagctgattctgttccagaacactcccaaccgcacctgggactgcgtcctggtcaaccccaggaactcacagagtggattccgatcacatgcccagtagttaactgttaatcaacgcactctctgtggaacaacaggctggtcccgttgagccaacactctctgggcactgccttcacta

SEQ ID NO: 13309 - DNA, 1734 bp, Homo sapiens
ggaaacagtgtggatcacaaggaggtgattgagagctactctgcgtctggaagagtgaggaggagcctgtgtggcagaacaaaatggataagactcttccagctggagttggaggctgacgccctagtgaatttccatcagtattcttcccagctgctacccttctatgagagctcccctcaggtcctgcacactgaggtcctgcagcacctgaccgacctcatccgtaaccaccccagctggtcagtggcccacctggctgtggagctagggatccgcgagtgcttccatcacagccgtatcatcagctgtgccaattgcgcggagaacgaggagggctgcacacccctgcacctggcctgccgcaagggtgatggggagatcctggtggagctggtgcagtactgccacactcagatggatgtcaccgactacaagggagagaccgtcttccattatgctgtccagggtgacaattctcaggtgctgcagctccttggaaggaacgcagtggctggcctgaaccaggtgaataaccaagggctgaccccgctgcacctggcctgccagctggggaagcaggagatggtccgcgtgctgctgctgtgcaatgctcggtgcaacatcatgggccccaacggctaccccatccactcggccatgaagttctctcagaaggggtgtgcggagatgatcatcagcatggacagcagccagatccacagcaaagacccccgttacggagccagccccctccactgggccaagaacgcagagatggcccgcatgctgctgaaacggggctgcaacgtgaacagcaccagctccgcggggaacacggccctgcacgtggcggtgatgcgcaaccgcttcgactgtgccatagtgctgctgacccacggggccaacgcggatgcccgcggagagcacggcaacaccccgctgcacctggccatgtcgaaagacaacgtggagatgatcaaggccctcatcgtgttcggagcagaagtggacaccccgaatgactttggggagactcctacattcctagcctccaaaatcggcagacaactacaggatctcatgcacatctcacgggcccggaagccagcgttcatcctgggctccatgagggacgagaagcggacccacgaccacctgctgtgcctggatggaggaggagtgaaaggcctcatcatcatccagctcctcatcgccatcgagaaggcctcgggtgtggccaccaaggacctgtttgactgggtggcgggcaccagcactggaggcatcctggccctggccattctgcacagtaagtccatggcctacatgcgcggcatgtactttcgcatgaaggatgaggtgttccggggctccaggccctacgagtcggggcccctggaggagttcctgaagcgggagtttggggagcacaccaagatgacggacgtcaggaaacccaaggtgatgctgacagggacactgtctgaccggcagccggctgaactccacctcttccggaactacgatgctccagaaactgtccgggagcctcgtttcaaccagaacgttaacctcaggcctccagctcagccctcagaccagctggtgtggcgggcggcccgaagcagcggggcagctcctacttacttccgacccaatgggcgcttcctggacggtgggctgctggccaacaaccccacgctggatgccatgaccgagatccatgagtac

SEQ ID NO: 13310 - DNA, 10516 bp, Homo sapiens
tgggccccaacggctaccccatccactcggccatgaagttctctcagaaggggtaagacctcctcccctccccatctgctggcctgctgggctccagctctcctgtcacctgtcccgtgcctgaggcaagcagtatccaccatagatcttagcatctccagcctcagagcagaggccccgggttcacaagcctcattaggccccgcctggcccaaagaaggtgctccatcattgtatcatgggtaggaatctcggttcacaagttcagctgtgcaaggaggagactttaaaatttttctggctgggcgcggtgtctcacgcctgtaatcccaacactttgggaggctgaggtgggcagatcacctgaggtcgggagttcgagaccagcctgaccaacatgaagaaaccccatctctactaaaaaatacaaaattagctgggcgtggtgacacatgcctgtaatcccagctacttggaaggctgaggcaggagaatcggttgaacccgggaggcggaggttgcagtgagccgagatcgcaccgttgcactccagcctgggcaataagagcgaaactgtctcaaaaaataaataaataaataaataaataaataaataaaaataaatttatttaatgtaccttaattcctaggagtgaatctccctctataaaactggagacaaccaatcttagccctctttggggtctcctctttccagctcccctccaggtggtgctccagttctggagtctgatgcaaccccaaggcccacctggcccctcctctaacccagcccagcctgatctgaacagccccccgatggcttcagtgctccttggtttcttgtgtgcccagctcaaagcctgggaaatgcttggtaaggtggccgagtgcccgtccacctagatgcctctttcctttctggctggtggcacgttgggaggcaggtacaggctcatgttttgggagcctgggaacccctggtgtcaggaaaattgtcttcaaaggggtaggggatgagataaaaagataaatgaatatctcaaatctcaaaatactatctaggccaggcgcggtggctcacacctgtaatcccagcagtttgggaggccaaggtgggtggatcacctgaagtcaggagttcgagaccagcctgaccaatatggtgaaaccctgtctctactaaaaatacaaaaattagccaggtgtggtggtgtgtgcctgtagtcccagctactcaggaggctgagacaggagaattgtttgaaactgggaggcagaggttgcagtgatttgagattgtgccacagcactccagccagggcgacagaacaagactccatctcaagaaaaaaaatactatctaacaggaacaacatctagaatgaatgaatgagccaatgagtccttcgatcctggcactgtgctaaagcaccagcctcaccgaaatgaataagccactccaggacaggagacaccccagccacccagaatctcatagcgcagtgccagacaagcagtgagaaggcatggacgggcagcactcaggcagggaggctggcacttgtgcctgtcctcaggttgttccttcctctgggagctgcatccaccttgctagccccatggggcattgctagcccttctaagggctggaccaagcctggacaaaccctcctttccttgaatctcccaagcacagccagaatgagctagagctttcagaaatacttgaccaaacagagaagataccaacacccccagccccgcagtcaggttccccatttgcaggttgtgacctgagtggacaccaggtgatgctcttctctacccagagggctggcacatggccccactcttgcttgtctccagccaccctgagctgtactgggcaggagctgtaattgaccagttttctctctcttcaaacaacctcagccctcaccggtccctctgtccccacacaggccatcctgggtgggtccagcgtcccatcacataagaggatctttgcacagaagacaaaggaagaggctcctaccttgagtggagcagggagatcccttatcgacttggcagccagcacagccctactccaagaatcccacggcctcagtgttactgacaagtggttccctcacagctcagactaggagctccctcgctgtttttctttttcttttcttttctttgttttgtttttgagacagagtttcactctgtcacccaggctggagtgcaatggcatgatcttggctcactgcaacctctgcctcccaggttcaactgattctcctgcctcagcctcccaaggagctgggattacaggtgtgcgccactatgcccagctaatttttgtatttttagtagagatggggtttcatcatgttgaccaggctagtcttgaactcctgacctcaggtgatctacttgcctcgccctcccaacatgctgggattacaggcgtgagccaccgcgcctggccacctctgctgtttttcaatgcagctgacctttcccacaaagctcggtttgtgcctgcggttctcagatggttaagcccctgctgaggaagggaaacagataatcccagacagtgagatggaggctgagactgaggatgcctgggggctgcactaggagctcagagacggcatcaggcagctggagttcagggaaggtttgggggcagcagagcccgagccaagccatggacactagccggagctggccactcgggtgaagacttggggggctccagagggcccagggaaagaagctgggcctgactccatgtgcctagtgctgagcaccaagcgctggcataagggctgtagggagctgggcagcataaatcctgggcctgtgctgggcacccctaataatagagaacagcagctgaacactaacgctgtcccagccaccggcttagccttcatgtgggctatttcactatagcccagagagctgatgtattttattccccctctaaagctgagggccaagtgtggtggctcatgcctctaatcccagcactttgggaggctgaggcaggaggatcgcttgagcctaggagtttgaggctacagtgagctatgatcatgccattgccctccagcctgggtgacaaagggaaatcctgtctcaaacaaacaaacaaaaaacagatgaggaaaccagggcttagagagattaagtaatttgctcaaagtcaggcagtcagtaagtgccagacctgggaattaaacccatgtgggctgtcctagtaattgcactaaaaaaaaaaaaaaaaaaaagctttattgagatatagttcctattccatacaatccacctattgaaagtatacaatgattctgatatattatgtttattttttccaactgtgatagattatatataacataaaatttgccattttaaccacttttgttttttgtttttgagacagagtttcgctctcgttgctcaggctggagtgcaatggtgtgatctcggcttaccgttacctccacctcccgggttcaagtgattctcctgcctcagcctcccgagtagtagctgggattacaggcatgcaccaccatgcccagttaattttgtattttttagtagagacagggtttctccatgttggtcaggctggtctcgaactcccgacctcaggtgatccacccaccttggcctcccaaagtgctgggattacaggcgtgagccaccacacccggcccattttaaccacttttaagtgtacaattcggtggttttaatcacatttacaatgttgtccaaccattacccctttctaaaacttttcttatcacctcaaacagaaactgtaaccattaataactcccgattctcccctccccacagcccccgataagtcccatatcctctctgtctctcagaacttgcctgttctagaacctcgtatcagtgaaatcatacagcgtttgtccttttgtgcctggcttatttcacttagcatgatgtcttcaaggctcatccatgttgcagcacgtatcagaatttcctttctttttaaggcagaatactattttgtttatccattcagtccttcactgatagacgcctgggttgtttccaccttttgtctgttgtgaagaatgctgctgtgtacatgggtctgcaaatgtccattcaagtccctgcattccgtcctttgatacttccgacctcaggtgatccgcctgcctcagcctcccaaagtgttgggattacaggcgtgagacaccgcgcccagccagaaaaattttaaagtcttctccttgcacagctgaacttgtgaaccgagattcctacccatgatacaatgatggagcactttctttgggccaggcggggcctaatgaggcttgtgaacccggggcctctgctctgaggctggagatgctaagatctctggtggacactgcttgcctcaggcaccgagtagaaagcaattgtgctctttcccactctgtcatactgcttcctatagcatgcaggtcactgtgtgactcactgacagtgtggtaaggaggtggagggtggctgtgtgccaggcacagaactgggctctgaaatgcctggtcttccttacaccccagccactcctctcagcactctctccatgttgctcagcttctggaggccaccagtgaggaagctggggcttgacttcaagcccatctgactctaaagccagtaccagggagggtgatcattgctggtggcagcatcaggaaggcttcctggaggagggggttagttgtgccttgaggggctcagtacagccttaaccatggtgagtgtgctggttgggtttgctgaactttgtttgcagtgatgctctctgtaagcagtagatgaagctccaagtcctggcttcatcccacgccacgcagaccctagcttctgctcaccaaccggggcccctctctcaccaggtgtgcggagatgatcatcagcatggacagcagccagatccacagcaaagacccccgttacggagccagccccctccactgggccaagaacgcagaggtgagtggatcctgaggtgggtgggtggggcagggggccgggccccgcaggtcctcagggccctcaggaagcaggttcccgagaggaccctgaggctagcacttgggggctgaccttgcagtgggtgtgcaggcagagaagtccatgaagagctgggatcctggcagggctctgctgctctctggctgggcggggggatccgccctgtgcctcagtttcctcatccatgaattctgctttggcgatgtgatgaagtcagcaaggcagtgtgtgacaaaactcggcacaaattgtaaagtgcttcccaaatagaaggtggcgtgatgatgattgtattattagtcaggattctctagagggccagaactaacaggagatatatatatagagagagaggggggtttatttttttattttattttttttgagacggagtctcgctctgtcgcccaggctggagtgcagtggcacaatcttggctcactgcaagctctgcctcccaggttcatgccattctcctgcctcagcctcctgagtagctgggactacaggcgcccgccaccacacccggctaatttttttgtatttttagtagagacgaggtttcaccgtgttagccaggatggtctcgatctcctgacctcgtgatctgcctgccttggcctcccaaagtgctgggattataggcgtgagccaccgtgcctggcctaaagggggatttattaaggagcattaactcacacgatcacaaggtcccacaataggccatcgcaagctgaggagcaaggaagccagtccaagtcccagagctgaaggacttggagtctgatgtttgagggcaggaagcatccagcacgggagaaagatgtaggctgggaggctaagccagtctagccttttcacatttttttctgcctgctttatattctggccgtgctggcagctgattagatggtgcccacccagattaagggtaggtctgccttcccctactgactcaaatgttaatctccgttagcagcaccctctcagacacacccagggtcaatactttacatccttcaatccaatcaagttgacactcattattaaccatcaagatgatgatgatgatgatggatgatgatggtggtggtggtggtgctgggcctagctgcacacacagggagcctggctgggcatctcctctgagttcttcccctaagctaagctctgtcctcctgggaggatggaggcctctggtctcatcaccaggaagcacagcttgacagagaatgggatgccccagagttcatggcctacttctcaatgtgatgggccaggagggagggcactgccagcctcagggtacctctgcattccaggagccggacaccgagtcaggcccttccgtgtaggtttggtcactcattgtcatcacatgctgtgaggtggggacttgcattcccatcttcacagaagccctgaagtgcacatggctacagtgacccatccaagcgcaggcagctgggatgagtgaagctgggctttgggctcaggtctgtgactccaaagccaggctcccctccctgttcccaaggctctgccagggatgtgcattgccaaggcccagtgagaggtgatacctttgcagggttccagggagggatgcagggagcggggtgcttcaggacaggccccagaggagcctttgcaaggagagtgggttctgttggcactaggaaaggaccagaagcctcttaaaacagtcagcacatctttggctttttgtccctagtcttgggatgctgatgggatgggaggcagtctaggcccccctagaactggggcctgcccctggaatcctcttgctagcgctttccaacatcccagtacctgtaggcctctcagagcagaagtggcagtgcccacgtgtcccggggtgcggcagctccccgagtgcctgtgctaactcagcctgaccgtctcccgcagatggcccgcatgctgctgaaacggggctgcaacgtgaacagcaccagctccgcggggaacacggccctgcacgtggcggtgatgcgcaaccgcttcgactgtgccatagtgctgctgacccacggggccaacgcggatgcccgcggagagcacggcaacaccccgctgcacctggccatgtcggtgagcccaggaccgcgtgtcctgccctgtggggccccggtgggaatgcaggagggctgtccggactggagccctcctccccactgtctccctcctatcgtcagctgctccaaatcatcttcccacccaaagctcagttcagaccctgactcctccctcaggaagccttccaagtccccctctcagcccaaaataacaccacctcctgtgtgctgtggtaccttttccacctgtgcccccatttggcacttgcatggcacgagagggaaaaatgacagctctggccatagactggccctgagcaagccatgtcacctgtcagcctcgatttcctcatctggaaaatggtggtgtcaatacttatctggaagagttgtggaaaagttatggtggacacttggtcaccctctacagaatgtctaagtgacacacgcagtacctggcccgagtgagcatcctgcttcccttcactggtccgcgtgttgctctcatcttccctgggaggctgtaagatcctggcaggcaaagcctgagtgtgcagcccagcagcctgtggcaggtgccaggcatattcgttggtttattatagaacacagttcctgccctcaaagcccttactgtctggttacacatctagagtatgaacatattaaacctagcagaggaggacgttactgtgttacagacatatgtgtgtgcatgtattcttttttttcgagatggagtctcgcactgtcgcccaggctggagtgcagtggcgcgatctcggctcaccacaacctccgcctcccaggttcaagcgattctcctgcctcagcctcccaagtagctgggactgcaggcacgtgccaccatgcccagctaatttttgtatttttagtagagacggggtttcaccacgttggccaggctggtctcgaactcctgtgttggccaggctggtctcaaactcctgacctcatgatccacccgccttggcaccccaaagtgctgggattacaggcgtgagccaccgcgccccaccgtgtgcacgttttctatagcaataccgtatgtacagaagtctgtttactgagtctcagtgacagaacatgagagacccccgggactctaaaagctgattcaggacacattcagagacatcctgttttataccaaaggtcaaaacttggaagagatgttgttgcccaaaaggctgaaactataaatagtttcatttttgaaactgtggacatttttagcactgggtgggcccttggaatgatctaactcagcagttctcaagttttttggcctatttgatccctttatactctgaaaaattattgaggatcacaaagattttttaatcatctggattttctttatctatatttaccattttagaaatttaaagtgtgaaaatttcaaaatattaattcatttaaaaataacaataataaatatatatgcctactatgtacccacaaaaattaaaattaaaaattttttaaaaaacttaaaaaataactggccagctgcagtggctcgtgtacaccagcactttgggaggccaagatggtcagatcacctgaggccaggagttcgagaccagcctggccaacatggcgaaagcccatctctactaaaaatgcaaaattagctgggtgtgagacctctgaaagggtatcacgtgttcacaggggtccccaggtcttactttaagaactgctgatagactttggtcatcttcatcccatcttcacagtttttggcatattcatcaaccacctttacaattatgtacttaatcacctcttcaaattggcttacttttatttatttattttgagacagagtttcgcttttgttgcccaggctggagtgcaatggcacgatcttggctcaccgcaacctctgcctcctgggttcaagcgattctcctgcctcagcttcccgagtagctgggattacgttcatgcgccaccacacctggctaattttgtatttttagtagagacggggtttctccatgttggtcaggctggtcttgaactcctgacctcaggtgttccacctgcctcagcctcccaaactgctgggattacaagcgtgagccaccgtgcccggcctggcttacttttaaactgacttaaatttattttgagagaaatgttgcatcactaccataaatggccatccatccatccagtgccaaccataaaaggtaaccaatgcagggcgcggtggctcacgcctgtaatcccagcattttgggaggccgaggtgggcgaatcacgaggtcaggagttcaagaccagcctggccaacatggtgaaaccctgtctctactaaaaatacaaaaaattagctgggcgtagtggtgggcacctgtaataccagctactctggaggctgaggcaggagaattgcttgaactcggtaggtagaggttgcagtgagctgagatcacgccactgcactccagcctgggtgacagagtgagactccgtctcaaaaaaaacaaaacaaaacagtaacaacaacaaaaaatcacagttaatgctgaaaacacacacatatctgtagccatagaagtcctaatagaatgtgaagaactgtttggaaaaccccattctagacccacagcttcattctctaggcagggaaatcgggtcccaagaagaggaaggtgacaaggccagagcccacagttccaggtggccagtgtgtcctctgaaaccatgccatgctctgcgcccctgcccggcctccaggtgtggaaatgtgtgacgttcttcgtggggacactcccccgaaggctgccattaggggcacgtgtgttcggttacccctcagggatgacaccctggactgggtgggcaagatggccttccctgccctcacccaccctctccttgctactcctgaaagccatcagcagctgacctactgtgtccccatggctcctgggtcggggtcacagatgcactgcatctttggaggcggagctggcagagcaggggcgagtcacttctagtttctgcctgggttcttacaccctcccctgtgggtgcttttaagcctgtttgtcaggtccccagccatcaaatggcagactttggactaccagattgacttgggtgggggtgaggagggttccagtgtctccccgtgctgaggagaggcccgctgggtgagttgacaggttggggctggcagccaggggcccctttgttcttcacttccccggcagttgcacgtcttatcctctctccatctccaacagaaagacaacgtggagatgatcaaggccctcatcgtgttcggagca

SEQ ID NO: 13311 - DNA, 499 bp, Homo sapiens
tgggccccaacggctaccccatccactcggccatgaagttctctcagaaggggtgtgcggagatgatcatcagcatggacagcagccagatccacagcaaagacccccgttacggagccagccccctccactgggccaagaacgcagagatggcccgcatgctgctgaaacggggctgcaacgtgaacagcaccagctccgcggggaacacggccctgcacgtggcggtgatgcgcaaccgcttcgactgtgccatagtgctgctgacccacggggccaacgcggatgcccgcggagagcacggcaacaccccgctgcacctggccatgtcgatggagtctcgcactgtcgcccaggctggagtgcagtggcgcgatctcggctcaccacaacctccgcctcccaggttcaagcgattctcctgcctcagcctcccaagtagctgggactgcagaaagacaacgtggagatgatcaaggccctcatcgtgttcggagca

SEQ ID NO: 13312 - DNA, 656 bp, Homo sapiens
agtgacctcgcgggtgggcggggcctgggggtccgttccccaacttcctcggcgctccggactcccaagtctccgccggaccctcctttggatattcctcgtgtctccgattctgagagggggaagacggtggggcctccccacctgccccgcagaagatgcagttctttggccgcctggtcaataccttcagtggcgtcaccaacttgttctctaacccattccgggtgaaggaggtggctgtggccgactacacctcgagtgaccgagttcgggaggaagggcagctgattctgttccagaacactcccaaccgcacctgggactgcgtcctggtcaaccccaggaactcacagagtggattccgctgtgccaattgcgcggagaacgaggagggctgcacacccctgcacctggcctgccgcaagggtgatggggagatcctggtggagctggtgcagtactgccacactcagatggatgtcaccgactacaagggagagaccgtcttccattatgctgtccagggtgacaattctcaggtgctgcagctccttggaaggaacgcagtggctggcctgaaccaggtgaataaccaagggctgaccccgctgcacctggcctgccagctggggaagcaggagatggtccgcgtg

SEQ ID NO: 13313 - DNA, 612 bp, Homo sapiens
ttgtttgcggaagtaggaggaagtagaagtgctgagtaagccgaggtgagtgacctcgcgggtgggcggggcctgggggtccgttccccaacttcctcggcgctccggactcccaagtctccgccggaccctcctttggatattcctcgtgtctccgattctgagacagagggggaagacggtggggcctccccacctgccccgcagaagatgcagttctttggccgcctggtcaataccttcagtggcgtcaccaacttgttctctaacccattccgggtgaaggaggtggctgtggccgactacacctcgagtgaccgagttcgggaggaagggcagctgattctgttccagaacactcccaaccgcacctgggactgcgtcctggtcaaccccaggaactcacagagtggattccgacgcctgggctccagtccctgtgtcctgagccccatgaggctgttactggtgctgctcgtctgcccatcctctccagtaacagccacctgaacactgcaattcctgggtttccatcattccttccagcctgactcttccagctggagttggaggctgacgccctagtgaatttccatcagtattcttcccagc

SEQ ID NO: 13314 - DNA, 2172 bp, Homo sapiens
ggcccgaggcccgtttgtttgcggaagtaggaggaagtagaagtgctgagtaagccgagacagagggggaagacggtggggcctccccacctgccccgcagaagatgcagttctttggccgcctggtcaataccttcagtggcgtcaccaacttgttctctaacccattccgggtgaaggaggtggctgtggccgactacacctcgagtgaccgagttcgggaggaagggcagctgattctgttccagaacactcccaaccgcacctgggactgcgtcctggtcaaccccaggaactcacagagtggattccgactcttccagctggagttggaggctgacgccctagtgaatttccatcagtattcttcccagctgctacccttctatgagagctcccctcaggtcctgcacactgaggtcctgcagcacctgaccgacctcatccgtaaccaccccagctggtcagtggcccacctggctgtggagctagggatccgcgagtgcttccatcacagccgtatcatcagctccttggaaggaacgcagtggctggcctgaaccaggtgaataaccaagggctgaccccgctgcacctggcctgccagctggggaagcaggagatggtccgcgtgctgctgctgtgcaatgctcggtgcaacatcatgggccccaacggctaccccatccactcggccatgaagttctctcagaaggggtgtgcggagatgatcatcagcatggacagcagccagatccacagcaaagacccccgttacggagccagccccctccactgggccaagaacgcagagatggcccgcatgctgctgaaacggggctgcaacgtgaacagcaccagctccgcggggaacacggccctgcacgtggcggtgatgcgcaaccgcttcgactgtgccatagtgctgctgacccacggggccaacgcggatgcccgcggagagcacggcaacaccccgctgcacctggccatgtcgaaagacaacgtggagatgatcaaggccctcatcgtgttcggagcagaagtggacaccccgaatgactttggggagactcctacattcctagcctccaaaatcggcagacaactacaggatctcatgcacatctcacgggcccggaagccagcgttcatcctgggctccatgagggacgagaagcggacccacgaccacctgctgtgcctggatggaggaggagtgaaaggcctcatcatcatccagctcctcatcgccatcgagaaggcctcgggtgtggccaccaaggacctgtttgactgggtggcgggcaccagcactggaggcatcctggccctggccattctgcacagtaagtccatggcctacatgcgcggcatgtactttcgcatgaaggatgaggtgttccggggctccaggccctacgagtcggggcccctggaggagttcctgaagcgggagtttggggagcacaccaagatgacggacgtcaggaaacccaaggtgatgctgacagggacactgtctgaccggcagccggctgaactccacctcttccggaactacgatgctccagaaactgtccgggagcctcgtttcaaccagaacgttaacctcaggcctccagctcagccctcagaccagctggtgtggcgggcggcccgaagcagcggggcagctcctacttacttccgacccaatgggcgcttcctggacggtgggctgctggccaacaaccccacgctggatgccatgaccgagatccatgagtacaatcaggacctgatccgcaagggtcaggccaacaaggtgaagaaactctccatcgttgtctccctggggacagggaggtccccacaagtgcctgtgacctgtgtggatgtcttccgtcccagcaacccctgggagctggccaagactgtttttggggccaaggaactgggcaagatggtggtggactgttgcacggatccagacgggcgggctgtggaccgggcacgggcctggtgcgagatggtcggcatccagtacttcagattgaacccccagctggggacggacatcatgctggatgaggtcagtgacacagtgctggtcaacgccctctgggagaccgaggtctacatctatgagcaccgcgaggagttccagaagctcatccagctgctgctctc

SEQ ID NO: 13315 - DNA, 20444 bp, Homo sapiens
ttctgctaagaatgctccttcccaactccttggctggacacacggctcctgctctgtgggcctgtcctgttcccactcagagcctcagcaccccccatgtggccaagacacagcccctcttgccttaggttgccgtgggtctgtttccacatctgtttcccctccagactgcagggctcctgagggacagggcctggggccaagtctcctctgcgttcctgatgcctggtggtgtgccacgctctccgtgggtgcacggtaaatatctgccgagtggctagatgtatccatggttgctgaaggccaagtgtgttgaccagagggcgtgggaaaggctccactggggtggctggggtagagatagaccttaaggggtccagaagactccaccagctggagggaaaggccctacagagacaaggtactaggaaaggcccagaggacagaggaggggccctgtggggagcctgtgggcaggaagggcctgtgctgggctttgaaactggggactcaggtactgctctagcgtgagggtccttggcattttttttggtccaggaccccctgaggtccctggggaatgagaacaggctcacacagccactttcaagaggtttgcaggtcccctgaggcttagccacagacccctcccaccccagcagagacacagcagaggcttctgagtggaggccaggtggcttcagcctggggttctagaagggagggaagagacacacccccgtgtgtcctccagagcctcagccttctccctgaatctcccctttgcctcctcactgtaacccacacctggctctccttgaaggacccgcttgccccgcagcctcctgagagttttctctcccagtccctctcccactgggcctggaggtggggtagggtcctccttgcccccagccttgaatcttctgtcaccctacaataccacttgctgtcaccccggtgataggtatctacgagcctggggtgctcccccacatcctcaaagatgtgagcccctgactcagcgttgcctctggttcctgaccctccacattcacatgaccacgcgctggcctttatcatcgccagtgacagcagctctcccgtaaatacaagtttcaagcaccccactttccagtctctgccttctgtctttccagttcattccctctagtcctccacccacacagtgcttttccccattgacagggaattgctcctggccgcttttcccagccccatcccgttcatgtgccttgctttgtacccagcatggactccatggcctgtcattgtcactccttcacctatacttcctgcctccttgcttctctctctcttcgtcatcctggcatcaccaccccagaactgcttggtttcagttctccaccatggctaggggaacatacctttttgctgactgctctcactttctttttttttttttttcttttttttttttttgacacagagtctcgctctgttgcccaggctggagtgcagtggcacactctcagctcactgcaacctccacctccggggttcaagcagttctctctgcctcagcctcctgagtagctggtattataggcacccgccaccacacccggctaatttttgtattttttttagtacagacagggttttgccatggtggccaggctggtcttgaactcctgacctcaggtgatatgcctgccttggcctcccaaagtgctgggattacaggcatgaaccaccctgcccggccctattgctctcactttgaaatcacgacatgagccacagtgagcctatgatgtggtttgacgtctttctgcatttctctgttcacccctctcccagaaggcatgcctccttccctcccctcagcctgcagccccttcccctccacgcttactctcagctgatagccctgctgctgtctcgctgagaaaatagaaatagccagaggagaattccctctaccccatgcacacacctctgtccccgcctactccacattccctgttgtcagcaccgatgtgtttagctgagggtggtccccccattcaaggccatcatctcctgtcatctacttcttgacaccatttgaacaattatctcccctctttcctacataacactttccccttttctactatatattttttgctatggattgaaagtatccccccgaaatcatatgttgaagccccaatccctcgtgtgatggtattaggaggtagagcactatgggggtgattaggtcatgaggatggagccctcatgaatgggattagtgcccttagacgaagaggcaagaaagagatgatctgtctctgccatgtgagggcacaacgagaagatagccatctgcaaaccaggaagtgaaccctcatcaggaactctatcagccagcaccttgatcatagacttcctagcctctagaactgtgagaaataaaggttgtttaagcctcccagtctgtagttttctgttataatgtcctgacctaagttattttccatcgctatacaatgggttatttttttctttaaaaaaaaattatttcttgactctactttttcctccagagactgcttatattccactgtcttcattcttctcctcctgttttctctctttaaacttttcaaaaatagcaaaatataacacatatagagaaaatgatatacagctcagtgatttatcacaaacacctgtgtaaccaccactcgaatctagagataggacattacagcaccccagaagccctccttttgtcccctcttcccaaagaagggtaaccaataacttgccttttatgataaaggctttttttttttgagatggagtctcactgtgttgcccaggttggagtgcggtggcgcaatctctgcttactgcaagctctgcctcctgggttcacgccattctcctgcctcagcctcctgagtagctgggactacaggtgcccgccaccacgcccggctaattttttgtattttagtagagacgaggtttcaccgtgttagccaggatggtcttgatctcctgacctcgtgatccacctgcctcagcctcccaaagtgctgggattacaggcgtgagccaccgcccccggccaagataaaggcttttctatctggcttctttgttagcattttgttggcgagattgatacgttttgtgtgcagctgtctgtcattttcattgcaatagaattccattgtctactatatcacagttactcattctactactgatgaaaatttgggttatttctagtttttttggtgcatacatgcatacatttctggtagacatacctagaagtgaactggctgcattatgggccataacttgtcttcaacgttagtaaataataccgcccgtctgttttccaagcagcagtaaatggcactttctgttacttcatatcttctgttacttggtactgtcaggttttaaaattttagtcattctgtcgggtgtctagtagtatgttattgtggttttattttgcatttgcctgattgcaaatgaagttgagcactttttgatacagtgattaaccatttggatatcctcttcagtgaagtatcagctcaattctcttgactatttaaaaaataaagttgtttatctttttcttacagagttttaggaggagttttttggtacatgtgcagtccaaatacacaccttttgtcagtgatacgtgttcagctgcacacacggtgttttgcctttttattcttttaatggtatctattgataaacatgagttcttagttttaatgaagtcaaatttgttcatcttctttacggtgtactttttgtgtcttgtttaaggaagtccttctctatcttaaagctttgagaagcattccttctttctcctattttctaaaaattgttgaagatctccttccttccttccttccttccttccttccttcctttcatctatctctctctcacccaggccaaacttcagtggcatgatcatggctcactgcagcctcaacttcccaggctcaagtgatcctcctgcctcagcctcctgagtagccaggactacaggcacgcaccaccatacctggctaattttaaaaattttttgtagagacacggtctcatcaagttacccaggctggtcttgaactcctgggctcaaacaatcctcccacctcagcctcccaaagtgctgggattacaggcatgagtcacatgtctagcctgtattctttctttcttaaatgtttggaagaattcatgggtaaaaccatgtgaccctggagtttatttgtgggaagcttttaaaacatggattcgatttctttaacaaatataggactatgagattttcatctcatgtcggtttgggtatgttgtgttttcaaggaatttttctattttatcgaagttgtcaaatttgtctgcaggtccccttatttcctttttaatgtatggaggatctgaagggatggtactttgtgttgtctctatttcttgtttggttttgctagtgatttgccaatttaaaaaatctttccaaagaaccaacttttggctttgtttattttttgaaaacctgagtagctgggattacaggcgcccaccaccacacccggctaatttttttatttttagtagaggtggggtttcaccatattggccaggctggtctcgaactcctgacctcagatgatccacccgcctcggcctcccaaagtgctgggattacaagtgtgagccagtgtgcctggcaagccgctttttaaatggcaccaatcccattcatgagggcagagccctgatgatcgaattacctcctaatggccccatttcttaatactatcacactgagaattaagttttaacataagaattttaggaagacacaaacattcagaccatggaacatatataaaacagttgtcctaccaactaacagaatacacattcttttcaagaacacctatataaaaattatagacactgacctatgctggccataaagcaaatatgaacaaatttcagatacctgaagagatttagactatgttctccaactacagtgcaattaagctagaaatcaatagcaaaaatgtaactataaatgagcccgtatgtttgaattttaagcaagatatatgtaaattatctatggttcaaaaaagaagtcacagtgaaatttagaaaatatcttgacgtggcgggttgcagtggctcacgcctgtaatcccagcactgtgggaggccaaggcgggtggatcacctgaggtaaggagtttgagaccagcctggccaacatggtgaaaccctgtctctactaaaaatacaaaacattagccaggcgtggtggtgggcacctgtggtcacagctacttgggaggctgaagcgggagaatcacttgaacccgggaggcagaggttgcagtgagccgagattgcaccactgcactccagcctgggcaacatgagtgaaacttcatctcaaaaaaaaaaaaaaaagaaaagaaaaagaaaatatcttgacccaatgatgatgcaaatactacgtatcaaacttgtaggatgaacttccacttctggccatgacagaggagcctgtatcagactagccttcctatttatatatttatttttgagatggggtgtcgctctgttgcccaggctggagtgcggtggtgcaatctcagctcactgcaacctccacctcctgagttcaagtaattctcctgtcccagccttccaagtagctggaattacaggcgcccaccaccacacccagctagttttttatatttttagtagagacggggtttcaccatgttggccaggctggtctcgacacctgacctcaggtgatccacctgcccctgcctcccaaagtgccgggattacaggtgtgagccactgcgcctggccgtgagtgacctttttaatgtgttgttgaatttgatttgctggtattttgttgagaagttttgcatcaatatccatcagggatactggcctgtagttttctttttttatatgtctttgtctggttttggtgtcagggcaatactggcctcatagaatgagtttggaagttttctctcctctgtttttcataatagtttgagtagggttggtattagtttttgtttaaatgtttggtaaaattaagcagtgaagccactgggtcccaggcttttctttgctgggagacttttcattacagctttgatctcattacttgttattggtctatttaggttttggatttcttcacggttccatcttggtaggttgtgtatgcctaggaatttatccatttcttctagggttttcaatttattggcatataattgttcacagtaacctctaataatcctttgagtttctgtgatattggttgtaatatctcttttgtcatttctgatttttttgtttgggttttctctctttttttgttagtctagttaaagatttattgattttgtttatcttttcaaaaaactttattttgttgatcttttgtattgttttgtttcaatttcatttatttctgctatgatctttattatttcttttcttctactaattttgggtttggtttgctcttttctagttctttaagagacatcattagattattttgaagtttttctacttacttgatgtaggtgcttataggtacaactttcctcttagtacttctttccctgtatctcacaggttttgatatgttgtgtttccattatcatttgtttcaggatgtttttaaatttccttcttaatttcttcattgaccattcaagagcatattatttcatttccatgtgttcgtatggtgtgcaaaataccttgtttttgatttgtagttttatttcattgtgatcacagaagatacttgatatgatttcaaatttaaaaagtaatttggctgggagaagtggctcatgcttgtaatcccagcgctttgggaggccgaggcaggcagatcacgaggtcaggagatcgagaccatcctggctaacacagtgaaaccccgtctctactaaaaatacaaaaaattagccaggcatggtggcaggtgcctgtagtcccagctactcaggaggctgaggcaggagaatggtgtgaacccgggaggcagagctggtagtgagccgagatcgcgccgctgcactccagcctgggtgacagagcaagactctgtctcaaaaaaaaaataataacaataataataatttaagacttgttttgtggcctaccatatggtctatccttgagaatgatccatatgctgaggagaagaatgtgtattctgcagccgttggatgaaatgttctgtaaatatctaataggttcatctgatctatactgcagactaaggctggtgtttctttgttgattttctgtctggatgaactgtctaatgctgaaagtggagtattgaagtctccagctattattgtattgaggtctatctctctctttagctctaagaatacttcctttatatatctgggtgttccagtgttgagtgcatatgtatttaaaattgttacattatcttgctgaattgacccttttatataatgaccttctttgtctctttttatagtttttgtcttgaagtctgttttgcctcatagaatagcatagctattcctgctcttatttggtttccatttgcatggaatatctttctccatccctttagtttcagtctatgtgtgtctttacaggtaaagtgtgtttcatgtaggcaacagatcactgggtcttgtttttctatccgttctgccactctgtgtcttttgattggagagtttagtccatttatgttcaatgttattactgacaagtaaggacttactcctgccactttattaattattttcttgttgctttgtgatcttctttctttccttcctgttctccttttagtgaaggtgattttctctggtggtatgttttaatttcttgctttttatttttttgtgtgtatctgctgtatgttttttgatttgaggttaacatgaggcttgcaaataatatcttataacctaatattttaaactgatgacaccttaacactgattgcataaacagacaaacaagcaaagagaaaactaataaaaactctacattttaactttgtccccccactttttaacttattgtactgtttatgtctgaaaagttgtagttattatttttgattggttcctcttttagtctttctactcaagatatgagtggtctacatatgacagtgttataatattctatatgtttctgtgtacttgctattaccattaagttctgtactttcaagtgatttcttattgctcattaatgtccttttctttcagattgaaaaactccctttagcatttagcagtatgtgaactgcatttttcaagtccagaatttctgcttgattcttttttttttttttgagatggagtcttgctctgtcgcccaggctggagtgcagtggcgcgatttccgctcactgcaagctctgcctcccgggttcacaccattcttctgcctcagcctcccgagtagctgggattacaggcgcccgccaccacgcctggctaattttttgtatttttagtagagatgggatttcaccatgttagccaggatagtctcgatctcctgaccttgtgatccgcctgccttggccttccgaagtgctgggattacaggcgtgagccactgtgcccagcctgcttgattcttttaaattatttcaatctctttgctaagtttatctgttaggattctgaattccttctctgtgttagcttgaatttcactgagttccctcaaaacagctattttgaattctctgtctgaaaggtcacatatctctgtctctccagaattggccactggtaccttaattagttcatttggtgaggtcatgttttcctgtatggtcttgatgcttgtgatgttcgtcagtgtctgggcattgaagttaggtatttattgtagtctttgcagtctgggcttgtttgtatctgttcttcttaggaagactttccaggtaataaaagggacttgggtattgtgatctaagtttttggtcactgcagccatatctgcattagggggcaccccaagcctactaatactatggctcttgcagactcgtaaaggtaccacttgggtggtcttggataagatctggaagaattctctggattaccaggcagaggctcttgttctcttcccttactttctcccctaaaagtggagtctctctctctgtgctgggccgcctggagctaggagaggggtgacacaggcacctctgtggccactatcactaggactatgctggctcagacctgaagccagcacagcactgggtctcacccaaggcctacagtctccactgcctggctactgcctacgtttgcttaaggcactagggctctacagtcagcaggtggtgaagccagtgagattatgtccttcccttcaaggcagcaagttccccctacccccatcctgggaaggtccttagatgccatctgggaggcagggcctgcagtcagaaaccttagtaatctccccagtgctctattctattacagcctggctgatacccaagccataaggcaaagtccttcctgctcttccctcccctttccacaagcagagaagtctctctccatggccaccactgccccagccctgtggcagtgctgccaggccactgccaacgttcattcagggcctaagggctcttgaagcaactgaacactgccaggcctgggactctccctttagggtagtgggctcccctctgacccagggcaggtccagaactgccaccccacagccaacacttagaatctgggaccccaagagccctcttggtgctctgccacactgtagctgagctggtacctaggctgatttttgctttttatgaaggtacttttttgtgtgtatagttcaatttggttttcctccagggaggacaattggtggaggtttctatttgggcatcttttttttttttttttgagacggagttttgctctttcacccaggctggagtgcagtggcgcgatctcggctcactgcaacctctgcctcctgggttcaagcgattctccagcctcagcctccccagtagctgggattacaggtgcctgccaccatgcttggctactttttttttcaattaaaaagtaaactttaatgtcgaaaatgcaaacttggggaaggcagaaagatcacacacaaggctgtcgcttcacacttggaaggttgcacggcggccaggagaggcactcctcacttcccagacagggcgggggccgggcagaggcgctcctcacttgccagacggggcggcggccacatgcctggctaatttttgtatttttagtagggacggggattctccgtgttggccaggctggtctcaaactcctgacttcaggtgatccacgcacctcggcctcccaaagtgctgggattacaggcatgagccaccgcgcccagccctatttggccatcttgctttgcctccaccttcatttgataacagaacacccccatgtaaccaccaccacaatcaagatataagacatttctgttattctccaaatttccttcaccctcctttatagtccatggcacccaccccatccctgggcaacacctatgtgcttcctttttttttttccccgcaggaggacgtcttcctatacctatgtgcattccatcactgctgcttttaatcatatagcgtgtagtcttatgagtctgactttttcacttagcataatgcttttgcaatttgtgattgagcgttttcatatgattctgttttttctgtctcttagcttggaagttatacactttttagtagtaactgttgggagatcgttctccaagagtctctctcatatttccatacatcctgctagcagagacattgactacctgtttttgtctgtttagtgttgctataaaggaatacctaagtctgagtattatacatagaaaagaggttttatttgtctcatggctcctcaggccatacaagaaacatggtgccagcatcttaccagtgtcacatggcaagaaaggaagtgaggaagagaaaataagttgttaactggttgttaaaaagtgccaggcacgggccaggcacagtggctcgtgcctgtaatcccagcactttgggtggccaaggcgagtggatcacctgaggtcgggagttttgagaccagcctgaccaacatggagaaaccctgtctctactaaaaaaaatacaaaaaaattagctgggcatggtggtgcatgcctgtaatcctagctactcgggaggctgaggcaggagaatttcttgaatccaggaggtggaggttgcagtgagccaagatcacctgggcgacaagagcgaaactctgtctcaaagaaaaaaaaagtgccaggctctttttaacaaccagttcttacaggaactaatagagtgaaaactcactcacccccaccccacagggagggcattcattcatgagggatccacccctatgacccaaacacctcccattagccccccacctccaacattggaatcaaaatttaacatgaggtttggggggcagaaatccaaattatagcactacctttgttccaggctaccttcaaaggatgtttatacagcaaacagccttggaaaatagagttagggtctccttgtagagcacagggtaagtttgcttacttttcagcataatcaagattgtgtcttcttctggagcaaaactttgacaacaacaagcggggcaaagtctgaaaccttttgcacatcttgacagaaccttagagattacgagatttatctctgccttactcaaggtccattagtatcttccagaacaataagttggtcttagaatcctttagctatgtattcccttccaggcttcgatgctgtgtgctgttgttttatttagtttttattttaaacccaacaagacgctataccatcaatacttatttagatccccccacatatttaacttgccatggtgcttcattctttcatgcctctttaagcatccatctaggatcgtgttcattccacatgaagagaaagcttttggcccagcacgatggctcacacctgtaatcccagcactttgggaagcctaggcgggaggatcgcttgagcccaggatttccagaccagcctgggctacgtggcaaaaccctgtctctactgaaaatacaaaaaattagccaggtgtggtggttcacgtccctgctactcgggaggctgaggtgggaggattacttaaacctgggaggttgaggctgcagtgagcgttgattgcaccactgcactccagcgtgggtgacaggagtgagaccatgtctccaaaaaaaaaaaagaaggaaagaaaaagcttttgtatttcctttcgtgtaggtctgctaatgacaaagtctctgggttttttgtttgactagagaaatgttttaattttaaccttattcttgaaggttttgtttttgttttcattttgttttgtgtgctaagtacagaattctcattggcatttatttatttagagacagagtcttgctctgtggcccaggctagagtacagtggcacgatctccgcctcccaggttcaagcgattctcctccctcaacctcctgagtagctggggctacaggcatgcaccactacacctgactaatttttgtatttttagtagagacggggtttcaccgtgttgcccaggctgatctcaaactcctgagctcaagtgatttgcctgccttggcctcccaaagtgctgggattataggcatgagccgccgtgcctggccagcatttattttcttttcagctctttaaggaagtcattccattatctctgggttccattgttgagaagccagctgtcattctaatggttgccctttgaagataacttttttccctctgctattttaaatatttcctccttgtattttattttcaacaggtgtaatgtggcacatatatcagcaattgttatgttacatacaatacatattgtgcaacatatgtatcattatcagttattgctgtgtaacaaactactccagaacacagtggcttataaaaggaatcatttatttagtccttaaatctgcaatttgagcagagctcagtgggaaagcctcagctttactttatatggcaccatataaggtaactcgcaactggcaagttggtgctggctgttggctggtagttcattcagggctcagggcccaggaccaagagtcgtcaccatggcttgcttcagcctccttgaggcatgatggctgggtcccaagagaagagaaatagaaacttccagtctcttaaggcattggtctggaagctgggacggcatcacttttgccatattctgttggtaacgcagttacatcgccagattaaagggtaaagagatacaaattcccactgctcagtgcaaggaatatcagtgattttagggggccctgttttaaaacccctacaaggtgctaagcgtggatttctggggctttcttgttttttgtttttttctatgtgtttttttttttttttttggtggtggggtcagggagggcttatagggtatgttaaatcagcagaataattttatttatttatttggagatggagtttcactcttttgcctaagctggagtgaagtagcgtgatcagagatggagtttcactcttttgcctaagctggagtgaagtagcgtgatctcggctcactgcaacctccgccccgctggttcaagcaattcccctgccttagcctcccaagtagctgggattataggcacccaccgccacgcccggctaatttttatatttttagtagacatggggtttcgccatggctagtctggaattcctgacctcaggtgatccacccaccttggcctcccaaagtggtgggattacaggtatgagccactgtgcctgacctataatgttttttaaaaatcagttttggaaagtttgcagacattaacttttcaaatgtagcttccatttgattctttttctactctgcctctgatcctccacttatgtatgtatgctagatcttttattagatagtctgtgtctcttatgtactctactatattttgtattcttctgtctctccatgctttattctgtttactctttcctgattatattttttaattttgtaatttccatttgatgcttttttgatcattcaaaactcttcaccaaaattctaaatttccttttttaacctctcgaatgttatcacagttactttaaagtctattttggataacttaaatatttacagtcccctcacagatatgtttcttttgtatattgtttctgttggttttctttcatgtcttatctccacatatgcctggtgagttttgattatgtgttggtcattgtatttgcaagtatgctcgtagaaataatctggaatggccgggcgcagtggctcatgcctgtaatcccagcactttgggaggctgaggcaggtggatcacgagatcaggagatcaagaccatcctggctaacatggtgaaaccccatctctactaaaaatacaaaaaattagctgagcatggtggcacgttcctgtaatccctgctactcgggaggctgaggcaggagaatcacttgaaccaggaggcagaggttgcagtgagccgagatcacgccactgcactccagcctgggtgacagagcgagactccgtctcaaaaaaaaaaaaaaaaaaaaaaaaagaaataatctagagcctagtttgatgtttccttacaaagaatgaatttatttttgcttctcccattgcaactaggataacctcagtctagtttctggaactgaaatcacttgaggctgaactgtggtctctgtgagagcgtgtctgtgtatggctcacccttattcctaggctacgtagttctttaggaccctaacccaaagtaagagatgttcatcagggctctcctcttggcagacgcctgggctccagtccctgtgtcctgagccccatgaggctgttactggtgctgctcgtctgcccatcctctccagtaacagccacctgaacactgcaattcctgggtttccatcattccttccagcctggtgagtcatcagtgtcttttgaggtatccagtgcctgccagcagatgttttttaataatttgtccagcatttctggctgtcctcagtaggtggtctgtttcacattccctagtctgctgttaatggaaagtggaagttctgagagagaatcatcgttcccgtcagcattcaaatgcctgattacactttccccattcgctatcctttcctttatttgctcctcaccacagcaaaactcctcaaaaatatctatctttgcaatcttcagattctcacattgtgtccttaaacccactttaatcaggccttggttccctccattccactaaaagtaatgttgtcaaggtcgtgcatgcctccgtgatgctaattccagtgatgagttttcagttgtcattctctgacatatcggcaacacttgatgtggagtaccctgatgttgagaggctggtgagatgaaggaaaaacccagccaagggcaatgaggaatggcttccttccgcctcctccttccctatctttgttgtggtttttgttgtttctgtaacactgattacgttatagtttatttaatgtacttccttattctatgtttttactttagtcattttgttgatctcctccataataacataggctcgggccaagcacagtggctcacgcctgtaatcccagcactttgggagaccaagatgggtggatcacttgaggtgaggagttcgagaccagcctggccaacatggcgaaaccctgtgcctactaaaaatacaaaaattagctgggcgtggtagcaagcgcctgtaatcccagctactagggaggctgaagcaggagaattgcaggagaatcacttgaacccagggggcagaggttgcagtgagctgagatcgcgccactgcactccagcctgggtaacagagtgagactctgtctcaaaaaaaaaaaaaaaaaaaaggcttcaggagggcagagcattttatgcaattgttcattaattgacccctccatttggcacagatcacatgcccagtagttaactgttaatcaacgcactctctgtggaacaacaggctggtcccgttgagccaacactctctgggcactgccttcactagactctggctggctgctgcgcttgtagaggtatgcaagacaaaaccttttggtatgttaaaagccctggtcagaactttaagtaaccatcactgacatataatggttatggttttgaaagtgcttttatagtggtttttcatctgtcctcacagcacctctgggaggtaggtaggacaggtacagttagtctcatgtttcaaatggggctcagagagggaaaaggatttcccaagatcacacagcaccttagtagcaaaacttggactcaacctcaacacttaaaaatgaacaaagctggccgggcgcagtggctcatgcctgtaatcctagcactttgggaggcccaggcaggcaggtcacctgaggccaggagtttaagatcagcctggccaacatgacaaaactctgtctcttctaaaaatacaaaaaattagccgggcatggtggcgggtgcctgtaatcccagctactcaggaggctgaggcaggagaatcacttgaacctgggagatggaggctgcagtgagccgagatcgtgccattgtactccagcctgggcaacaagaatgaaactccatctcaaaaaaaaaaaaaagaaaagaaaagaaaaagaaaagtttccctttttttaaatatctcattttaatgactgcataatagtttattacatagttataccataatttatataatattttgttgctgtacatttaggttaaacaatacttacttagttcctactatgaagaggggccaagtactcgaggctggagctctcacatgtggcaatgaaattagaaagtggatatggcagggctgtggtaaaataaaatataaaaataataaatgatattaccaaagaaaaggaaagtttttcaaaataaaggaaaatctagacaagcatagtggctcacacctgtaatcccagtacttttggaggctgaggcaggaggaacacttgaggccaggagttcaagaccagcctgggcaacatagcaagaccccctgtcaacaaaaataaaaaaaaattaggccaggcacagtggctcacggtggctagtgcctgaaatcctagcactttgagaggctgaggggggtggattgcctgagctcaggagttcgagaccagcctgggcaacatggccaaaccccatctctactaaaaacacaaaaaattagccaggtgtggcagcacacgcctttaatcccagctactctggagactgaggtaggagaattgcttgaacccgggaggtgaaggtcgcagtgaggtgagattacaacactgcactccagcctgggtgacaaaatgagactctatctcaaaaaaaaaaaaaattagctgggcatggtggtgcatgcctgtaatcccagctactcaggaactaaggtaggaggatcccttcagcccaggaattcgaagatgcagtgagtcatgatcacaccaccgcaccccagcctgggttacagagcaagaccttgtctctaaaaaacaaagaaagtctaacctaaacgccattatgtcatttacatgtgtataggggtgtgtgtgtgtgtgtgtgtgtgtgtgtgtgtgtgtgtgtgtgtgtgtgtttgcttgggaggggagtcgggctggagctggccaggccgcagcctggggaccttctgattccagcagggatgtgggccgagggtcccgccttactcatttcgggtcttgctcctctgtcctggctctacagactcttccagctggagttggaggctgacgccctagtgaatttccatcagtattcttcccagctgctacccttctatgagagctcccctcaggtcctgcacactgaggtcctgcagcacctgaccgacctcatccgtaaccaccccagctggtcagtggcccacctggctgtggagctagggatccgcgagtgcttccatcacagccgtatcatcaggtgagcaagggaacaagaccatttggacaacgtgtgtgtacctgcttgtgtgggcagtgggggccgcaggcctcggttcccctccatagtttgacttaaaaaggagcagggcctggcatggtcgctcactaacgcagtcccagcactttgggaggctgaggagggaggatcacttgagactaggagttcaagaccagcctggcaaaatagcaagaccttgtctctacgaaaaaattaaaaaattagcatgtgtctatactcctagctacttgggatgctgaggcaggaggattgcttgagcccaggagttagagtttacagtgagctatgattgcaccactgcacttcagcctgggtgacagaatgagaccttgtctctaggaaaaaaaaaaaaaaaaaaaaaaaggtgctgcgttgctaccagattaaaatgtaagaaggacaatgtaatgtttccagagtccggagtgctcaccaggtgccaggtctgtgggagctgatttctacccaccatgaaattgaattttcccaacccccacaaggtatcgtcattttattttactttattttattttattttattttattttattttattttattttatgttacgttatgttattttattttgagacggagtcttattctgtcacccaggctggagtgcagtggcgcgatcttggctcactgcaccctctgcctcctgggttcaggtgattctcctgcctcagcctccggaatagctgggattacagtaatgtgccatcatgcccgggtaattttttttttttttttttttttttttgagacggagtctcgctctgtcgcccaggctggagtgcagtggcgcgatctcggctcactgcaagctccgcctcccgggttcacgccattctcctgcctcagcctcccgcgtagctgggactacaggcgcccgccaccacgcccggctaatttttttgtgttttttagtagagacggggtttcaccatgttggccaggttggtctcgaactcctaacctcaggtgatctgccctccttggcctcccaaagtgccgggattacaggcgtgagccaccatgcccggcccaggtatcatcattctagagagagctaacaggacttgtgcaggtcactcagccagagagggtgaaagaggggcttggatccttggtgtctgcccaggctgctcttctggaagctgaaggcctccttttgtgaatccattcagccagcagatggagcagctgttgcccctggtgagggcactgtccccacccttgcacagggcaccagttggccatcttgtgcagaggtagccacacctcctctgagtctctatcctagatagctcagttaagctcccaggcccagaactcaaaacctcactgctggccgggcgtggtggctcacacctgtaatcccagcactttgtgaggccgaggcgggtgtatcacttgaggtcaggagtttgagaccagcctggccaacgtggtgaaaccccgtctctactaaaaatacaaaaaattagcaaggcgtggtggcgcacgcctgtaatcccagctactcgggaggctgaggcaggagaattgcttgaacccagaggcggaggttgcagtgagccgagattgtgtcactgcattacagcctgggcaacaagagtgaaactccacctcaaaaaaacaaaacaaaacaaaaaccctcactgcactttagtttccaggcgtgcttttggacagcactgtctcatctcaccatcactctgtccatttcctggggcaggcacagcagcttgtgtcgataaggatattgacgcccagaaaggttaagtgaattgcctgaggctagtgagatatccgtgttctgtgaccctttcctgtgccaccaccctgcccacttcctgctggtgtggccctggggcccatctcttgtacgagtgagcaaactgaacagaaacctgatacaggtcacatcagatataattacattcaaatcagcccaactagctgagtggcgggaatgctcttgagctcaaataaaccagaaagtccgagtttccgagtgcacttccctgcatgtgcacttaggtccccctgccaccttgtaccacacctgctcacctctgctcaccctggccctctcctgcagctgtgccaattgcgcggagaacgaggagggctgcacacccctgcacctggcctgccgcaa

SEQ ID NO: 13316 - DNA, 534 bp, Homo sapiens
ttctgctaagaatgctccttcccaactccttggctggacacacggctcctgctctgtgggcctgtcctgttcccactcagagcctcagcaccccccatgtggccaagacacagcccctcttgccttaggttgccgtgggtctgtttccacatctgtttcccctccagactgcagggctcctgagggacagggcctggggccaagtctcctctgcgttcctgatgcctggtggtgtgccacgctctccgtgggtgcacgactcttccagctggagttggaggctgacgccctagtgaatttccatcagtattcttcccagctgctacccttctatgagagctcccctcaggtcctgcacactgaggtcctgcagcacctgaccgacctcatccgtaaccaccccagctggtcagtggcccacctggctgtggagctagggatccgcgagtgcttccatcacagccgtatcatcagctgtgccaattgcgcggagaacgaggagggctgcacacccctgcacctggcctgccgcaa

SEQ ID NO: 13317 - DNA, 567 bp, Homo sapiens
aagtagaagtgctgagtaagccgagagggggaagacggtggggcctccccacctgccccgcagaagatgcagttctttggccgcctggtcaataccttcagtggcgtcaccaacttgttctctaacccattccgggtgaaggaggtggctgtggccgactacacctcgagtgaccgagttcgggaggaagggcagctgattctgttccagaacactcccaaccgcacctgggactgcgtcctggtcaaccccaggaactcacagagtggattccgacgcctgggctccagtccctgtgtcctgagccccatgaggctgttactggtgctgctcgtctgcccatcctctccagtaacagccacctgaacactgcaattcctgggtttccatcattccttccagcctgactcttccagctggagttggaggctgacgccctagtgaatttccatcagtattcttcccagctgctacccttctatgagagctcccctcaggtcctgcacactgaggtcctgcagcacctgaccgacctcatccgtaaccaccccagctggtcagtggccc

SEQ ID NO: 13318 - DNA, 18970 bp, Homo sapiens
catggacagcagccagatccacagcaaagacccccgttacggagccagccccctccactgggccaagaacgcagaggtgagtggatcctgaggtgggtgggtggggcagggggccgggccccgcaggtcctcagggccctcaggaagcaggttcccgagaggaccctgaggctagcacttgggggctgaccttgcagtgggtgtgcaggcagagaagtccatgaagagctgggatcctggcagggctctgctgctctctggctgggcggggggatccgccctgtgcctcagtttcctcatccatgaattctgctttggcgatgtgatgaagtcagcaaggcagtgtgtgacaaaactcggcacaaattgtaaagtgcttcccaaatagaaggtggcgtgatgatgattgtattattagtcaggattctctagagggccagaactaacaggagatatatatatagagagagaggggggtttatttttttattttattttttttgagacggagtctcgctctgtcgcccaggctggagtgcagtggcacaatcttggctcactgcaagctctgcctcccaggttcatgccattctcctgcctcagcctcctgagtagctgggactacaggcgcccgccaccacacccggctaatttttttgtatttttagtagagacgaggtttcaccgtgttagccaggatggtctcgatctcctgacctcgtgatctgcctgccttggcctcccaaagtgctgggattataggcgtgagccaccgtgcctggcctaaagggggatttattaaggagcattaactcacacgatcacaaggtcccacaataggccatcgcaagctgaggagcaaggaagccagtccaagtcccagagctgaaggacttggagtctgatgtttgagggcaggaagcatccagcacgggagaaagatgtaggctgggaggctaagccagtctagccttttcacatttttttctgcctgctttatattctggccgtgctggcagctgattagatggtgcccacccagattaagggtaggtctgccttcccctactgactcaaatgttaatctccgttagcagcaccctctcagacacacccagggtcaatactttacatccttcaatccaatcaagttgacactcattattaaccatcaagatgatgatgatgatgatggatgatgatggtggtggtggtggtgctgggcctagctgcacacacagggagcctggctgggcatctcctctgagttcttcccctaagctaagctctgtcctcctgggaggatggaggcctctggtctcatcaccaggaagcacagcttgacagagaatgggatgccccagagttcatggcctacttctcaatgtgatgggccaggagggagggcactgccagcctcagggtacctctgcattccaggagccggacaccgagtcaggcccttccgtgtaggtttggtcactcattgtcatcacatgctgtgaggtggggacttgcattcccatcttcacagaagccctgaagtgcacatggctacagtgacccatccaagcgcaggcagctgggatgagtgaagctgggctttgggctcaggtctgtgactccaaagccaggctcccctccctgttcccaaggctctgccagggatgtgcattgccaaggcccagtgagaggtgatacctttgcagggttccagggagggatgcagggagcggggtgcttcaggacaggccccagaggagcctttgcaaggagagtgggttctgttggcactaggaaaggaccagaagcctcttaaaacagtcagcacatctttggctttttgtccctagtcttgggatgctgatgggatgggaggcagtctaggcccccctagaactggggcctgcccctggaatcctcttgctagcgctttccaacatcccagtacctgtaggcctctcagagcagaagtggcagtgcccacgtgtcccggggtgcggcagctccccgagtgcctgtgctaactcagcctgaccgtctcccgcagatggcccgcatgctgctgaaacggggctgcaacgtgaacagcaccagctccgcggggaacacggccctgcacgtggcggtgatgcgcaaccgcttcgactgtgccatagtgctgctgacccacggggccaacgcggatgcccgcggagagcacggcaacaccccgctgcacctggccatgtcggtgagcccaggaccgcgtgtcctgccctgtggggccccggtgggaatgcaggagggctgtccggactggagccctcctccccactgtctccctcctatcgtcagctgctccaaatcatcttcccacccaaagctcagttcagaccctgactcctccctcaggaagccttccaagtccccctctcagcccaaaataacaccacctcctgtgtgctgtggtaccttttccacctgtgcccccatttggcacttgcatggcacgagagggaaaaatgacagctctggccatagactggccctgagcaagccatgtcacctgtcagcctcgatttcctcatctggaaaatggtggtgtcaatacttatctggaagagttgtggaaaagttatggtggacacttggtcaccctctacagaatgtctaagtgacacacgcagtacctggcccgagtgagcatcctgcttcccttcactggtccgcgtgttgctctcatcttccctgggaggctgtaagatcctggcaggcaaagcctgagtgtgcagcccagcagcctgtggcaggtgccaggcatattcgttggtttattatagaacacagttcctgccctcaaagcccttactgtctggttacacatctagagtatgaacatattaaacctagcagaggaggacgttactgtgttacagacatatgtgtgtgcatgtattcttttttttcgagatggagtctcgcactgtcgcccaggctggagtgcagtggcgcgatctcggctcaccacaacctccgcctcccaggttcaagcgattctcctgcctcagcctcccaagtagctgggactgcaggcacgtgccaccatgcccagctaatttttgtatttttagtagagacggggtttcaccacgttggccaggctggtctcgaactcctgtgttggccaggctggtctcaaactcctgacctcatgatccacccgccttggcaccccaaagtgctgggattacaggcgtgagccaccgcgccccaccgtgtgcacgttttctatagcaataccgtatgtacagaagtctgtttactgagtctcagtgacagaacatgagagacccccgggactctaaaagctgattcaggacacattcagagacatcctgttttataccaaaggtcaaaacttggaagagatgttgttgcccaaaaggctgaaactataaatagtttcatttttgaaactgtggacatttttagcactgggtgggcccttggaatgatctaactcagcagttctcaagttttttggcctatttgatccctttatactctgaaaaattattgaggatcacaaagattttttaatcatctggattttctttatctatatttaccattttagaaatttaaagtgtgaaaatttcaaaatattaattcatttaaaaataacaataataaatatatatgcctactatgtacccacaaaaattaaaattaaaaattttttaaaaaacttaaaaaataactggccagctgcagtggctcgtgtacaccagcactttgggaggccaagatggtcagatcacctgaggccaggagttcgagaccagcctggccaacatggcgaaagcccatctctactaaaaatgcaaaattagctgggtgtgagacctctgaaagggtatcacgtgttcacaggggtccccaggtcttactttaagaactgctgatagactttggtcatcttcatcccatcttcacagtttttggcatattcatcaaccacctttacaattatgtacttaatcacctcttcaaattggcttacttttatttatttattttgagacagagtttcgcttttgttgcccaggctggagtgcaatggcacgatcttggctcaccgcaacctctgcctcctgggttcaagcgattctcctgcctcagcttcccgagtagctgggattacgttcatgcgccaccacacctggctaattttgtatttttagtagagacggggtttctccatgttggtcaggctggtcttgaactcctgacctcaggtgttccacctgcctcagcctcccaaactgctgggattacaagcgtgagccaccgtgcccggcctggcttacttttaaactgacttaaatttattttgagagaaatgttgcatcactaccataaatggccatccatccatccagtgccaaccataaaaggtaaccaatgcagggcgcggtggctcacgcctgtaatcccagcattttgggaggccgaggtgggcgaatcacgaggtcaggagttcaagaccagcctggccaacatggtgaaaccctgtctctactaaaaatacaaaaaattagctgggcgtagtggtgggcacctgtaataccagctactctggaggctgaggcaggagaattgcttgaactcggtaggtagaggttgcagtgagctgagatcacgccactgcactccagcctgggtgacagagtgagactccgtctcaaaaaaaacaaaacaaaacagtaacaacaacaaaaaatcacagttaatgctgaaaacacacacatatctgtagccatagaagtcctaatagaatgtgaagaactgtttggaaaaccccattctagacccacagcttcattctctaggcagggaaatcgggtcccaagaagaggaaggtgacaaggccagagcccacagttccaggtggccagtgtgtcctctgaaaccatgccatgctctgcgcccctgcccggcctccaggtgtggaaatgtgtgacgttcttcgtggggacactcccccgaaggctgccattaggggcacgtgtgttcggttacccctcagggatgacaccctggactgggtgggcaagatggccttccctgccctcacccaccctctccttgctactcctgaaagccatcagcagctgacctactgtgtccccatggctcctgggtcggggtcacagatgcactgcatctttggaggcggagctggcagagcaggggcgagtcacttctagtttctgcctgggttcttacaccctcccctgtgggtgcttttaagcctgtttgtcaggtccccagccatcaaatggcagactttggactaccagattgacttgggtgggggtgaggagggttccagtgtctccccgtgctgaggagaggcccgctgggtgagttgacaggttggggctggcagccaggggcccctttgttcttcacttccccggcagttgcacgtcttatcctctctccatctccaacagaaagacaacgtggagatgatcaaggccctcatcgtgttcggagcagaagtggacaccccgaatgactttggggagactcctacattcctagcctccaaaatcggcagacgtatgtgctctgcactctggggctggagtggggtgagggttgggtggatacagggaccgaggaggagggaagtcccaggcatcaggtgccagcatcctgtgctgacccgccctgctcagagctgccaggagcacctcgtactcagagagggggcttccttacccaagcacaagggccctgagcagtagatgcaggcccaccacggggcttgctataccagcatcctctcccgtgcagcgccccccacctcagggagctaagattcccagcaggggtggggacaggagagccagcagcagccttctttccccaccgttggggaattcactgatggaaccactggctagaatgaccaagggtgcatgcactacactgcacgagctctgggcatgcctgtgtgggcagagtgcatggccatgtgctgcacgctcgcacagtgagccttagcttcagagctggacagagcagatcctcctcaccagaggcctggagcccgctctggagggtttcagcagctgtgggggtcactgtgggcaggtacctgatggcagcagtgtgtgtgtgccagtgcacacgtgtgtgtctgcatgcaccgcatctatgacctccttttcagcaatcccatccatcaaatggagtaggtgccccctggctggctcattagtccctttggaaccctgaactatcacttagcatttttgagaatcactgaatgtggccatgggattcctgctttcttggctggagtagaaggaaagaaggggttcccacaggcatcgggcagggtgacactgacctcctcctcccatatcctccttccctggccttaggaagctgcttgggatgtaccagcctgggggcagcactccctgtcagggtgggctgaggcctctggagcagcccacgtgcccagggcctgggagctgggacaggggacggagtgtggaaaggaggggcctctcctttgcatgttgacatcatttctgatcctgtgccatctccccttccccaaaccatgacaagttgtcaccaggaaggcgatcttgactctgctgagaaccgtgggggccgaatactgcttcccacccatccacggggtccccgcggagcagggctctgcagcgccacatcatcccttctccctggaaagagctcagcccccaccgatcagcctaaacaacctaggtaggcctcgcctcccgactccctcttctccagctggttcccaggcccctggatcacagcaggccccaccaaagcaacaggatccctaggacggaagtcactaaaggaagccggggaggatggggccggagttgtcagcctctaggcagccagcaacccacagatcccagaggcctagggtgtccctggctgatgtcccatgctccgttgcccctgagaggatgtgtcctgcacacagtctcaggcctgggcatttccagtggcacccatgaggtggctgctgttactgccctcctgtccccagggcgttcagggtgggcagtgaggagtgctgtcgggggactgggggcccgggccctctggcttcacctgtccctctggcttcacctctatcacactgtttgaatctcggttgggcctgagacctgtgtgcccccttcctggccccgtggtgactttcagacgttgaatgtggccaggcagccagcatctgccccggtgcattccttggtgcccagggagacatccccagactagacaggacccttctctggactttctgtgggctggcccactcagggacctccattgtttgggagcggggtcccctgaacagagggcagccaggagccagtccttggtgagccagacttcactgtggaggcggcagcaccttcagccagggtagcccgaccaagcctggaactctggagaggcaccgtgactgtggcttctagtcctggctccacctctctctcccctcccaggaactccccctccacctcccatctttatctctcaattttgcaggcagtcacccaagccaggccggatggtgggcctggggtgcggcgtcagatgggtaacgccctgggcctggagaggccaccgagcctagccatgcggcattagctctagctctcactccctaatccgtccttcttagctgcgcacacaccacacgccccctcccctgcaccctgtccccggcctctctcagccactcttctgcttcccttgttcactgtggagccgtgtgccctggggagggggagacaccgcttcgcagccctcggttctgctttgctgcttctagactctgcacagtggtggggggctgtcagagttggggtcacgcgggctgctgcaccaggcacctggggactgggctgcttgtcaggaggggcagctagtcagttgggtggacgtcaggcaggccttggacacaaaggaagacatggacagagtggatggtgggcctgatcccggaggccactgggatttccagacctgggatcaggacgagggatgtctcctttcatccatggacttaaaccccgaggaacgtcctgactcagccttttgactaaatgaccttgggtgaattatggaccctcttagagcctcacctgtcaatagggaataagaattcttaggccccaggtggttattgcagcatcggctccgatgcaagaagaagcactttgtctgaagaggacacgcaagggtattcatgccttggggtttcaagaggaagagattgaggggaacctgggagctggctgggcagggtggggagcccttcccagagcagtgggcccccctttccactccagcccatttctctcctgtggcctgtggctcagctttctcctgggacagagtccttcctgtggggaagggacagatgacagggggagtggggggatgagggcgtggccgtgggcgaggcacagcccaggtttgatctagggacctctggggtagcagggcttggggacccacctgaccacagcatgccctgctctgtgcctcacagaactacaggatctcatgcacatctcacgggcccggaagccagcgttcatcctgggctccatgagggacgagaagcggacgtaagtggatcgagatcgggggcagagcggggaacgtgtgcgctttcctgcccctcacccaccccctgttgtgggctcagggctttactctctgcaccctcacagccggcgaagtggctctgctcctagtcttatagttctcagcagagacagaacatggagagcctgtgtcgctcgttcattaatgctgggcggtgcaggctctggagaccagcccagggtgccaggcttcttggacttggtggggctggcgcagtgttctggcctccctccctgatctccttatggctagaagagggggagatgcctgggtcccccctggggagatctcagcagctgcttcccactgctcctactggcttccttaaccacctcccactgcagaatagtggcgtgggctgccttccccagcacctgctgtatacctagtcccattgtaagaggcgggcctgggtgacaggatgcaaagagaagacgcccaggccttgcccttcaggcataatcccgggtgcttgaactcagtgccagctggcacggcaaggtaccaggacaaatgcgtttccagccactgtgctgtcgccacctcccttgattgctgcagttgattcatttattctttattagtctctcatgttcctaatagccttcccagggaggaatttgtaaccttgttttacagatgcagaacctgagcccctgagaggtgaagtgacttgctcaaggtcacacggagtgagtgtcagggtggcaactcacagccgggtcttccgaacccacgtcctttgtgctaccgcaggctctctctgggttctctgtggactctatacctagtgccagccctctgcagggaaagctctcttctcagaatcagaggcagctccactcccagggccaggcagtgatcgtgcagctctgtgggtcctctcacttcgcactcacttccatgctaccctgttgtgtgccctggaggttcccctgccccatcagcattccctcccctgtgccccctgcatgctcttgcacgcgggcacacgcacacacacacgcacacatgcacgcacacacacccacatgcacatgcctgcgggttgcccacatgcatgtgttgcccacatgcaaacacatggacacgcacacacatgcacacatgcaaacacacgtgcatgcacacacatacacatgcgcacacatacacatgcatgcatgcacatggacacccacacacatgcacacacatgtacacacatgcatgtacatacacacacctgtgcaggggctgaggtgaggcagctgcacctgaaggggggacccacatttcccaagggaggaaaagcagattccccagattctggagcctcagaaccctgcctggagcggggctgaggcaagagtcaggagacccctcggtagctccccacttgggccttccaagctacagagccctgcgccctctgggttgatctctgtcgccagccccgcatcttcgggagtttgctttggcctccagcaacagtgtagtctctcccctgccacctctaggcttgctgtggggctgggtacctggtccaggaaaagacccctagaggtgggacccgggcctcctccatttatcagccctcttgggcacctcctgcatccccttgacacacagcgctgcccagagcagaggcggcttctgccctggtggagcttccaggtcagcgcaggagagagtaaaagaaagattgcgaatggaatggaagcagcctccaccaggaagcaggtggagcagcaggcgggctgtgagggagggtctcgatggcatcagggcaggcttctctcagcttcatcaagctgagatgggaagatgagaagatcagaggaaggttccagactgaaccaaccacaaaggcattcccccagggcatggccaatgaggacaggcaggatgtggggagacgtgtcagggcgcgctggagagcatgtgactcaggaggcggcagacctgggtccaggtccagtccgcatccatatgacttggttcccgtcacctaacctctgagctacactccctccgtcactcaaaaatatgcacagagagtaggcgcagtggctcctgcctgtagtcccagctactcgggaggatcacttgagctcagaaggttgaggctgccgtgaactgtgattgcaccaccacacaccagcctgggtgacagagtgagaccctgtctctataaataaataaataaataaataaggctgggcacggtggctcgtgcctgtaatcccagcactttgggaggccgagacaggcggatcacatgaggtcgggagttcaagaccagcctggccaacatggagaaaccccgtctctattaaaaatacaaaattagctgggtgtggtggcgggcacctgtgatcccagctactcgggaggttgaggcaggagaatcgtttgaacccgggaggcagaggttgcggtgagccgagatcgcgttattgcactccagcctgggcaacaagagtgaaactccgtctctaaataaataagcacagggatgtcagggagggtctgcctcagaggcgtttgggacaatgacatgagctaatgctggtagcacccctcccatagcccctggcatgaacctctcccttcctccctgccccctcctcccctgcttcttccaccttgtgtggaggccctgatactctgtcactgcccattcctggcctggctgtagggtccccgcccctccttccccagccttatttaattccaacagactttatcaggcacctgctttggatcaggcctgatactgaccaaaatcaggtgtcccaagttggggagactggccgagatcctgctgggatggcgcctggtcagtgatgctatcccccgaccttcctttccctttctctgttgcactctccagcccctgaaatactagacatttgttcctttactgccctcacccccaccctcgctgtcctgcataggacagaagttcctcgggtccgtctgggtctgtctgccaggacacagctgcaggggacaagggctatgagggtggatgtaaagtactgggctgtggcaggaccctcctctctcccactgctgttcccactgcagccacgaccacctgctgtgcctggatggaggaggagtgaaaggcctcatcatcatccagctcctcatcgccatcgagaaggcctcgggtgtggccaccaaggacctgtttgactgggtggcgggcaccagcactggaggcatcctggccctggccattctgcacagtgagggcggcccctggggatggggccaggcggggctgagacctgtgtcctcaaggggccgagtttgtcttcagggctttgcaaaaagagagtggaggagtagaggagggctataagcactttgaggaggcaggggcggggctgcaggtgctgaggtcccaggctggaaggagaagggctgggcccatgggcttgggtttggggatcccccgccctctggccacagagggtagagctggctgtgtgaaattttggcataggaagcgtttcctatcgactgccttaacccctcctcccctcacccctgcaaagcaggcaccaggggccacacagcctgctgcacataaggaatcccattcccagggtgcacgcagcaggcagtctcaggaatgaggagccactgagcctcaggatgccagagccctcgcctgcacacttcattttactgggaaattttactgggaaattaagttcccaggtggggagggatgacgtgaagtcacatagctcatccatggggtcgctgggctggagcacagtcccctagactcccagcctggcacctcctaggccacagggcactgtgtagtctcctttcactgccgctttgcgaaggcgcctggcttgctggacagatagccgggtggtcagtgttgtgacggctcctctgtggagctgtctgagcttctaggtgctgacaggtggggaggggcactgccagatcagggtcctcagctccccccaaccccctggacattgtcctgggactcaacatgtctgactggtgcccctgcccctgtgctggtcagattccattttctccagagcgcccccacatctggatcctggtcatgcaaagtcttggaggtgcccggggaggactccccaccctagggtgggtatcagggcctgtgggccaggcctgtgttggatgctggggatgcagagctgagccaggcataccccagcctcaggagcagggggctcagccagtccaggaggtgctggggacagagtcccatgggcggaggaggagagtcatctgtcaagttgccgggacgttagtgtccacggcggtttattgactggtatttcatttccttttgatgattctcaccatagccctgcggggtgagcagatggggaaactgagaaccagagaggatcagccagtgaattgggcagtcaggactgggtctccagcagtgtgcccagctctctaccccagcctcagggtcccagcatcccctctctggtcttccacagggtccaagggcgggcacgaggtctgagcaggcagactgggcagagtcctagcttcttctccaaaagggccacgtccttcttcagggaccatttcttccccatccggggtcttgagactcccaggggccatggaggggatttgagaggtctcctggctgatcctccggtgtgggcagatggcctcctttcagctaccctctgcttgtacatccctggccctggggaactcactgcctcacgggggaagtggggcagcttctccttcctggaggtgcagccggccccttggccctgtctgttctgaaggctcaaaggacagggctattccttgttttctgtgacaaacaacgtgggtctagcttttataagcttttactcttgaggggctcttctttaaggaaaataatacaaaatcatgaatacaagatgaagtgcagagccgtggggcttcagtggtttttgagtctctccgttgcccaggctggagtgcagtggtgcatcttggctcactgcaacctccgctcccgggttcaagcgattctcctgcctctcagcctcccgagtagctgggactacaggcgcccgccaccacacctggcgaatttttgtatttttaatagacggggtttcaccatgttgggcaggctggtctcaaactcctgacctcaagtgatccacctgcctcagcctcccaaagtgctgggattacaggcgcgagccaccatgtccagccggaaggaggtttctctctgtctgtctgggaggttgcaaaggaagggcccagaatttgggtttgcttaggcctcggtaaacccgcttcctcctgccacctcctgcgttcaggcgctctgcaggctgttctacgggagccctgcgtgtggccgctgcatctccccgcctctgacccctttgttcctaggtaagtccatggcctacatgcgcggcatgtactttcgcatgaaggatgaggtgttccggggctccaggccctacgagtcggggcccctggaggagttcctgaagcgggagtttggggagcacaccaagatgacggacgtcaggaaacccaagtaagccctggcgcactggggccgtggccgcagctgtgcccactgtggctgttccctggggacagagggctccctgtcctgctgagggagggggaagagcgccccacgcttgaggggagcagagggaacccccttcccagggaggcagagggctggggtgtggctctcacttgggcatgcagacacctgctgagcgcaggaggggcgtggcctggtgggcctggctctgccctgcctggctctgccctgcccggctctgccctgccggctctgccctgcctggctctgccctgcccggccaggggtctggggcttgcctggagagagcctgggccacccttctctgagaccacctgggcagaggctgggtttttgctgcccaggcaaaaggaacccactggcctttcaaatgacacggctaaacattttctcacatttcagacagcactcgctcccaggatcggactactaggttataatcagagggcttcagtcttacctttaatttaaggcctacaagacttgaactaatttaagtcagactgaaggagaaagtcacatttccaggaaacatttgtttgggaagcccaaatcctaggactaagcaatgcatcccgttcggggctggatgaatggtgtgttccaagaggagtgttttgagcatttctgagtgattttttcatattttgaaagtgagtgtcccccagtcttaggggcccggcatcccctctgcggtcttccctagggtccaaggccagggaccttcaatcttttttcccactctgtggcttgtctttctgctctgtggtgtttctaggtttttgttttttgttttttgttttggttttggttttggtggcccatgttcttaatgaggtagataatatttataaatatttttcttcttgtagtttgtgattttttcctttctttctttcttttttttgaaacagggtcttgctgtggggcccatgctggagtatattgctgtgaacacggcttactgcagcctcgacctcctgggttcaagcagtcctcccatctcagccgcctgagtgcctgggactactagcatgtgccaacacatgtattttttgtagagatggggtttcaccatgttgtccaggctagtcttgaactcctgagctgaggcgatcctcccgccttggtttcccattacaggcatcagccaccatgcccagcctagtttgtgctttttatttctcgttcataaacccctttgctgcccccaagcagcacacgattctcctgtgtcgagctggaaagctctctagatctgccttttacattgaggtcttttatcaacctggaattgatttttgtatgagggtgaaatccaagatccaatttaatgttttccacgtgattggccaatttttcccagccccatctgtgaagtctgtccttccctccgcttcctcagcagtgggtcaagcatccctctgctcttggatctgctccaggctgtgttttgttccactggttggaaagctgtctctgtgcccggaccacagagcataaaaaactaccgctgtgtggtgagtcctggtgtctgggtggcagatcctccaccttggccttcttcaaaaacatcatggctattcttgggggcagtagagagaagtggatacaagcatagaccctgaagtttctacctcttctcaaaaataggaatatgccaggcatggtggctcaagcctgtaatcccagctctttgggaggctgaggcaggaggatcacttgaggccaggaggtcgagaccagcctgggcaacatagtgagaccctcatctctacaaaaaatttaaaactaacaattagctgggcatggtggcactatggctgtagtcccagctaattgagaggctgaggtgggaggatcacttgagccccggaggctgaggctacagtgggctgtgatcccatcactgcactccagcctgggcaatagagtgagaccctgtcttaagacaaaaaaaaaaaaacaaaaacaaacaaactcacaaactataaaaagaaaaaatatttataaattctactccattaagaacatgggtccatccaaataaataaataaaacaaaaacaccataaagggagtaaaaagacaagccacagagtgggagaaaagatttcgaatccatacatccatcaaaggactcattttcaaaatatgaaaagatcattcagaaatgctcaaaatagtaaccaccattttactttctcttcctatgagtttaactgctccaggtactgttaagtaaaatttttaggggataattgatttggaccaggattctgtaccaggcccaacagaagaaacgaatatggagtcattcatgccaagtgaacctagttagcttaggcgtatacccatgtaacaaatagctgagttctggttagctacaacagctaagctttaatcaatcatagatggccacctgattcaaacaaggcaaaccaattaagctccacacctcactttggttttcagcccatcaacactgcctgaccacgttgcaggccagagttctttgaacctattctggttttgtggcctgcctgactctcagttcatcaataaaagccaattaacatctttaaatttgttgcaattttatctttgaccgtaccttatgtaagtggaatcatacagtatttgtctttttgtgactggcttatttctttctttttttttttttttgagatggagtcttgctctatcacccaggctggagtgcagtggcgcgatctcggctcactgcaatttctgcttcccaggttcaagtgattctcctgcctcagcctccggagtagctgggattataggcgtgcaccaccatgcccggctaattttttgtattttagtagagacagggtttcaccatgttggccaggccagtctcaaactcctaacctcgtgatccacccacctcggcctcccaaagtgctgggattacaggggtgagccaccgtgcccggccatgactggcttatttcacttggcatccatgttgtagcgtgtgtcagaatttccttcctttttaaggctgaaaaactccattgtctgttggatacacgttttgcttctccattcatccattgatggatattttagttgtaaattgactgctgtcaatgtcggatgtgcaaatacctgtttgaggcctactctctcttactggtgccttctctagagagaattctgatgggttcagtttgatcatattttgtttaagatttttggccaggcgcagtggctcacgcttgtaatcccagcactttgggaggccgaggtgggcggatcatgaggtcaggagatcaagaccacagtgaaaccccatctctactaaaaatacaaaaaattagccgggcgtggtggcgggcgcctgtagtcccagctactcagagaggctgaggcaggagaatggcgtgaacccgggaggcagatcttgcagtgagccgagattgcgccactgtactacagcctgggcaacagagtgagactccgtctcaaaaaaaagatttttgtgtccacgctcgtgggcgaacttgacccgttttttcctattttgggttttgaggaaatatttcctctttttatttttcttggaagagttagtataatagtttattttgaatttatggtagaacttgatagtaaattcttctaggcctggagtttgcttggtgggaggatttttgatgatggaattaatttctatagtggttgtgagactgaccactcggggtttctaaatacctttttgagttagttttggttaagtgaggtttttctaggaatgtgtccatttcatctaaatctttaagcttattggcttagagttgttcaaaatattctgtttttttttttttttttttttttttgagacggagtttcactcttatcgcccaggctggagtgcaatgacgtgatctcggctcactgcaacctctgcctcctgggttcaagcaattctcttgcttcagcctcccaagtagctgggattacaggcatgcgcaaccacacctaatttttgtattattagtagagacggggtttccccatgttggccaggctggtctcgaactcctgacctcaggtgatccacctgcctcggcctcccaaagtgctgggattacagacatgagccaccatgcccagccgattctcctttttctaacgtctgcagtgtgtgttggtgcggcccccttttctttcctgattttgataacagataacagccatgttttatcagtcttgcaacaggtttttccattggattagcctttcaaaaaaaccaacttttgctgaattgtgcccccaaggttggaccaatctgacactcctccagcactgccggagagagcctgttttgcggggatggtgcggggagaagcccacctatcccgaacagaggttggagtgggcactctgctacccaaggccctggggtgtgaattgtggggaaagggaaaggtggatgggcgggtggctcagccgtcctcctgcctcatttctctccagggtgatgctgacagggacactgtctgaccggcagccggctgaactccacctcttccggaactacgatgctccagaaactgtccgggagcctcgtttcaaccagaacgttaacctcagg

SEQ ID NO: 13319 - DNA, 1147 bp, Homo sapiens
catggacagcagccagatccacagcaaagacccccgttacggagccagccccctccactgggccaagaacgcagagatggcccgcatgctgctgaaacggggctgcaacgtgaacagcaccagctccgcggggaacacggccctgcacgtggcggtgatgcgcaaccgcttcgactgtgccatagtgctgctgacccacggggccaacgcggatgcccgcggagagcacggcaacaccccgctgcacctggccatgtcgaaagacaacgtggagatgatcaaggccctcatcgtgttcggagcagaagtggacaccccgaatgactttggggagactcctacattcctagcctccaaaatcggcagacttgtcaccaggaaggcgatcttgactctgctgagaaccgtgggggccgaatactgcttcccacccatccacggggtccccgcggagcagggctctgcagcgccacatcatcccttctccctggaaagagctcagcccccaccgatcagcctaaacaacctaggcagtcacccaagccaggccggatggtgggcctggggtgcggcgtcagatggaactacaggatctcatgcacatctcacgggcccggaagccagcgttcatcctgggctccatgagggacgagaagcggacatgcagaacctgagcccctgagaggtgaagtgacttgctcaaggtcacacggaccacgaccacctgctgtgcctggatggaggaggagtgaaaggcctcatcatcatccagctcctcatcgccatcgagaaggcctcgggtgtggccaccaaggacctgtttgactgggtggcgggcaccagcactggaggcatcctggccctggccattctgcacagtaagtccatggcctacatgcgcggcatgtactttcgcatgaaggatgaggtgttccggggctccaggccctacgagtcggggcccctggaggagttcctgaagcgggagtttggggagcacaccaagatgacggacgtcaggaaacccaaggtgatgctgacagggacactgtctgaccggcagccggctgaactccacctcttccggaactacgatgctccagaaactgtccgggagcctcgtttcaaccagaacgttaacctcagg

SEQ ID NO: 13320 - DNA, 13674 bp, Homo sapiens
tcctggtggagctggtgcagtactgccacactcagatggatgtcaccgactacaagggagagaccgtcttccattatgctgtccagggtgacaattctcaggtgctgcaggtgagcagggggaggggcagggtgactggtactgatacctcccggtgtccacggttccctttgggcccctaggctcaggtgtcactctcaggcctctcactgtcccccattggtccttgaggcctgagctccttcatggagggtgcagacccctccctggctcttccctcccagcccttttccaggagccacgtcctcagtctctttgcttgataaacctggggacggcctccaacccagcaaaataaaccccaaaaaaggcccagctccagtcagttagttcagttccacttttcctgagcacaaactgtgagccagatgcctgcctggaggggctcgtgggccagcgggacctgggcttaaccttttgcaagcttgtccaatctgtggccctgcaggctgcatgcagcccaggacggctttgaatgtggcccaacacaaattcacaaactttcttaaaacattatgagatccatgcatggaccttttttttagatcagctgttgttagcgttcatgtattttatgtgtgacccaagacaattcttctgatgtggcccagggaggccaaaatattggacaaccctattttacaggaattcaaaccaagcaaaccaaactgtctccagttcctgtaggcatttgtgccagaggccctcctgttaacgtttttgattacctgggcaaaagatgtgattttttaattgtgggcaagcagatggggtgatactattaaatagctatttcatatattagattgaacagaaaaggcaggatgttggattatgttttattgtctagaattagaaaattcttctaaagatcatgttctctctgccttggcatcagaatgcaactacgttataccagaaaatgtggattcctttttttttttttttttttttttttttgagacagagtttccctatgtctcccaggctagagtgcagtggtgcgatctcggctcactgcaacctccacctcctgggttgaagtgatgctcgtgcctcagcttcctgagtagctgggattacaggcatgtgccaccatgcctgggtagtttccgtatttttagtagggatggggttttgccatgttgcccaggctggtctccaactcctggccttaagtgatccacctgcctcagcctcccaaaatgccgggattacaggtgtgagccactgtgcccggcccagaaaatgtggattcatatcttatgcttcttgctctcagggaagggaattctccacccactgttgaactccactttcaccgagaatcctctgcgcacccagcatggtgccgcgcagaccctgcctccatgcgggggtgtgcacacccgcttctcgatagtcatgcacgactgcagctgtcctttatccggtgctgattggtgcctgaccttgaactgagtgttgtatgtgttccagttaattcttagaatacactcatggggtggaggtcattattcccctttcctctccgaagaaactgaggttcagtgttgttaattaagaagcgtgcccagggagggccacaaagctgagagagtggggcttgaccttacattggcctcgatgccagccctttgctcttcctgctgtgtctctggcctgccttcaggtccagtgggactgctgtgaggtgaccctggtgtcacatgggtacactgtggttgtaatgaacctcatggggacagcactgagccaaaagtgagacagtaaaaccctcctagcactttcttttttttgagacagcatctagctctgtcgcccaggctggagtgcagtggtgtgattgtggctcactgcagcctcaacctcctggactcaggtgatcctcccacctcagcctcctgagcagctgggactacaggctcgtgccaccacatgggctaattttttttttttttgagacggagtcttgctctgtcgcccaggctggagtgcagtggcgcgatcttggctcactgcaagctctgcctcccgggttcatgccatcctcctgcctcagcctccagagtagctgggactacaggcgcccgccaccacacccggctaattttttttgtatttttagtagagacagggtttcaccgtgttcgccaggatggtcttggtctcctgaccttgtgatccgcctgcctcggcctcccaaagtgctgggattacaggcgtgagccaccacacccaggccacgccagctaatttttaaaatttttttggtaaagatggggtctccctatgttgccgaggctggtatcacactcttggtctcaagtgatcctctcacctcccagtgtgttggaattacaagcatgagccactgcgcctggcccctggctctctttttaatactgctgttctttcattgaaaacatagtacctgcatgtagaaaaaaatcagtcaggacagaatgaaaagcaagaatcattcccacctggacccccagtgcccatcctgagatacagctaccttttaagttccttgactcagaaatgtttcatgtgagccacagtcatgccaggtcgaccccttccctcccatccacactggcacttggctttcctggtgcttctctttacgttctttttttttagacagagtttttgctctattgcccaggctagagtgcaatgatgcaatctcagctcactgcaacctctgcctcctgggttcaagcgattctctttcctcaggttcctgagtagctgggattacaggtgcctgccaccatgcccggctaatttttgtatcgttagaagagacgacatttcaccatgttggccaggctggtctcaaactcttgacctcaggtgatccacccaccttggcctcccaaagtgctaggattacaggcatgagccactgcgcccggcctctttacgttcttatcagcatcctatggagtcaaacttcccttcctctttcatcagctccttggaaggaacgcagtggctggcctgaaccaggtgaataaccaagggctgaccccgctgcacctggcctgccagctggggaagcaggagatggtccgcgtgctgctgctgtgcaatgctcggtgcaacatcatgggccccaacggctaccccatccactcggccatgaagttctctcagaaggggtaagacctcctcccctccccatctgctggcctgctgggctccagctctcctgtcacctgtcccgtgcctgaggcaagcagtatccaccatagatcttagcatctccagcctcagagcagaggccccgggttcacaagcctcattaggccccgcctggcccaaagaaggtgctccatcattgtatcatgggtaggaatctcggttcacaagttcagctgtgcaaggaggagactttaaaatttttctggctgggcgcggtgtctcacgcctgtaatcccaacactttgggaggctgaggtgggcagatcacctgaggtcgggagttcgagaccagcctgaccaacatgaagaaaccccatctctactaaaaaatacaaaattagctgggcgtggtgacacatgcctgtaatcccagctacttggaaggctgaggcaggagaatcggttgaacccgggaggcggaggttgcagtgagccgagatcgcaccgttgcactccagcctgggcaataagagcgaaactgtctcaaaaaataaataaataaataaataaataaataaataaaaataaatttatttaatgtaccttaattcctaggagtgaatctccctctataaaactggagacaaccaatcttagccctctttggggtctcctctttccagctcccctccaggtggtgctccagttctggagtctgatgcaaccccaaggcccacctggcccctcctctaacccagcccagcctgatctgaacagccccccgatggcttcagtgctccttggtttcttgtgtgcccagctcaaagcctgggaaatgcttggtaaggtggccgagtgcccgtccacctagatgcctctttcctttctggctggtggcacgttgggaggcaggtacaggctcatgttttgggagcctgggaacccctggtgtcaggaaaattgtcttcaaaggggtaggggatgagataaaaagataaatgaatatctcaaatctcaaaatactatctaggccaggcgcggtggctcacacctgtaatcccagcagtttgggaggccaaggtgggtggatcacctgaagtcaggagttcgagaccagcctgaccaatatggtgaaaccctgtctctactaaaaatacaaaaattagccaggtgtggtggtgtgtgcctgtagtcccagctactcaggaggctgagacaggagaattgtttgaaactgggaggcagaggttgcagtgatttgagattgtgccacagcactccagccagggcgacagaacaagactccatctcaagaaaaaaaatactatctaacaggaacaacatctagaatgaatgaatgagccaatgagtccttcgatcctggcactgtgctaaagcaccagcctcaccgaaatgaataagccactccaggacaggagacaccccagccacccagaatctcatagcgcagtgccagacaagcagtgagaaggcatggacgggcagcactcaggcagggaggctggcacttgtgcctgtcctcaggttgttccttcctctgggagctgcatccaccttgctagccccatggggcattgctagcccttctaagggctggaccaagcctggacaaaccctcctttccttgaatctcccaagcacagccagaatgagctagagctttcagaaatacttgaccaaacagagaagataccaacacccccagccccgcagtcaggttccccatttgcaggttgtgacctgagtggacaccaggtgatgctcttctctacccagagggctggcacatggccccactcttgcttgtctccagccaccctgagctgtactgggcaggagctgtaattgaccagttttctctctcttcaaacaacctcagccctcaccggtccctctgtccccacacaggccatcctgggtgggtccagcgtcccatcacataagaggatctttgcacagaagacaaaggaagaggctcctaccttgagtggagcagggagatcccttatcgacttggcagccagcacagccctactccaagaatcccacggcctcagtgttactgacaagtggttccctcacagctcagactaggagctccctcgctgtttttctttttcttttcttttctttgttttgtttttgagacagagtttcactctgtcacccaggctggagtgcaatggcatgatcttggctcactgcaacctctgcctcccaggttcaactgattctcctgcctcagcctcccaaggagctgggattacaggtgtgcgccactatgcccagctaatttttgtatttttagtagagatggggtttcatcatgttgaccaggctagtcttgaactcctgacctcaggtgatctacttgcctcgccctcccaacatgctgggattacaggcgtgagccaccgcgcctggccacctctgctgtttttcaatgcagctgacctttcccacaaagctcggtttgtgcctgcggttctcagatggttaagcccctgctgaggaagggaaacagataatcccagacagtgagatggaggctgagactgaggatgcctgggggctgcactaggagctcagagacggcatcaggcagctggagttcagggaaggtttgggggcagcagagcccgagccaagccatggacactagccggagctggccactcgggtgaagacttggggggctccagagggcccagggaaagaagctgggcctgactccatgtgcctagtgctgagcaccaagcgctggcataagggctgtagggagctgggcagcataaatcctgggcctgtgctgggcacccctaataatagagaacagcagctgaacactaacgctgtcccagccaccggcttagccttcatgtgggctatttcactatagcccagagagctgatgtattttattccccctctaaagctgagggccaagtgtggtggctcatgcctctaatcccagcactttgggaggctgaggcaggaggatcgcttgagcctaggagtttgaggctacagtgagctatgatcatgccattgccctccagcctgggtgacaaagggaaatcctgtctcaaacaaacaaacaaaaaacagatgaggaaaccagggcttagagagattaagtaatttgctcaaagtcaggcagtcagtaagtgccagacctgggaattaaacccatgtgggctgtcctagtaattgcactaaaaaaaaaaaaaaaaaaaagctttattgagatatagttcctattccatacaatccacctattgaaagtatacaatgattctgatatattatgtttattttttccaactgtgatagattatatataacataaaatttgccattttaaccacttttgttttttgtttttgagacagagtttcgctctcgttgctcaggctggagtgcaatggtgtgatctcggcttaccgttacctccacctcccgggttcaagtgattctcctgcctcagcctcccgagtagtagctgggattacaggcatgcaccaccatgcccagttaattttgtattttttagtagagacagggtttctccatgttggtcaggctggtctcgaactcccgacctcaggtgatccacccaccttggcctcccaaagtgctgggattacaggcgtgagccaccacacccggcccattttaaccacttttaagtgtacaattcggtggttttaatcacatttacaatgttgtccaaccattacccctttctaaaacttttcttatcacctcaaacagaaactgtaaccattaataactcccgattctcccctccccacagcccccgataagtcccatatcctctctgtctctcagaacttgcctgttctagaacctcgtatcagtgaaatcatacagcgtttgtccttttgtgcctggcttatttcacttagcatgatgtcttcaaggctcatccatgttgcagcacgtatcagaatttcctttctttttaaggcagaatactattttgtttatccattcagtccttcactgatagacgcctgggttgtttccaccttttgtctgttgtgaagaatgctgctgtgtacatgggtctgcaaatgtccattcaagtccctgcattccgtcctttgatacttccgacctcaggtgatccgcctgcctcagcctcccaaagtgttgggattacaggcgtgagacaccgcgcccagccagaaaaattttaaagtcttctccttgcacagctgaacttgtgaaccgagattcctacccatgatacaatgatggagcactttctttgggccaggcggggcctaatgaggcttgtgaacccggggcctctgctctgaggctggagatgctaagatctctggtggacactgcttgcctcaggcaccgagtagaaagcaattgtgctctttcccactctgtcatactgcttcctatagcatgcaggtcactgtgtgactcactgacagtgtggtaaggaggtggagggtggctgtgtgccaggcacagaactgggctctgaaatgcctggtcttccttacaccccagccactcctctcagcactctctccatgttgctcagcttctggaggccaccagtgaggaagctggggcttgacttcaagcccatctgactctaaagccagtaccagggagggtgatcattgctggtggcagcatcaggaaggcttcctggaggagggggttagttgtgccttgaggggctcagtacagccttaaccatggtgagtgtgctggttgggtttgctgaactttgtttgcagtgatgctctctgtaagcagtagatgaagctccaagtcctggcttcatcccacgccacgcagaccctagcttctgctcaccaaccggggcccctctctcaccaggtgtgcggagatgatcatcagcatggacagcagccagatccacagcaaagacccccgttacggagccagccccctccactgggccaagaacgcagaggtgagtggatcctgaggtgggtgggtggggcagggggccgggccccgcaggtcctcagggccctcaggaagcaggttcccgagaggaccctgaggctagcacttgggggctgaccttgcagtgggtgtgcaggcagagaagtccatgaagagctgggatcctggcagggctctgctgctctctggctgggcggggggatccgccctgtgcctcagtttcctcatccatgaattctgctttggcgatgtgatgaagtcagcaaggcagtgtgtgacaaaactcggcacaaattgtaaagtgcttcccaaatagaaggtggcgtgatgatgattgtattattagtcaggattctctagagggccagaactaacaggagatatatatatagagagagaggggggtttatttttttattttattttttttgagacggagtctcgctctgtcgcccaggctggagtgcagtggcacaatcttggctcactgcaagctctgcctcccaggttcatgccattctcctgcctcagcctcctgagtagctgggactacaggcgcccgccaccacacccggctaatttttttgtatttttagtagagacgaggtttcaccgtgttagccaggatggtctcgatctcctgacctcgtgatctgcctgccttggcctcccaaagtgctgggattataggcgtgagccaccgtgcctggcctaaagggggatttattaaggagcattaactcacacgatcacaaggtcccacaataggccatcgcaagctgaggagcaaggaagccagtccaagtcccagagctgaaggacttggagtctgatgtttgagggcaggaagcatccagcacgggagaaagatgtaggctgggaggctaagccagtctagccttttcacatttttttctgcctgctttatattctggccgtgctggcagctgattagatggtgcccacccagattaagggtaggtctgccttcccctactgactcaaatgttaatctccgttagcagcaccctctcagacacacccagggtcaatactttacatccttcaatccaatcaagttgacactcattattaaccatcaagatgatgatgatgatgatggatgatgatggtggtggtggtggtgctgggcctagctgcacacacagggagcctggctgggcatctcctctgagttcttcccctaagctaagctctgtcctcctgggaggatggaggcctctggtctcatcaccaggaagcacagcttgacagagaatgggatgccccagagttcatggcctacttctcaatgtgatgggccaggagggagggcactgccagcctcagggtacctctgcattccaggagccggacaccgagtcaggcccttccgtgtaggtttggtcactcattgtcatcacatgctgtgaggtggggacttgcattcccatcttcacagaagccctgaagtgcacatggctacagtgacccatccaagcgcaggcagctgggatgagtgaagctgggctttgggctcaggtctgtgactccaaagccaggctcccctccctgttcccaaggctctgccagggatgtgcattgccaaggcccagtgagaggtgatacctttgcagggttccagggagggatgcagggagcggggtgcttcaggacaggccccagaggagcctttgcaaggagagtgggttctgttggcactaggaaaggaccagaagcctcttaaaacagtcagcacatctttggctttttgtccctagtcttgggatgctgatgggatgggaggcagtctaggcccccctagaactggggcctgcccctggaatcctcttgctagcgctttccaacatcccagtacctgtaggcctctcagagcagaagtggcagtgcccacgtgtcccggggtgcggcagctccccgagtgcctgtgctaactcagcctgaccgtctcccgcagatggcccgcatgctgctgaaacggggctgcaacgtgaacagcaccagctccgcggggaacacggccctgcacgtggcggtgatgcgcaaccgcttcgactgtgccatagtgctgctgacccacggggccaacgcggatgcccgcggagagcacggcaacaccccgctgcacctggccatgtcggtgagcccaggaccgcgtgtcctgccctgtggggccccggtgggaatgcaggagggctgtccggactggagccctcctccccactgtctccctcctatcgtcagctgctccaaatcatcttcccacccaaagctcagttcagaccctgactcctccctcaggaagccttccaagtccccctctcagcccaaaataacaccacctcctgtgtgctgtggtaccttttccacctgtgcccccatttggcacttgcatggcacgagagggaaaaatgacagctctggccatagactggccctgagcaagccatgtcacctgtcagcctcgatttcctcatctggaaaatggtggtgtcaatacttatctggaagagttgtggaaaagttatggtggacacttggtcaccctctacagaatgtctaagtgacacacgcagtacctggcccgagtgagcatcctgcttcccttcactggtccgcgtgttgctctcatcttccctgggaggctgtaagatcctggcaggcaaagcctgagtgtgcagcccagcagcctgtggcaggtgccaggcatattcgttggtttattatagaacacagttcctgccctcaaagcccttactgtctggttacacatctagagtatgaacatattaaacctagcagaggaggacgttactgtgttacagacatatgtgtgtgcatgtattcttttttttcgagatggagtctcgcactgtcgcccaggctggagtgcagtggcgcgatctcggctcaccacaacctccgcctcccaggttcaagcgattctcctgcctcagcctcccaagtagctgggactgcaggcacgtgccaccatgcccagctaatttttgtatttttagtagagacggggtttcaccacgttggccaggctggtctcgaactcctgtgttggccaggctggtctcaaactcctgacctcatgatccacccgccttggcaccccaaagtgctgggattacaggcgtgagccaccgcgccccaccgtgtgcacgttttctatagcaataccgtatgtacagaagtctgtttactgagtctcagtgacagaacatgagagacccccgggactctaaaagctgattcaggacacattcagagacatcctgttttataccaaaggtcaaaacttggaagagatgttgttgcccaaaaggctgaaactataaatagtttcatttttgaaactgtggacatttttagcactgggtgggcccttggaatgatctaactcagcagttctcaagttttttggcctatttgatccctttatactctgaaaaattattgaggatcacaaagattttttaatcatctggattttctttatctatatttaccattttagaaatttaaagtgtgaaaatttcaaaatattaattcatttaaaaataacaataataaatatatatgcctactatgtacccacaaaaattaaaattaaaaattttttaaaaaacttaaaaaataactggccagctgcagtggctcgtgtacaccagcactttgggaggccaagatggtcagatcacctgaggccaggagttcgagaccagcctggccaacatggcgaaagcccatctctactaaaaatgcaaaattagctgggtgtgagacctctgaaagggtatcacgtgttcacaggggtccccaggtcttactttaagaactgctgatagactttggtcatcttcatcccatcttcacagtttttggcatattcatcaaccacctttacaattatgtacttaatcacctcttcaaattggcttacttttatttatttattttgagacagagtttcgcttttgttgcccaggctggagtgcaatggcacgatcttggctcaccgcaacctctgcctcctgggttcaagcgattctcctgcctcagcttcccgagtagctgggattacgttcatgcgccaccacacctggctaattttgtatttttagtagagacggggtttctccatgttggtcaggctggtcttgaactcctgacctcaggtgttccacctgcctcagcctcccaaactgctgggattacaagcgtgagccaccgtgcccggcctggcttacttttaaactgacttaaatttattttgagagaaatgttgcatcactaccataaatggccatccatccatccagtgccaaccataaaaggtaaccaatgcagggcgcggtggctcacgcctgtaatcccagcattttgggaggccgaggtgggcgaatcacgaggtcaggagttcaagaccagcctggccaacatggtgaaaccctgtctctactaaaaatacaaaaaattagctgggcgtagtggtgggcacctgtaataccagctactctggaggctgaggcaggagaattgcttgaactcggtaggtagaggttgcagtgagctgagatcacgccactgcactccagcctgggtgacagagtgagactccgtctcaaaaaaaacaaaacaaaacagtaacaacaacaaaaaatcacagttaatgctgaaaacacacacatatctgtagccatagaagtcctaatagaatgtgaagaactgtttggaaaaccccattctagacccacagcttcattctctaggcagggaaatcgggtcccaagaagaggaaggtgacaaggccagagcccacagttccaggtggccagtgtgtcctctgaaaccatgccatgctctgcgcccctgcccggcctccaggtgtggaaatgtgtgacgttcttcgtggggacactcccccgaaggctgccattaggggcacgtgtgttcggttacccctcagggatgacaccctggactgggtgggcaagatggccttccctgccctcacccaccctctccttgctactcctgaaagccatcagcagctgacctactgtgtccccatggctcctgggtcggggtcacagatgcactgcatctttggaggcggagctggcagagcaggggcgagtcacttctagtttctgcctgggttcttacaccctcccctgtgggtgcttttaagcctgtttgtcaggtccccagccatcaaatggcagactttggactaccagattgacttgggtgggggtgaggagggttccagtgtctccccgtgctgaggagaggcccgctgggtgagttgacaggttggggctggcagccaggggcccctttgttcttcacttccccggcagttgcacgtcttatcctctctccatctccaacagaaagacaacgtggagatgatca

SEQ ID NO: 13321 - DNA, 591 bp, Homo sapiens
tcctggtggagctggtgcagtactgccacactcagatggatgtcaccgactacaagggagagaccgtcttccattatgctgtccagggtgacaattctcagctccttggaaggaacgcagtggctggcctgaaccaggtgaataaccaagggctgaccccgctgcacctggcctgccagctggggaagcaggagatggtccgcgtgctgctgctgtgcaatgctcggtgcaacatcatgggccccaacggctaccccatccactcggccatgaagttctctcagaaggggtgtgcggagatgatcatcagcatggacagcagccagatccacagcaaagacccccgttacggagccagccccctccactgggccaagaacgcagagatggcccgcatgctgctgaaacggggctgcaacgtgaacagcaccagctccgcggggaacacggccctgcacgtggcggtgatgcgcaaccgcttcgactgtgccatagtgctgctgacccacggggccaacgcggatgcccgcggagagcacggcaacaccccgctgcacctggccatgtcgaaagacaacgtggagatgatca

SEQ ID NO: 13322 - DNA, 5882 bp, Homo sapiens
atgcccgcggagagcacggcaacaccccgctgcacctggccatgtcggtgagcccaggaccgcgtgtcctgccctgtggggccccggtgggaatgcaggagggctgtccggactggagccctcctccccactgtctccctcctatcgtcagctgctccaaatcatcttcccacccaaagctcagttcagaccctgactcctccctcaggaagccttccaagtccccctctcagcccaaaataacaccacctcctgtgtgctgtggtaccttttccacctgtgcccccatttggcacttgcatggcacgagagggaaaaatgacagctctggccatagactggccctgagcaagccatgtcacctgtcagcctcgatttcctcatctggaaaatggtggtgtcaatacttatctggaagagttgtggaaaagttatggtggacacttggtcaccctctacagaatgtctaagtgacacacgcagtacctggcccgagtgagcatcctgcttcccttcactggtccgcgtgttgctctcatcttccctgggaggctgtaagatcctggcaggcaaagcctgagtgtgcagcccagcagcctgtggcaggtgccaggcatattcgttggtttattatagaacacagttcctgccctcaaagcccttactgtctggttacacatctagagtatgaacatattaaacctagcagaggaggacgttactgtgttacagacatatgtgtgtgcatgtattcttttttttcgagatggagtctcgcactgtcgcccaggctggagtgcagtggcgcgatctcggctcaccacaacctccgcctcccaggttcaagcgattctcctgcctcagcctcccaagtagctgggactgcaggcacgtgccaccatgcccagctaatttttgtatttttagtagagacggggtttcaccacgttggccaggctggtctcgaactcctgtgttggccaggctggtctcaaactcctgacctcatgatccacccgccttggcaccccaaagtgctgggattacaggcgtgagccaccgcgccccaccgtgtgcacgttttctatagcaataccgtatgtacagaagtctgtttactgagtctcagtgacagaacatgagagacccccgggactctaaaagctgattcaggacacattcagagacatcctgttttataccaaaggtcaaaacttggaagagatgttgttgcccaaaaggctgaaactataaatagtttcatttttgaaactgtggacatttttagcactgggtgggcccttggaatgatctaactcagcagttctcaagttttttggcctatttgatccctttatactctgaaaaattattgaggatcacaaagattttttaatcatctggattttctttatctatatttaccattttagaaatttaaagtgtgaaaatttcaaaatattaattcatttaaaaataacaataataaatatatatgcctactatgtacccacaaaaattaaaattaaaaattttttaaaaaacttaaaaaataactggccagctgcagtggctcgtgtacaccagcactttgggaggccaagatggtcagatcacctgaggccaggagttcgagaccagcctggccaacatggcgaaagcccatctctactaaaaatgcaaaattagctgggtgtgagacctctgaaagggtatcacgtgttcacaggggtccccaggtcttactttaagaactgctgatagactttggtcatcttcatcccatcttcacagtttttggcatattcatcaaccacctttacaattatgtacttaatcacctcttcaaattggcttacttttatttatttattttgagacagagtttcgcttttgttgcccaggctggagtgcaatggcacgatcttggctcaccgcaacctctgcctcctgggttcaagcgattctcctgcctcagcttcccgagtagctgggattacgttcatgcgccaccacacctggctaattttgtatttttagtagagacggggtttctccatgttggtcaggctggtcttgaactcctgacctcaggtgttccacctgcctcagcctcccaaactgctgggattacaagcgtgagccaccgtgcccggcctggcttacttttaaactgacttaaatttattttgagagaaatgttgcatcactaccataaatggccatccatccatccagtgccaaccataaaaggtaaccaatgcagggcgcggtggctcacgcctgtaatcccagcattttgggaggccgaggtgggcgaatcacgaggtcaggagttcaagaccagcctggccaacatggtgaaaccctgtctctactaaaaatacaaaaaattagctgggcgtagtggtgggcacctgtaataccagctactctggaggctgaggcaggagaattgcttgaactcggtaggtagaggttgcagtgagctgagatcacgccactgcactccagcctgggtgacagagtgagactccgtctcaaaaaaaacaaaacaaaacagtaacaacaacaaaaaatcacagttaatgctgaaaacacacacatatctgtagccatagaagtcctaatagaatgtgaagaactgtttggaaaaccccattctagacccacagcttcattctctaggcagggaaatcgggtcccaagaagaggaaggtgacaaggccagagcccacagttccaggtggccagtgtgtcctctgaaaccatgccatgctctgcgcccctgcccggcctccaggtgtggaaatgtgtgacgttcttcgtggggacactcccccgaaggctgccattaggggcacgtgtgttcggttacccctcagggatgacaccctggactgggtgggcaagatggccttccctgccctcacccaccctctccttgctactcctgaaagccatcagcagctgacctactgtgtccccatggctcctgggtcggggtcacagatgcactgcatctttggaggcggagctggcagagcaggggcgagtcacttctagtttctgcctgggttcttacaccctcccctgtgggtgcttttaagcctgtttgtcaggtccccagccatcaaatggcagactttggactaccagattgacttgggtgggggtgaggagggttccagtgtctccccgtgctgaggagaggcccgctgggtgagttgacaggttggggctggcagccaggggcccctttgttcttcacttccccggcagttgcacgtcttatcctctctccatctccaacagaaagacaacgtggagatgatcaaggccctcatcgtgttcggagcagaagtggacaccccgaatgactttggggagactcctacattcctagcctccaaaatcggcagacgtatgtgctctgcactctggggctggagtggggtgagggttgggtggatacagggaccgaggaggagggaagtcccaggcatcaggtgccagcatcctgtgctgacccgccctgctcagagctgccaggagcacctcgtactcagagagggggcttccttacccaagcacaagggccctgagcagtagatgcaggcccaccacggggcttgctataccagcatcctctcccgtgcagcgccccccacctcagggagctaagattcccagcaggggtggggacaggagagccagcagcagccttctttccccaccgttggggaattcactgatggaaccactggctagaatgaccaagggtgcatgcactacactgcacgagctctgggcatgcctgtgtgggcagagtgcatggccatgtgctgcacgctcgcacagtgagccttagcttcagagctggacagagcagatcctcctcaccagaggcctggagcccgctctggagggtttcagcagctgtgggggtcactgtgggcaggtacctgatggcagcagtgtgtgtgtgccagtgcacacgtgtgtgtctgcatgcaccgcatctatgacctccttttcagcaatcccatccatcaaatggagtaggtgccccctggctggctcattagtccctttggaaccctgaactatcacttagcatttttgagaatcactgaatgtggccatgggattcctgctttcttggctggagtagaaggaaagaaggggttcccacaggcatcgggcagggtgacactgacctcctcctcccatatcctccttccctggccttaggaagctgcttgggatgtaccagcctgggggcagcactccctgtcagggtgggctgaggcctctggagcagcccacgtgcccagggcctgggagctgggacaggggacggagtgtggaaaggaggggcctctcctttgcatgttgacatcatttctgatcctgtgccatctccccttccccaaaccatgacaagttgtcaccaggaaggcgatcttgactctgctgagaaccgtgggggccgaatactgcttcccacccatccacggggtccccgcggagcagggctctgcagcgccacatcatcccttctccctggaaagagctcagcccccaccgatcagcctaaacaacctaggtaggcctcgcctcccgactccctcttctccagctggttcccaggcccctggatcacagcaggccccaccaaagcaacaggatccctaggacggaagtcactaaaggaagccggggaggatggggccggagttgtcagcctctaggcagccagcaacccacagatcccagaggcctagggtgtccctggctgatgtcccatgctccgttgcccctgagaggatgtgtcctgcacacagtctcaggcctgggcatttccagtggcacccatgaggtggctgctgttactgccctcctgtccccagggcgttcagggtgggcagtgaggagtgctgtcgggggactgggggcccgggccctctggcttcacctgtccctctggcttcacctctatcacactgtttgaatctcggttgggcctgagacctgtgtgcccccttcctggccccgtggtgactttcagacgttgaatgtggccaggcagccagcatctgccccggtgcattccttggtgcccagggagacatccccagactagacaggacccttctctggactttctgtgggctggcccactcagggacctccattgtttgggagcggggtcccctgaacagagggcagccaggagccagtccttggtgagccagacttcactgtggaggcggcagcaccttcagccagggtagcccgaccaagcctggaactctggagaggcaccgtgactgtggcttctagtcctggctccacctctctctcccctcccaggaactccccctccacctcccatctttatctctcaattttgcaggcagtcacccaagccaggccggatggtgggcctggggtgcggcgtcagatgggtaacgccctgggcctggagaggccaccgagcctagccatgcggcattagctctagctctcactccctaatccgtccttcttagctgcgcacacaccacacgccccctcccctgcaccctgtccccggcctctctcagccactcttctgcttcccttgttcactgtggagccgtgtgccctggggagggggagacaccgcttcgcagccctcggttctgctttgctgcttctagactctgcacagtggtggggggctgtcagagttggggtcacgcgggctgctgcaccaggcacctggggactgggctgcttgtcaggaggggcagctagtcagttgggtggacgtcaggcaggccttggacacaaaggaagacatggacagagtggatggtgggcctgatcccggaggc

SEQ ID NO: 13323 - DNA, 781 bp, Homo sapiens
atgcccgcggagagcacggcaacaccccgctgcacctggccatgtcgaaagacaacgtggagatgatcaaggccctcatcgtgttcggagcagaagtggacaccccgaatgactttggggagactcctacattcctagcctccaaaatcggcagacttgtcaccaggaaggcgatcttgactctgctgagaaccgtgggggccgaatactgcttcccacccatccacggggtccccgcggagcagggctctgcagcgccacatcatcccttctccctggaaagagctcagcccccaccgatcagcctaaacaacctaggcagtcacccaagccaggccggatggtgggcctggggtgcggcgtcagatgggtaacgccctgggcctggagaggccaccgagcctagccatgcggcattagctctagctctcactccctaatccgtccttcttagctgcgcacacaccacacgccccctcccctgcaccctgtccccggcctctctcagccactcttctgcttcccttgttcactgtggagccgtgtgccctggggagggggagacaccgcttcgcagccctcggttctgctttgctgcttctagactctgcacagtggtggggggctgtcagagttggggtcacgcgggctgctgcaccaggcacctggggactgggctgcttgtcaggaggggcagctagtcagttgggtggacgtcaggcaggccttggacacaaaggaagacatggacagagtggatggtgggcctgatcccggaggc

SEQ ID NO: 13324 - DNA, 24854 bp, Homo sapiens
agagggagagcctaggaaacagtgtggatcacaaggaggtgattgagagctactctgcgtctggaagagtgaggaggagcctgtgtggcagaacaaaatggataaggtcgttccagccgtgcagaagtgtggaggtgtgagcctgcaggcaggtggctctggttggatcccaggtgcatgcagggctttggtgagagtgaggctgaaggaagcagctggggactcattctgactaaagaggcatggcaggaggggtctctgaaagtgtcaggctgggggccaggggctgccaccaacagaagagcaaggcaggtatcagggccccatccaatcaggtgagaattcagagcctggctccacaaggaacctgaggcagaggcacccacagcaggtgcttgggctaaatgcagctcagtggccagtgcaggcaccagttttaatacagtggggccattccagattctgagtgcagatggggctgagcagaccgccttccagctggactcgatcaggactgaccctggacggggcaggcttgcacttgtagcttcagagctccactgcaggcacagctgaccagggcagcgggtccactccttggagagctggacagccccacttttgaggtacacggccctggggataccactaatctccacgtaccaataatcaccaagttctgtcagttgtaaaatcccttgacaggattccagatttgtctcagccagcttaagccccagtgtgggcagacctccatcccaggaggatttagtcctttgtcagcagcttcttagctacacgtaagctattctgtggtactttatagtttacaggattttttgttttcttttttttttttttttgagacagagtctcgctctgtcacccaggctggagtacagtgacgcgatctcggcttactgcaagctccgcctcccaggttcacgccattctcctgcctcagcctcccaagtagctgggactacaggcacccgccaccacgcctggctaatattttgtatttttagtagagatggggtttcaccatgttagccaggatggtctcaatctcctgacctcgtgatccgcctgcctcggcctcccaaagtgctgggattacaattttacaggatgtttttaagtatgttgggttagcacattctctgccaatccgtggaggtgggcaaggaaggcagtattccattttatgcatgagaaaatagccttgggatgataagtgattcatcccacttatacacaggaagcagtgaagaaacagaatcagtgtcttctggttcccaattcatttctctgtgctgctgtgttgtttccatgtatgtatgtatgtatttatttttttgagacgttaagtcttgctctgttgcccaggctggagtgcagtggcatgatcttggcttacagcaacctctgcctcctgggttcaagctattcttctgcctcagcctcccgagtagctgagactacaggtgcgtgccaccatacctggctaatttttgtgttttttagtagagacagggtttcactgtgttagccaggatggtcttgaactcctgacctcgtgatctgcctgccttggcctcccaaagtgctgggattacaggcatgagtcaccatgcccggctttgtttgtcttatttctaaattttattgatttatttattttcacagtcatagctctggagtcttttttatcttctcccctctaacctgctcccacccgaacctttccatttcagcagatagcatcattgcaacgggctgtgccagatccagccatcacatccacctttccagccaaagggagggtggaagggcaggatgcagaaggtcaatctccccctcctcagggacatttcatggaagttgcacgcattggccagaacccggtcacatggccacagctaactgcaaaggatgctgggaagtgttgcctgtgttgcagacagccacgtgccagtcgaaaatcagaggttctttctccctccgtcttgctgctggctcgcttctccagaccacagtcattgtgcacgtgtctcctgctgctccggctgtggcctgcactcctctcatcctcttccaagctgctgtcacagcgctgtttccagagggcaaatctgattggtcactcccctgctttactccccaagggcttcctgttttcttttatttttatttttattttcattttttgagatggagtctcgctctgtcgctcaggctggagtgcagtggcacaatgtcagctcactgcaagatctgcctcctgggttcatgccattctcctgcctcagcctcccaagtagctgggactacaggcgcccgccaccacgcccagttaattttttttgtatttttagtagagacggggtttcaccatctactcttagccaggatggtctcgatctcctgaccttgtgatctgcccgcctcagcctcccaaagtgctgggattacaggagtgagccaccgcgcccggccagcttcctgttttcttaacacatcaggtgcttaatgacttaaaagggcccagtgtgatcaagtttctgcctctgtgttctcagctcatgccgccttgtgctcctggcctttgcccaggctcttgctgtggcctggaatactcccctttctttgcctgccttccttcctcttgccctcccctgacctgcaggctggattaggagtttctgctgggcatcccatggcacccgtccctgcactggggatcctgctttcctggtaggccacagaccttgtgaggggagggactgtgtctgttgggttcatgacagtgtgcccagcccccagcaggtgcctggcgtagatcaggtttgtggaacaaatgaatgtgatatattaatttagctttagagtattcattgagggctgctgtgtgccaggccctctgtgccacctgggtggagggtggaggactgttgcattgagggcagttgaaggagtgagctgggaagtgggaggtggaggatggggactgggatgcagggtttgaggttatcaggggtcccagaagcagtaatgccaaggcctaggctgtgacctggagtgagggctgcgatggggtggggtggggtcgaggctgtggaggagggtcatcagggcactgctggagccctggggttctccagggccgggggtggtcattgcagtgttctcccagctcctctcaacaccctgcggtctgtggagagcaggcctggtgcactggacttgcctctggccagggctgagtttctgccttctaaacgatcttcctcctgtgttgccctagaggcctctggactgtcctgagtacttgacgcgtgttagagtgagcatgggctgctagccttccgctccaggtggaggagtttctgttgttcttttgctgctgttgctgcagtgagctgccaggctgagcttctggatggacctgggggatggaattaggagcttctgaattcttgggttgtataacctaaggccggagagtcccacagcactgctgctgggcggagagactggaccctgctgatacagacagcgacagcagcaggagcatctgcagtttcccagcaggtcctgcatgcctgggcttggcactagtctaagtagtaactcatgttatcctcacgacagtcccacgaggtggggtcattactgacctcctattacagatgaggaaacagaggcttgcagaatttgagatcacacagctggtcagcgtagcgattattcagaccctgtcacctggctccagaacccactcgtttacctttcttacatcagggctgctttgtagtgtggcgagctgagtggagctccacccgcctgggctgatcctggcccttcctgcctgacctatggtgcgggggccctggctctccccgtgtgagcccccaggggtcacttgtaatatgcctgtgtacactatgatagcatagatacttctgttcctggtacagattaatcatttacggctggcattgacttgtaacagatgacatttgatgaaatcaaccagcctctcactggtatctcagcagaaacagggctgtacctcccaggcatcctgggaaggatgatagaagtgtgtgatctgtgcttccctaccgggagctgacttttgaggctctctggactgggactttgccataaaactgcttatcagaaacctcagataagtggagtgccctgtgtcctggccacgtactctggggccagctcctccatccattcagtcctcccacatcccatcttcaccaagcagagtggaaagcggcaggtctctgcgagaaaaggaggctctgtacccagccttcagtgagataactttagagtggggccttgtattccctacacaggccttgtccccgacacggcctctttgcccttgcttctccttctgctaagaatgctccttcccaactccttggctggacacacggctcctgctctgtgggcctgtcctgttcccactcagagcctcagcaccccccatgtggccaagacacagcccctcttgccttaggttgccgtgggtctgtttccacatctgtttcccctccagactgcagggctcctgagggacagggcctggggccaagtctcctctgcgttcctgatgcctggtggtgtgccacgctctccgtgggtgcacggtaaatatctgccgagtggctagatgtatccatggttgctgaaggccaagtgtgttgaccagagggcgtgggaaaggctccactggggtggctggggtagagatagaccttaaggggtccagaagactccaccagctggagggaaaggccctacagagacaaggtactaggaaaggcccagaggacagaggaggggccctgtggggagcctgtgggcaggaagggcctgtgctgggctttgaaactggggactcaggtactgctctagcgtgagggtccttggcattttttttggtccaggaccccctgaggtccctggggaatgagaacaggctcacacagccactttcaagaggtttgcaggtcccctgaggcttagccacagacccctcccaccccagcagagacacagcagaggcttctgagtggaggccaggtggcttcagcctggggttctagaagggagggaagagacacacccccgtgtgtcctccagagcctcagccttctccctgaatctcccctttgcctcctcactgtaacccacacctggctctccttgaaggacccgcttgccccgcagcctcctgagagttttctctcccagtccctctcccactgggcctggaggtggggtagggtcctccttgcccccagccttgaatcttctgtcaccctacaataccacttgctgtcaccccggtgataggtatctacgagcctggggtgctcccccacatcctcaaagatgtgagcccctgactcagcgttgcctctggttcctgaccctccacattcacatgaccacgcgctggcctttatcatcgccagtgacagcagctctcccgtaaatacaagtttcaagcaccccactttccagtctctgccttctgtctttccagttcattccctctagtcctccacccacacagtgcttttccccattgacagggaattgctcctggccgcttttcccagccccatcccgttcatgtgccttgctttgtacccagcatggactccatggcctgtcattgtcactccttcacctatacttcctgcctccttgcttctctctctcttcgtcatcctggcatcaccaccccagaactgcttggtttcagttctccaccatggctaggggaacatacctttttgctgactgctctcactttctttttttttttttttcttttttttttttttgacacagagtctcgctctgttgcccaggctggagtgcagtggcacactctcagctcactgcaacctccacctccggggttcaagcagttctctctgcctcagcctcctgagtagctggtattataggcacccgccaccacacccggctaatttttgtattttttttagtacagacagggttttgccatggtggccaggctggtcttgaactcctgacctcaggtgatatgcctgccttggcctcccaaagtgctgggattacaggcatgaaccaccctgcccggccctattgctctcactttgaaatcacgacatgagccacagtgagcctatgatgtggtttgacgtctttctgcatttctctgttcacccctctcccagaaggcatgcctccttccctcccctcagcctgcagccccttcccctccacgcttactctcagctgatagccctgctgctgtctcgctgagaaaatagaaatagccagaggagaattccctctaccccatgcacacacctctgtccccgcctactccacattccctgttgtcagcaccgatgtgtttagctgagggtggtccccccattcaaggccatcatctcctgtcatctacttcttgacaccatttgaacaattatctcccctctttcctacataacactttccccttttctactatatattttttgctatggattgaaagtatccccccgaaatcatatgttgaagccccaatccctcgtgtgatggtattaggaggtagagcactatgggggtgattaggtcatgaggatggagccctcatgaatgggattagtgcccttagacgaagaggcaagaaagagatgatctgtctctgccatgtgagggcacaacgagaagatagccatctgcaaaccaggaagtgaaccctcatcaggaactctatcagccagcaccttgatcatagacttcctagcctctagaactgtgagaaataaaggttgtttaagcctcccagtctgtagttttctgttataatgtcctgacctaagttattttccatcgctatacaatgggttatttttttctttaaaaaaaaattatttcttgactctactttttcctccagagactgcttatattccactgtcttcattcttctcctcctgttttctctctttaaacttttcaaaaatagcaaaatataacacatatagagaaaatgatatacagctcagtgatttatcacaaacacctgtgtaaccaccactcgaatctagagataggacattacagcaccccagaagccctccttttgtcccctcttcccaaagaagggtaaccaataacttgccttttatgataaaggctttttttttttgagatggagtctcactgtgttgcccaggttggagtgcggtggcgcaatctctgcttactgcaagctctgcctcctgggttcacgccattctcctgcctcagcctcctgagtagctgggactacaggtgcccgccaccacgcccggctaattttttgtattttagtagagacgaggtttcaccgtgttagccaggatggtcttgatctcctgacctcgtgatccacctgcctcagcctcccaaagtgctgggattacaggcgtgagccaccgcccccggccaagataaaggcttttctatctggcttctttgttagcattttgttggcgagattgatacgttttgtgtgcagctgtctgtcattttcattgcaatagaattccattgtctactatatcacagttactcattctactactgatgaaaatttgggttatttctagtttttttggtgcatacatgcatacatttctggtagacatacctagaagtgaactggctgcattatgggccataacttgtcttcaacgttagtaaataataccgcccgtctgttttccaagcagcagtaaatggcactttctgttacttcatatcttctgttacttggtactgtcaggttttaaaattttagtcattctgtcgggtgtctagtagtatgttattgtggttttattttgcatttgcctgattgcaaatgaagttgagcactttttgatacagtgattaaccatttggatatcctcttcagtgaagtatcagctcaattctcttgactatttaaaaaataaagttgtttatctttttcttacagagttttaggaggagttttttggtacatgtgcagtccaaatacacaccttttgtcagtgatacgtgttcagctgcacacacggtgttttgcctttttattcttttaatggtatctattgataaacatgagttcttagttttaatgaagtcaaatttgttcatcttctttacggtgtactttttgtgtcttgtttaaggaagtccttctctatcttaaagctttgagaagcattccttctttctcctattttctaaaaattgttgaagatctccttccttccttccttccttccttccttccttcctttcatctatctctctctcacccaggccaaacttcagtggcatgatcatggctcactgcagcctcaacttcccaggctcaagtgatcctcctgcctcagcctcctgagtagccaggactacaggcacgcaccaccatacctggctaattttaaaaattttttgtagagacacggtctcatcaagttacccaggctggtcttgaactcctgggctcaaacaatcctcccacctcagcctcccaaagtgctgggattacaggcatgagtcacatgtctagcctgtattctttctttcttaaatgtttggaagaattcatgggtaaaaccatgtgaccctggagtttatttgtgggaagcttttaaaacatggattcgatttctttaacaaatataggactatgagattttcatctcatgtcggtttgggtatgttgtgttttcaaggaatttttctattttatcgaagttgtcaaatttgtctgcaggtccccttatttcctttttaatgtatggaggatctgaagggatggtactttgtgttgtctctatttcttgtttggttttgctagtgatttgccaatttaaaaaatctttccaaagaaccaacttttggctttgtttattttttgaaaacctgagtagctgggattacaggcgcccaccaccacacccggctaatttttttatttttagtagaggtggggtttcaccatattggccaggctggtctcgaactcctgacctcagatgatccacccgcctcggcctcccaaagtgctgggattacaagtgtgagccagtgtgcctggcaagccgctttttaaatggcaccaatcccattcatgagggcagagccctgatgatcgaattacctcctaatggccccatttcttaatactatcacactgagaattaagttttaacataagaattttaggaagacacaaacattcagaccatggaacatatataaaacagttgtcctaccaactaacagaatacacattcttttcaagaacacctatataaaaattatagacactgacctatgctggccataaagcaaatatgaacaaatttcagatacctgaagagatttagactatgttctccaactacagtgcaattaagctagaaatcaatagcaaaaatgtaactataaatgagcccgtatgtttgaattttaagcaagatatatgtaaattatctatggttcaaaaaagaagtcacagtgaaatttagaaaatatcttgacgtggcgggttgcagtggctcacgcctgtaatcccagcactgtgggaggccaaggcgggtggatcacctgaggtaaggagtttgagaccagcctggccaacatggtgaaaccctgtctctactaaaaatacaaaacattagccaggcgtggtggtgggcacctgtggtcacagctacttgggaggctgaagcgggagaatcacttgaacccgggaggcagaggttgcagtgagccgagattgcaccactgcactccagcctgggcaacatgagtgaaacttcatctcaaaaaaaaaaaaaaaagaaaagaaaaagaaaatatcttgacccaatgatgatgcaaatactacgtatcaaacttgtaggatgaacttccacttctggccatgacagaggagcctgtatcagactagccttcctatttatatatttatttttgagatggggtgtcgctctgttgcccaggctggagtgcggtggtgcaatctcagctcactgcaacctccacctcctgagttcaagtaattctcctgtcccagccttccaagtagctggaattacaggcgcccaccaccacacccagctagttttttatatttttagtagagacggggtttcaccatgttggccaggctggtctcgacacctgacctcaggtgatccacctgcccctgcctcccaaagtgccgggattacaggtgtgagccactgcgcctggccgtgagtgacctttttaatgtgttgttgaatttgatttgctggtattttgttgagaagttttgcatcaatatccatcagggatactggcctgtagttttctttttttatatgtctttgtctggttttggtgtcagggcaatactggcctcatagaatgagtttggaagttttctctcctctgtttttcataatagtttgagtagggttggtattagtttttgtttaaatgtttggtaaaattaagcagtgaagccactgggtcccaggcttttctttgctgggagacttttcattacagctttgatctcattacttgttattggtctatttaggttttggatttcttcacggttccatcttggtaggttgtgtatgcctaggaatttatccatttcttctagggttttcaatttattggcatataattgttcacagtaacctctaataatcctttgagtttctgtgatattggttgtaatatctcttttgtcatttctgatttttttgtttgggttttctctctttttttgttagtctagttaaagatttattgattttgtttatcttttcaaaaaactttattttgttgatcttttgtattgttttgtttcaatttcatttatttctgctatgatctttattatttcttttcttctactaattttgggtttggtttgctcttttctagttctttaagagacatcattagattattttgaagtttttctacttacttgatgtaggtgcttataggtacaactttcctcttagtacttctttccctgtatctcacaggttttgatatgttgtgtttccattatcatttgtttcaggatgtttttaaatttccttcttaatttcttcattgaccattcaagagcatattatttcatttccatgtgttcgtatggtgtgcaaaataccttgtttttgatttgtagttttatttcattgtgatcacagaagatacttgatatgatttcaaatttaaaaagtaatttggctgggagaagtggctcatgcttgtaatcccagcgctttgggaggccgaggcaggcagatcacgaggtcaggagatcgagaccatcctggctaacacagtgaaaccccgtctctactaaaaatacaaaaaattagccaggcatggtggcaggtgcctgtagtcccagctactcaggaggctgaggcaggagaatggtgtgaacccgggaggcagagctggtagtgagccgagatcgcgccgctgcactccagcctgggtgacagagcaagactctgtctcaaaaaaaaaataataacaataataataatttaagacttgttttgtggcctaccatatggtctatccttgagaatgatccatatgctgaggagaagaatgtgtattctgcagccgttggatgaaatgttctgtaaatatctaataggttcatctgatctatactgcagactaaggctggtgtttctttgttgattttctgtctggatgaactgtctaatgctgaaagtggagtattgaagtctccagctattattgtattgaggtctatctctctctttagctctaagaatacttcctttatatatctgggtgttccagtgttgagtgcatatgtatttaaaattgttacattatcttgctgaattgacccttttatataatgaccttctttgtctctttttatagtttttgtcttgaagtctgttttgcctcatagaatagcatagctattcctgctcttatttggtttccatttgcatggaatatctttctccatccctttagtttcagtctatgtgtgtctttacaggtaaagtgtgtttcatgtaggcaacagatcactgggtcttgtttttctatccgttctgccactctgtgtcttttgattggagagtttagtccatttatgttcaatgttattactgacaagtaaggacttactcctgccactttattaattattttcttgttgctttgtgatcttctttctttccttcctgttctccttttagtgaaggtgattttctctggtggtatgttttaatttcttgctttttatttttttgtgtgtatctgctgtatgttttttgatttgaggttaacatgaggcttgcaaataatatcttataacctaatattttaaactgatgacaccttaacactgattgcataaacagacaaacaagcaaagagaaaactaataaaaactctacattttaactttgtccccccactttttaacttattgtactgtttatgtctgaaaagttgtagttattatttttgattggttcctcttttagtctttctactcaagatatgagtggtctacatatgacagtgttataatattctatatgtttctgtgtacttgctattaccattaagttctgtactttcaagtgatttcttattgctcattaatgtccttttctttcagattgaaaaactccctttagcatttagcagtatgtgaactgcatttttcaagtccagaatttctgcttgattcttttttttttttttgagatggagtcttgctctgtcgcccaggctggagtgcagtggcgcgatttccgctcactgcaagctctgcctcccgggttcacaccattcttctgcctcagcctcccgagtagctgggattacaggcgcccgccaccacgcctggctaattttttgtatttttagtagagatgggatttcaccatgttagccaggatagtctcgatctcctgaccttgtgatccgcctgccttggccttccgaagtgctgggattacaggcgtgagccactgtgcccagcctgcttgattcttttaaattatttcaatctctttgctaagtttatctgttaggattctgaattccttctctgtgttagcttgaatttcactgagttccctcaaaacagctattttgaattctctgtctgaaaggtcacatatctctgtctctccagaattggccactggtaccttaattagttcatttggtgaggtcatgttttcctgtatggtcttgatgcttgtgatgttcgtcagtgtctgggcattgaagttaggtatttattgtagtctttgcagtctgggcttgtttgtatctgttcttcttaggaagactttccaggtaataaaagggacttgggtattgtgatctaagtttttggtcactgcagccatatctgcattagggggcaccccaagcctactaatactatggctcttgcagactcgtaaaggtaccacttgggtggtcttggataagatctggaagaattctctggattaccaggcagaggctcttgttctcttcccttactttctcccctaaaagtggagtctctctctctgtgctgggccgcctggagctaggagaggggtgacacaggcacctctgtggccactatcactaggactatgctggctcagacctgaagccagcacagcactgggtctcacccaaggcctacagtctccactgcctggctactgcctacgtttgcttaaggcactagggctctacagtcagcaggtggtgaagccagtgagattatgtccttcccttcaaggcagcaagttccccctacccccatcctgggaaggtccttagatgccatctgggaggcagggcctgcagtcagaaaccttagtaatctccccagtgctctattctattacagcctggctgatacccaagccataaggcaaagtccttcctgctcttccctcccctttccacaagcagagaagtctctctccatggccaccactgccccagccctgtggcagtgctgccaggccactgccaacgttcattcagggcctaagggctcttgaagcaactgaacactgccaggcctgggactctccctttagggtagtgggctcccctctgacccagggcaggtccagaactgccaccccacagccaacacttagaatctgggaccccaagagccctcttggtgctctgccacactgtagctgagctggtacctaggctgatttttgctttttatgaaggtacttttttgtgtgtatagttcaatttggttttcctccagggaggacaattggtggaggtttctatttgggcatcttttttttttttttttgagacggagttttgctctttcacccaggctggagtgcagtggcgcgatctcggctcactgcaacctctgcctcctgggttcaagcgattctccagcctcagcctccccagtagctgggattacaggtgcctgccaccatgcttggctactttttttttcaattaaaaagtaaactttaatgtcgaaaatgcaaacttggggaaggcagaaagatcacacacaaggctgtcgcttcacacttggaaggttgcacggcggccaggagaggcactcctcacttcccagacagggcgggggccgggcagaggcgctcctcacttgccagacggggcggcggccacatgcctggctaatttttgtatttttagtagggacggggattctccgtgttggccaggctggtctcaaactcctgacttcaggtgatccacgcacctcggcctcccaaagtgctgggattacaggcatgagccaccgcgcccagccctatttggccatcttgctttgcctccaccttcatttgataacagaacacccccatgtaaccaccaccacaatcaagatataagacatttctgttattctccaaatttccttcaccctcctttatagtccatggcacccaccccatccctgggcaacacctatgtgcttcctttttttttttccccgcaggaggacgtcttcctatacctatgtgcattccatcactgctgcttttaatcatatagcgtgtagtcttatgagtctgactttttcacttagcataatgcttttgcaatttgtgattgagcgttttcatatgattctgttttttctgtctcttagcttggaagttatacactttttagtagtaactgttgggagatcgttctccaagagtctctctcatatttccatacatcctgctagcagagacattgactacctgtttttgtctgtttagtgttgctataaaggaatacctaagtctgagtattatacatagaaaagaggttttatttgtctcatggctcctcaggccatacaagaaacatggtgccagcatcttaccagtgtcacatggcaagaaaggaagtgaggaagagaaaataagttgttaactggttgttaaaaagtgccaggcacgggccaggcacagtggctcgtgcctgtaatcccagcactttgggtggccaaggcgagtggatcacctgaggtcgggagttttgagaccagcctgaccaacatggagaaaccctgtctctactaaaaaaaatacaaaaaaattagctgggcatggtggtgcatgcctgtaatcctagctactcgggaggctgaggcaggagaatttcttgaatccaggaggtggaggttgcagtgagccaagatcacctgggcgacaagagcgaaactctgtctcaaagaaaaaaaaagtgccaggctctttttaacaaccagttcttacaggaactaatagagtgaaaactcactcacccccaccccacagggagggcattcattcatgagggatccacccctatgacccaaacacctcccattagccccccacctccaacattggaatcaaaatttaacatgaggtttggggggcagaaatccaaattatagcactacctttgttccaggctaccttcaaaggatgtttatacagcaaacagccttggaaaatagagttagggtctccttgtagagcacagggtaagtttgcttacttttcagcataatcaagattgtgtcttcttctggagcaaaactttgacaacaacaagcggggcaaagtctgaaaccttttgcacatcttgacagaaccttagagattacgagatttatctctgccttactcaaggtccattagtatcttccagaacaataagttggtcttagaatcctttagctatgtattcccttccaggcttcgatgctgtgtgctgttgttttatttagtttttattttaaacccaacaagacgctataccatcaatacttatttagatccccccacatatttaacttgccatggtgcttcattctttcatgcctctttaagcatccatctaggatcgtgttcattccacatgaagagaaagcttttggcccagcacgatggctcacacctgtaatcccagcactttgggaagcctaggcgggaggatcgcttgagcccaggatttccagaccagcctgggctacgtggcaaaaccctgtctctactgaaaatacaaaaaattagccaggtgtggtggttcacgtccctgctactcgggaggctgaggtgggaggattacttaaacctgggaggttgaggctgcagtgagcgttgattgcaccactgcactccagcgtgggtgacaggagtgagaccatgtctccaaaaaaaaaaaagaaggaaagaaaaagcttttgtatttcctttcgtgtaggtctgctaatgacaaagtctctgggttttttgtttgactagagaaatgttttaattttaaccttattcttgaaggttttgtttttgttttcattttgttttgtgtgctaagtacagaattctcattggcatttatttatttagagacagagtcttgctctgtggcccaggctagagtacagtggcacgatctccgcctcccaggttcaagcgattctcctccctcaacctcctgagtagctggggctacaggcatgcaccactacacctgactaatttttgtatttttagtagagacggggtttcaccgtgttgcccaggctgatctcaaactcctgagctcaagtgatttgcctgccttggcctcccaaagtgctgggattataggcatgagccgccgtgcctggccagcatttattttcttttcagctctttaaggaagtcattccattatctctgggttccattgttgagaagccagctgtcattctaatggttgccctttgaagataacttttttccctctgctattttaaatatttcctccttgtattttattttcaacaggtgtaatgtggcacatatatcagcaattgttatgttacatacaatacatattgtgcaacatatgtatcattatcagttattgctgtgtaacaaactactccagaacacagtggcttataaaaggaatcatttatttagtccttaaatctgcaatttgagcagagctcagtgggaaagcctcagctttactttatatggcaccatataaggtaactcgcaactggcaagttggtgctggctgttggctggtagttcattcagggctcagggcccaggaccaagagtcgtcaccatggcttgcttcagcctccttgaggcatgatggctgggtcccaagagaagagaaatagaaacttccagtctcttaaggcattggtctggaagctgggacggcatcacttttgccatattctgttggtaacgcagttacatcgccagattaaagggtaaagagatacaaattcccactgctcagtgcaaggaatatcagtgattttagggggccctgttttaaaacccctacaaggtgctaagcgtggatttctggggctttcttgttttttgtttttttctatgtgtttttttttttttttttggtggtggggtcagggagggcttatagggtatgttaaatcagcagaataattttatttatttatttggagatggagtttcactcttttgcctaagctggagtgaagtagcgtgatcagagatggagtttcactcttttgcctaagctggagtgaagtagcgtgatctcggctcactgcaacctccgccccgctggttcaagcaattcccctgccttagcctcccaagtagctgggattataggcacccaccgccacgcccggctaatttttatatttttagtagacatggggtttcgccatggctagtctggaattcctgacctcaggtgatccacccaccttggcctcccaaagtggtgggattacaggtatgagccactgtgcctgacctataatgttttttaaaaatcagttttggaaagtttgcagacattaacttttcaaatgtagcttccatttgattctttttctactctgcctctgatcctccacttatgtatgtatgctagatcttttattagatagtctgtgtctcttatgtactctactatattttgtattcttctgtctctccatgctttattctgtttactctttcctgattatattttttaattttgtaatttccatttgatgcttttttgatcattcaaaactcttcaccaaaattctaaatttccttttttaacctctcgaatgttatcacagttactttaaagtctattttggataacttaaatatttacagtcccctcacagatatgtttcttttgtatattgtttctgttggttttctttcatgtcttatctccacatatgcctggtgagttttgattatgtgttggtcattgtatttgcaagtatgctcgtagaaataatctggaatggccgggcgcagtggctcatgcctgtaatcccagcactttgggaggctgaggcaggtggatcacgagatcaggagatcaagaccatcctggctaacatggtgaaaccccatctctactaaaaatacaaaaaattagctgagcatggtggcacgttcctgtaatccctgctactcgggaggctgaggcaggagaatcacttgaaccaggaggcagaggttgcagtgagccgagatcacgccactgcactccagcctgggtgacagagcgagactccgtctcaaaaaaaaaaaaaaaaaaaaaaaaagaaataatctagagcctagtttgatgtttccttacaaagaatgaatttatttttgcttctcccattgcaactaggataacctcagtctagtttctggaactgaaatcacttgaggctgaactgtggtctctgtgagagcgtgtctgtgtatggctcacccttattcctaggctacgtagttctttaggaccctaacccaaagtaagagatgttcatcagggctctcctcttggcagacgcctgggctccagtccctgtgtcctgagccccatgaggctgttactggtgctgctcgtctgcccatcctctccagtaacagccacctgaacactgcaattcctgggtttccatcattccttccagcctggtgagtcatcagtgtcttttgaggtatccagtgcctgccagcagatgttttttaataatttgtccagcatttctggctgtcctcagtaggtggtctgtttcacattccctagtctgctgttaatggaaagtggaagttctgagagagaatcatcgttcccgtcagcattcaaatgcctgattacactttccccattcgctatcctttcctttatttgctcctcaccacagcaaaactcctcaaaaatatctatctttgcaatcttcagattctcacattgtgtccttaaacccactttaatcaggccttggttccctccattccactaaaagtaatgttgtcaaggtcgtgcatgcctccgtgatgctaattccagtgatgagttttcagttgtcattctctgacatatcggcaacacttgatgtggagtaccctgatgttgagaggctggtgagatgaaggaaaaacccagccaagggcaatgaggaatggcttccttccgcctcctccttccctatctttgttgtggtttttgttgtttctgtaacactgattacgttatagtttatttaatgtacttccttattctatgtttttactttagtcattttgttgatctcctccataataacataggctcgggccaagcacagtggctcacgcctgtaatcccagcactttgggagaccaagatgggtggatcacttgaggtgaggagttcgagaccagcctggccaacatggcgaaaccctgtgcctactaaaaatacaaaaattagctgggcgtggtagcaagcgcctgtaatcccagctactagggaggctgaagcaggagaattgcaggagaatcacttgaacccagggggcagaggttgcagtgagctgagatcgcgccactgcactccagcctgggtaacagagtgagactctgtctcaaaaaaaaaaaaaaaaaaaaggcttcaggagggcagagcattttatgcaattgttcattaattgacccctccatttggcacagatcacatgcccagtagttaactgttaatcaacgcactctctgtggaacaacaggctggtcccgttgagccaacactctctgggcactgccttcactagactctggctggctgctgcgcttgtagaggtatgcaagacaaaaccttttggtatgttaaaagccctggtcagaactttaagtaaccatcactgacatataatggttatggttttgaaagtgcttttatagtggtttttcatctgtcctcacagcacctctgggaggtaggtaggacaggtacagttagtctcatgtttcaaatggggctcagagagggaaaaggatttcccaagatcacacagcaccttagtagcaaaacttggactcaacctcaacacttaaaaatgaacaaagctggccgggcgcagtggctcatgcctgtaatcctagcactttgggaggcccaggcaggcaggtcacctgaggccaggagtttaagatcagcctggccaacatgacaaaactctgtctcttctaaaaatacaaaaaattagccgggcatggtggcgggtgcctgtaatcccagctactcaggaggctgaggcaggagaatcacttgaacctgggagatggaggctgcagtgagccgagatcgtgccattgtactccagcctgggcaacaagaatgaaactccatctcaaaaaaaaaaaaaagaaaagaaaagaaaaagaaaagtttccctttttttaaatatctcattttaatgactgcataatagtttattacatagttataccataatttatataatattttgttgctgtacatttaggttaaacaatacttacttagttcctactatgaagaggggccaagtactcgaggctggagctctcacatgtggcaatgaaattagaaagtggatatggcagggctgtggtaaaataaaatataaaaataataaatgatattaccaaagaaaaggaaagtttttcaaaataaaggaaaatctagacaagcatagtggctcacacctgtaatcccagtacttttggaggctgaggcaggaggaacacttgaggccaggagttcaagaccagcctgggcaacatagcaagaccccctgtcaacaaaaataaaaaaaaattaggccaggcacagtggctcacggtggctagtgcctgaaatcctagcactttgagaggctgaggggggtggattgcctgagctcaggagttcgagaccagcctgggcaacatggccaaaccccatctctactaaaaacacaaaaaattagccaggtgtggcagcacacgcctttaatcccagctactctggagactgaggtaggagaattgcttgaacccgggaggtgaaggtcgcagtgaggtgagattacaacactgcactccagcctgggtgacaaaatgagactctatctcaaaaaaaaaaaaaattagctgggcatggtggtgcatgcctgtaatcccagctactcaggaactaaggtaggaggatcccttcagcccaggaattcgaagatgcagtgagtcatgatcacaccaccgcaccccagcctgggttacagagcaagaccttgtctctaaaaaacaaagaaagtctaacctaaacgccattatgtcatttacatgtgtataggggtgtgtgtgtgtgtgtgtgtgtgtgtgtgtgtgtgtgtgtgtgtgtgtgtttgcttgggaggggagtcgggctggagctggccaggccgcagcctggggaccttctgattccagcagggatgtgggccgagggtcccgccttactcatttcgggtcttgctcctctgtcctggctctacagactcttccagctggagttggaggctgacgccctagtgaatttccatcagtattcttcccagctgctacccttctatgagagctcccctcaggtcctgcacactgaggtcctgcagcacctgaccgacctcatccgtaaccaccccagctggtcagtggcccacctggctgtggagctagggatccgcgagtgcttccatcacagccgtatcatcaggtgagcaagggaacaagaccatttggacaacgtgtgtgtacctgcttgtgtgggcagtgggggccgcaggcctcggttcccctccatagtttgacttaaaaaggagcagggcctggcatggtcgctcactaacgcagtcccagcactttgggaggctgaggagggaggatcacttgagactaggagttcaagaccagcctggcaaaatagcaagaccttgtctctacgaaaaaattaaaaaattagcatgtgtctatactcctagctacttgggatgctgaggcaggaggattgcttgagcccaggagttagagtttacagtgagctatgattgcaccactgcacttcagcctgggtgacagaatgagaccttgtctctaggaaaaaaaaaaaaaaaaaaaaaaaggtgctgcgttgctaccagattaaaatgtaagaaggacaatgtaatgtttccagagtccggagtgctcaccaggtgccaggtctgtgggagctgatttctacccaccatgaaattgaattttcccaacccccacaaggtatcgtcattttattttactttattttattttattttattttattttattttattttattttatgttacgttatgttattttattttgagacggagtcttattctgtcacccaggctggagtgcagtggcgcgatcttggctcactgcaccctctgcctcctgggttcaggtgattctcctgcctcagcctccggaatagctgggattacagtaatgtgccatcatgcccgggtaattttttttttttttttttttttttttgagacggagtctcgctctgtcgcccaggctggagtgcagtggcgcgatctcggctcactgcaagctccgcctcccgggttcacgccattctcctgcctcagcctcccgcgtagctgggactacaggcgcccgccaccacgcccggctaatttttttgtgttttttagtagagacggggtttcaccatgttggccaggttggtctcgaactcctaacctcaggtgatctgccctccttggcctcccaaagtgccgggattacaggcgtgagccaccatgcccggcccaggtatcatcattctagagagagctaacaggacttgtgcaggtcactcagccagagagggtgaaagaggggcttggatccttggtgtctgcccaggctgctcttctggaagctgaaggcctccttttgtgaatccattcagccagcagatggagcagctgttgcccctggtgagggcactgtccccacccttgcacagggcaccagttggccatcttgtgcagaggtagccacacctcctctgagtctctatcctagatagctcagttaagctcccaggcccagaactcaaaacctcactgctggccgggcgtggtggctcacacctgtaatcccagcactttgtgaggccgaggcgggtgtatcacttgaggtcaggagtttgagaccagcctggccaacgtggtgaaaccccgtctctactaaaaatacaaaaaattagcaaggcgtggtggcgcacgcctgtaatcccagctactcgggaggctgaggcaggagaattgcttgaacccagaggcggaggttgcagtgagccgagattgtgtcactgcattacagcctgggcaacaagagtgaaactccacctcaaaaaaacaaaacaaaacaaaaaccctcactgcactttagtttccaggcgtgcttttggacagcactgtctcatctcaccatcactctgtccatttcctggggcaggcacagcagcttgtgtcgataaggatattgacgcccagaaaggttaagtgaattgcctgaggctagtgagatatccgtgttctgtgaccctttcctgtgccaccaccctgcccacttcctgctggtgtggccctggggcccatctcttgtacgagtgagcaaactgaacagaaacctgatacaggtcacatcagatataattacattcaaatcagcccaactagctgagtggcgggaatgctcttgagctcaaataaaccagaaagtccgagtttccgagtgcacttccctgcatgtgcacttaggtccccctgccaccttgtaccacacctgctcacctctgctcaccctggccctctcctgcagctgtgccaattgcgcggagaacgaggagggctgcacacccctgcacctggcc

SEQ ID NO: 13325 - DNA, 524 bp, Homo sapiens
agagggagagcctaggaaacagtgtggatcacaaggaggtgattgagagctactctgcgtctggaagagtgaggaggagcctgtgtggcagaacaaaatggataaggtcgttccagccgtgcagaagtgtggaggtgtgagcctgcaggcaggtggctctggttggatcccagactcttccagctggagttggaggctgacgccctagtgaatttccatcagtattcttcccagctgctacccttctatgagagctcccctcaggtcctgcacactgaggtcctgcagcacctgaccgacctcatccgtaaccaccccagctggtcagtggcccacctggctgtggagctagggatccgcgagtgcttccatcacagccgtatcatcagagtccggagtgctcaccaggtgccaggtctgtgggagctgatttctacccaccatgaaattgaattttcccaacccccacaagctgtgccaattgcgcggagaacgaggagggctgcacacccctgcacctggcc

SEQ ID NO: 13326 - DNA, 10887 bp, Homo sapiens
ggatctcatgcacatctcacgggcccggaagccagcgttcatcctgggctccatgagggacgagaagcggacgtaagtggatcgagatcgggggcagagcggggaacgtgtgcgctttcctgcccctcacccaccccctgttgtgggctcagggctttactctctgcaccctcacagccggcgaagtggctctgctcctagtcttatagttctcagcagagacagaacatggagagcctgtgtcgctcgttcattaatgctgggcggtgcaggctctggagaccagcccagggtgccaggcttcttggacttggtggggctggcgcagtgttctggcctccctccctgatctccttatggctagaagagggggagatgcctgggtcccccctggggagatctcagcagctgcttcccactgctcctactggcttccttaaccacctcccactgcagaatagtggcgtgggctgccttccccagcacctgctgtatacctagtcccattgtaagaggcgggcctgggtgacaggatgcaaagagaagacgcccaggccttgcccttcaggcataatcccgggtgcttgaactcagtgccagctggcacggcaaggtaccaggacaaatgcgtttccagccactgtgctgtcgccacctcccttgattgctgcagttgattcatttattctttattagtctctcatgttcctaatagccttcccagggaggaatttgtaaccttgttttacagatgcagaacctgagcccctgagaggtgaagtgacttgctcaaggtcacacggagtgagtgtcagggtggcaactcacagccgggtcttccgaacccacgtcctttgtgctaccgcaggctctctctgggttctctgtggactctatacctagtgccagccctctgcagggaaagctctcttctcagaatcagaggcagctccactcccagggccaggcagtgatcgtgcagctctgtgggtcctctcacttcgcactcacttccatgctaccctgttgtgtgccctggaggttcccctgccccatcagcattccctcccctgtgccccctgcatgctcttgcacgcgggcacacgcacacacacacgcacacatgcacgcacacacacccacatgcacatgcctgcgggttgcccacatgcatgtgttgcccacatgcaaacacatggacacgcacacacatgcacacatgcaaacacacgtgcatgcacacacatacacatgcgcacacatacacatgcatgcatgcacatggacacccacacacatgcacacacatgtacacacatgcatgtacatacacacacctgtgcaggggctgaggtgaggcagctgcacctgaaggggggacccacatttcccaagggaggaaaagcagattccccagattctggagcctcagaaccctgcctggagcggggctgaggcaagagtcaggagacccctcggtagctccccacttgggccttccaagctacagagccctgcgccctctgggttgatctctgtcgccagccccgcatcttcgggagtttgctttggcctccagcaacagtgtagtctctcccctgccacctctaggcttgctgtggggctgggtacctggtccaggaaaagacccctagaggtgggacccgggcctcctccatttatcagccctcttgggcacctcctgcatccccttgacacacagcgctgcccagagcagaggcggcttctgccctggtggagcttccaggtcagcgcaggagagagtaaaagaaagattgcgaatggaatggaagcagcctccaccaggaagcaggtggagcagcaggcgggctgtgagggagggtctcgatggcatcagggcaggcttctctcagcttcatcaagctgagatgggaagatgagaagatcagaggaaggttccagactgaaccaaccacaaaggcattcccccagggcatggccaatgaggacaggcaggatgtggggagacgtgtcagggcgcgctggagagcatgtgactcaggaggcggcagacctgggtccaggtccagtccgcatccatatgacttggttcccgtcacctaacctctgagctacactccctccgtcactcaaaaatatgcacagagagtaggcgcagtggctcctgcctgtagtcccagctactcgggaggatcacttgagctcagaaggttgaggctgccgtgaactgtgattgcaccaccacacaccagcctgggtgacagagtgagaccctgtctctataaataaataaataaataaataaggctgggcacggtggctcgtgcctgtaatcccagcactttgggaggccgagacaggcggatcacatgaggtcgggagttcaagaccagcctggccaacatggagaaaccccgtctctattaaaaatacaaaattagctgggtgtggtggcgggcacctgtgatcccagctactcgggaggttgaggcaggagaatcgtttgaacccgggaggcagaggttgcggtgagccgagatcgcgttattgcactccagcctgggcaacaagagtgaaactccgtctctaaataaataagcacagggatgtcagggagggtctgcctcagaggcgtttgggacaatgacatgagctaatgctggtagcacccctcccatagcccctggcatgaacctctcccttcctccctgccccctcctcccctgcttcttccaccttgtgtggaggccctgatactctgtcactgcccattcctggcctggctgtagggtccccgcccctccttccccagccttatttaattccaacagactttatcaggcacctgctttggatcaggcctgatactgaccaaaatcaggtgtcccaagttggggagactggccgagatcctgctgggatggcgcctggtcagtgatgctatcccccgaccttcctttccctttctctgttgcactctccagcccctgaaatactagacatttgttcctttactgccctcacccccaccctcgctgtcctgcataggacagaagttcctcgggtccgtctgggtctgtctgccaggacacagctgcaggggacaagggctatgagggtggatgtaaagtactgggctgtggcaggaccctcctctctcccactgctgttcccactgcagccacgaccacctgctgtgcctggatggaggaggagtgaaaggcctcatcatcatccagctcctcatcgccatcgagaaggcctcgggtgtggccaccaaggacctgtttgactgggtggcgggcaccagcactggaggcatcctggccctggccattctgcacagtgagggcggcccctggggatggggccaggcggggctgagacctgtgtcctcaaggggccgagtttgtcttcagggctttgcaaaaagagagtggaggagtagaggagggctataagcactttgaggaggcaggggcggggctgcaggtgctgaggtcccaggctggaaggagaagggctgggcccatgggcttgggtttggggatcccccgccctctggccacagagggtagagctggctgtgtgaaattttggcataggaagcgtttcctatcgactgccttaacccctcctcccctcacccctgcaaagcaggcaccaggggccacacagcctgctgcacataaggaatcccattcccagggtgcacgcagcaggcagtctcaggaatgaggagccactgagcctcaggatgccagagccctcgcctgcacacttcattttactgggaaattttactgggaaattaagttcccaggtggggagggatgacgtgaagtcacatagctcatccatggggtcgctgggctggagcacagtcccctagactcccagcctggcacctcctaggccacagggcactgtgtagtctcctttcactgccgctttgcgaaggcgcctggcttgctggacagatagccgggtggtcagtgttgtgacggctcctctgtggagctgtctgagcttctaggtgctgacaggtggggaggggcactgccagatcagggtcctcagctccccccaaccccctggacattgtcctgggactcaacatgtctgactggtgcccctgcccctgtgctggtcagattccattttctccagagcgcccccacatctggatcctggtcatgcaaagtcttggaggtgcccggggaggactccccaccctagggtgggtatcagggcctgtgggccaggcctgtgttggatgctggggatgcagagctgagccaggcataccccagcctcaggagcagggggctcagccagtccaggaggtgctggggacagagtcccatgggcggaggaggagagtcatctgtcaagttgccgggacgttagtgtccacggcggtttattgactggtatttcatttccttttgatgattctcaccatagccctgcggggtgagcagatggggaaactgagaaccagagaggatcagccagtgaattgggcagtcaggactgggtctccagcagtgtgcccagctctctaccccagcctcagggtcccagcatcccctctctggtcttccacagggtccaagggcgggcacgaggtctgagcaggcagactgggcagagtcctagcttcttctccaaaagggccacgtccttcttcagggaccatttcttccccatccggggtcttgagactcccaggggccatggaggggatttgagaggtctcctggctgatcctccggtgtgggcagatggcctcctttcagctaccctctgcttgtacatccctggccctggggaactcactgcctcacgggggaagtggggcagcttctccttcctggaggtgcagccggccccttggccctgtctgttctgaaggctcaaaggacagggctattccttgttttctgtgacaaacaacgtgggtctagcttttataagcttttactcttgaggggctcttctttaaggaaaataatacaaaatcatgaatacaagatgaagtgcagagccgtggggcttcagtggtttttgagtctctccgttgcccaggctggagtgcagtggtgcatcttggctcactgcaacctccgctcccgggttcaagcgattctcctgcctctcagcctcccgagtagctgggactacaggcgcccgccaccacacctggcgaatttttgtatttttaatagacggggtttcaccatgttgggcaggctggtctcaaactcctgacctcaagtgatccacctgcctcagcctcccaaagtgctgggattacaggcgcgagccaccatgtccagccggaaggaggtttctctctgtctgtctgggaggttgcaaaggaagggcccagaatttgggtttgcttaggcctcggtaaacccgcttcctcctgccacctcctgcgttcaggcgctctgcaggctgttctacgggagccctgcgtgtggccgctgcatctccccgcctctgacccctttgttcctaggtaagtccatggcctacatgcgcggcatgtactttcgcatgaaggatgaggtgttccggggctccaggccctacgagtcggggcccctggaggagttcctgaagcgggagtttggggagcacaccaagatgacggacgtcaggaaacccaagtaagccctggcgcactggggccgtggccgcagctgtgcccactgtggctgttccctggggacagagggctccctgtcctgctgagggagggggaagagcgccccacgcttgaggggagcagagggaacccccttcccagggaggcagagggctggggtgtggctctcacttgggcatgcagacacctgctgagcgcaggaggggcgtggcctggtgggcctggctctgccctgcctggctctgccctgcccggctctgccctgccggctctgccctgcctggctctgccctgcccggccaggggtctggggcttgcctggagagagcctgggccacccttctctgagaccacctgggcagaggctgggtttttgctgcccaggcaaaaggaacccactggcctttcaaatgacacggctaaacattttctcacatttcagacagcactcgctcccaggatcggactactaggttataatcagagggcttcagtcttacctttaatttaaggcctacaagacttgaactaatttaagtcagactgaaggagaaagtcacatttccaggaaacatttgtttgggaagcccaaatcctaggactaagcaatgcatcccgttcggggctggatgaatggtgtgttccaagaggagtgttttgagcatttctgagtgattttttcatattttgaaagtgagtgtcccccagtcttaggggcccggcatcccctctgcggtcttccctagggtccaaggccagggaccttcaatcttttttcccactctgtggcttgtctttctgctctgtggtgtttctaggtttttgttttttgttttttgttttggttttggttttggtggcccatgttcttaatgaggtagataatatttataaatatttttcttcttgtagtttgtgattttttcctttctttctttcttttttttgaaacagggtcttgctgtggggcccatgctggagtatattgctgtgaacacggcttactgcagcctcgacctcctgggttcaagcagtcctcccatctcagccgcctgagtgcctgggactactagcatgtgccaacacatgtattttttgtagagatggggtttcaccatgttgtccaggctagtcttgaactcctgagctgaggcgatcctcccgccttggtttcccattacaggcatcagccaccatgcccagcctagtttgtgctttttatttctcgttcataaacccctttgctgcccccaagcagcacacgattctcctgtgtcgagctggaaagctctctagatctgccttttacattgaggtcttttatcaacctggaattgatttttgtatgagggtgaaatccaagatccaatttaatgttttccacgtgattggccaatttttcccagccccatctgtgaagtctgtccttccctccgcttcctcagcagtgggtcaagcatccctctgctcttggatctgctccaggctgtgttttgttccactggttggaaagctgtctctgtgcccggaccacagagcataaaaaactaccgctgtgtggtgagtcctggtgtctgggtggcagatcctccaccttggccttcttcaaaaacatcatggctattcttgggggcagtagagagaagtggatacaagcatagaccctgaagtttctacctcttctcaaaaataggaatatgccaggcatggtggctcaagcctgtaatcccagctctttgggaggctgaggcaggaggatcacttgaggccaggaggtcgagaccagcctgggcaacatagtgagaccctcatctctacaaaaaatttaaaactaacaattagctgggcatggtggcactatggctgtagtcccagctaattgagaggctgaggtgggaggatcacttgagccccggaggctgaggctacagtgggctgtgatcccatcactgcactccagcctgggcaatagagtgagaccctgtcttaagacaaaaaaaaaaaaacaaaaacaaacaaactcacaaactataaaaagaaaaaatatttataaattctactccattaagaacatgggtccatccaaataaataaataaaacaaaaacaccataaagggagtaaaaagacaagccacagagtgggagaaaagatttcgaatccatacatccatcaaaggactcattttcaaaatatgaaaagatcattcagaaatgctcaaaatagtaaccaccattttactttctcttcctatgagtttaactgctccaggtactgttaagtaaaatttttaggggataattgatttggaccaggattctgtaccaggcccaacagaagaaacgaatatggagtcattcatgccaagtgaacctagttagcttaggcgtatacccatgtaacaaatagctgagttctggttagctacaacagctaagctttaatcaatcatagatggccacctgattcaaacaaggcaaaccaattaagctccacacctcactttggttttcagcccatcaacactgcctgaccacgttgcaggccagagttctttgaacctattctggttttgtggcctgcctgactctcagttcatcaataaaagccaattaacatctttaaatttgttgcaattttatctttgaccgtaccttatgtaagtggaatcatacagtatttgtctttttgtgactggcttatttctttctttttttttttttttgagatggagtcttgctctatcacccaggctggagtgcagtggcgcgatctcggctcactgcaatttctgcttcccaggttcaagtgattctcctgcctcagcctccggagtagctgggattataggcgtgcaccaccatgcccggctaattttttgtattttagtagagacagggtttcaccatgttggccaggccagtctcaaactcctaacctcgtgatccacccacctcggcctcccaaagtgctgggattacaggggtgagccaccgtgcccggccatgactggcttatttcacttggcatccatgttgtagcgtgtgtcagaatttccttcctttttaaggctgaaaaactccattgtctgttggatacacgttttgcttctccattcatccattgatggatattttagttgtaaattgactgctgtcaatgtcggatgtgcaaatacctgtttgaggcctactctctcttactggtgccttctctagagagaattctgatgggttcagtttgatcatattttgtttaagatttttggccaggcgcagtggctcacgcttgtaatcccagcactttgggaggccgaggtgggcggatcatgaggtcaggagatcaagaccacagtgaaaccccatctctactaaaaatacaaaaaattagccgggcgtggtggcgggcgcctgtagtcccagctactcagagaggctgaggcaggagaatggcgtgaacccgggaggcagatcttgcagtgagccgagattgcgccactgtactacagcctgggcaacagagtgagactccgtctcaaaaaaaagatttttgtgtccacgctcgtgggcgaacttgacccgttttttcctattttgggttttgaggaaatatttcctctttttatttttcttggaagagttagtataatagtttattttgaatttatggtagaacttgatagtaaattcttctaggcctggagtttgcttggtgggaggatttttgatgatggaattaatttctatagtggttgtgagactgaccactcggggtttctaaatacctttttgagttagttttggttaagtgaggtttttctaggaatgtgtccatttcatctaaatctttaagcttattggcttagagttgttcaaaatattctgtttttttttttttttttttttttttgagacggagtttcactcttatcgcccaggctggagtgcaatgacgtgatctcggctcactgcaacctctgcctcctgggttcaagcaattctcttgcttcagcctcccaagtagctgggattacaggcatgcgcaaccacacctaatttttgtattattagtagagacggggtttccccatgttggccaggctggtctcgaactcctgacctcaggtgatccacctgcctcggcctcccaaagtgctgggattacagacatgagccaccatgcccagccgattctcctttttctaacgtctgcagtgtgtgttggtgcggcccccttttctttcctgattttgataacagataacagccatgttttatcagtcttgcaacaggtttttccattggattagcctttcaaaaaaaccaacttttgctgaattgtgcccccaaggttggaccaatctgacactcctccagcactgccggagagagcctgttttgcggggatggtgcggggagaagcccacctatcccgaacagaggttggagtgggcactctgctacccaaggccctggggtgtgaattgtggggaaagggaaaggtggatgggcgggtggctcagccgtcctcctgcctcatttctctccagggtgatgctgacagggacactgtctgaccggcagccggctgaactccacctcttccggaactacgatgctccagaaactgtccgggagcctcgtttcaaccagaacgttaacctcaggcctccagctcagccctcaggtttaaaccatgtttgatgcatccatgggaagcgactggcccgagaggctgtggggtggtgggtgggagtcgtgcacttgccatcaggcaccctcaccgtgccaccagcccacccgctgcactggtctttattggctgaggacagggattgcgggggagctgtcaggcccctggcaggttagaaaagtccctggaaagtcctcagctgtacctgccttccaccaggacgaactagccagagagtgtggcttcgtgggtcctgcttctgaagagttcccagcctcccctcttcccgcacccccagcccccaacacgcacaccctgagatctggagtgcatgggttttatgccagtcccttgtgccactgggccgccctccttccccgcccctagaccagctggtgtggcgggcggcccgaagcagcggggcagctcctacttacttccgacccaatgggcgcttcctggacggtgggctgctggccaacaaccccacgctggatgccatgaccgagatcc

SEQ ID NO: 13327 - DNA, 741 bp, Homo sapiens
ggatctcatgcacatctcacgggcccggaagccagcgttcatcctgggctccatgagggacgagaagcggacccacgaccacctgctgtgcctggatggaggaggagtgaaaggcctcatcatcatccagctcctcatcgccatcgagaaggcctcgggtgtggccaccaaggacctgtttgactgggtggcgggcaccagcactggaggcatcctggccctggccattctgcacagtaagtccatggcctacatgcgcggcatgtactttcgcatgaaggatgaggtgttccggggctccaggccctacgagtcggggcccctggaggagttcctgaagcgggagtttggggagcacaccaagatgacggacgtcaggaaacccaagttggaccaatctgacactcctccagcactgccggagagagcctgttttgcggggatggtgcggggagaagcccacctatcccgaacagagggtgatgctgacagggacactgtctgaccggcagccggctgaactccacctcttccggaactacgatgctccagaaactgtccgggagcctcgtttcaaccagaacgttaacctcaggcctccagctcagccctcagaccagctggtgtggcgggcggcccgaagcagcggggcagctcctacttacttccgacccaatgggcgcttcctggacggtgggctgctggccaacaaccccacgctggatgccatgaccgagatcc

SEQ ID NO: 13328 - DNA, 364 bp, Homo sapiens
atgagttgcttgaggtcacaccgatgaggttgaagctggaatctgacaccagagcctgtgtgattgtcctgatgtgtaagacagagggggaagacggtggggcctccccacctgccccgcagaagatgcagttctttggccgcctggtcaataccttcagtggcgtcaccaacttgttctctaacccattccgggtgaaggaggtggctgtggccgactacacctcgagtgaccgagttcgggaggaagggcagctgattctgttccagaacactcccaaccgcacctgggactgcgtcctggtcaaccccaggaactcacagagtggattccgactcttccagctggagttggaggctgacgc

SEQ ID NO: 13329 - DNA, 984 bp, Homo sapiens
atggaggcctgtcgactcagccgctaccctttcccccactcatcatccctgaaagggcactgctgagacctctgcccctctgattgcacagctgggacagtccctgcagtcccaggaaggggttttgcccgagccgctctgctgctgtgtggctcagcctgactcgaaagagcctggggctccccaggctggggctccgagagtgcagggcagggccgggcggggtgcgggccgggcggggtgtgggcccggcactcaccaaggctgcttctcaccagtgcacggatccagacgggcgggctgtggaccgggcacgggcctggtgcgagatggtcggcatccagtacttcaggtgagggctcagccgccccagcccttggccccgtgccctggcgtggtcggactcaccgaccttcccctcccagccctagtgtggactttcccttccccaagggtctgctctgttccccaagcccaccctggtcctagctggcgtcccctgcccagcctgagcatcctagggtgaccccctcctccctggcccgaacagattgaacccccagctggggacggacatcatgctggatgaggtcagtgacacagtgctggtcaacgccctctgggagaccgaggtctacatctatgagcaccgcgaggagttccagaagctcatccagctgctgctctcaccctgagggtccccagcctctcaccggccccagctgacctcgtccattcagcccctgccaggccaagcccagccactgccctcccgggcagatctgggcccaggcacctctgagtccatagaccaggcctgggagaatgccaagctgcctgcccgaggctggtcctgaaggcctgtctcccactaaccccgccttccagcactttctgtcattccaggctgggaaagtctagagccccctttggcccctttccctgactgtcaaggacaactgactcccccatcagctcaaacat

SEQ ID NO: 13330 - DNA, 786 bp, Homo sapiens
atggaggcctgtcgactcagccgctaccctttcccccactcatcatccctgaaagggcactgctgagacctctgcccctctgattgcacagctgggacagtccctgcagtcccaggaaggggttttgcccgagccgctctgctgctgtgtggctcagcctgactcgaaagagcctggggctccccaggctggggctccgagagtgcagggcagggccgggcggggtgcgggccgggcggggtgtgggcccggcactcaccaaggctgcttctcaccagtgcacggatccagacgggcgggctgtggaccgggcacgggcctggtgcgagatggtcggcatccagtacttcagattgaacccccagctggggacggacatcatgctggatgaggtcagtgacacagtgctggtcaacgccctctgggagaccgaggtctacatctatgagcaccgcgaggagttccagaagctcatccagctgctgctctcaccctgagggtccccagcctctcaccggccccagctgacctcgtccattcagcccctgccaggccaagcccagccactgccctcccgggcagatctgggcccaggcacctctgagtccatagaccaggcctgggagaatgccaagctgcctgcccgaggctggtcctgaaggcctgtctcccactaaccccgccttccagcactttctgtcattccaggctgggaaagtctagagccccctttggcccctttccctgactgtcaaggacaactgactcccccatcagctcaaacat

SEQ ID NO: 13331 - DNA, 569 bp, Homo sapiens
aggaggaagtagaagtgctgagtaagccgagacagagggggaagacggtggggcctccccacctgccccgcagaagatgcagttctttggccgcctggtcaataccttcagtggcgtcaccaacttgttctctaacccattccgggtgaaggaggtggctgtggccgactacacctcgagtgaccgagttcgggaggaagggcagctgattctgttccagaacactcccaaccgcacctgggactgcgtcctggtcaaccccaggaactcacagagtggattccgactcttccagctggagttggaggctgacgccctagtgaatttccatcagtattcttcccagctgctacccttctatgagagctcccctcagctccttggaaggaacgcagtggctggcctgaaccaggtttgatctagggacctctggggtagcagggcttggggacccacctgaccacagcatgccctgctctgtgcctcacagaactacaggatctcatgcacatctcacgggcccggaagccagcgttcatcctgggctccatgagggacgagaagcggac

SEQ ID NO: 13332 - DNA, 27944 bp, Homo sapiens
aggaaacagtgtggatcacaaggaggtgattgagagctactctgcgtctggaagagtgaggaggagcctgtgtggcagaacaaaatggataaggtcgttccagccgtgcagaagtgtggaggtgtgagcctgcaggcaggtggctctggttggatcccaggtgcatgcagggctttggtgagagtgaggctgaaggaagcagctggggactcattctgactaaagaggcatggcaggaggggtctctgaaagtgtcaggctgggggccaggggctgccaccaacagaagagcaaggcaggtatcagggccccatccaatcaggtgagaattcagagcctggctccacaaggaacctgaggcagaggcacccacagcaggtgcttgggctaaatgcagctcagtggccagtgcaggcaccagttttaatacagtggggccattccagattctgagtgcagatggggctgagcagaccgccttccagctggactcgatcaggactgaccctggacggggcaggcttgcacttgtagcttcagagctccactgcaggcacagctgaccagggcagcgggtccactccttggagagctggacagccccacttttgaggtacacggccctggggataccactaatctccacgtaccaataatcaccaagttctgtcagttgtaaaatcccttgacaggattccagatttgtctcagccagcttaagccccagtgtgggcagacctccatcccaggaggatttagtcctttgtcagcagcttcttagctacacgtaagctattctgtggtactttatagtttacaggattttttgttttcttttttttttttttttgagacagagtctcgctctgtcacccaggctggagtacagtgacgcgatctcggcttactgcaagctccgcctcccaggttcacgccattctcctgcctcagcctcccaagtagctgggactacaggcacccgccaccacgcctggctaatattttgtatttttagtagagatggggtttcaccatgttagccaggatggtctcaatctcctgacctcgtgatccgcctgcctcggcctcccaaagtgctgggattacaattttacaggatgtttttaagtatgttgggttagcacattctctgccaatccgtggaggtgggcaaggaaggcagtattccattttatgcatgagaaaatagccttgggatgataagtgattcatcccacttatacacaggaagcagtgaagaaacagaatcagtgtcttctggttcccaattcatttctctgtgctgctgtgttgtttccatgtatgtatgtatgtatttatttttttgagacgttaagtcttgctctgttgcccaggctggagtgcagtggcatgatcttggcttacagcaacctctgcctcctgggttcaagctattcttctgcctcagcctcccgagtagctgagactacaggtgcgtgccaccatacctggctaatttttgtgttttttagtagagacagggtttcactgtgttagccaggatggtcttgaactcctgacctcgtgatctgcctgccttggcctcccaaagtgctgggattacaggcatgagtcaccatgcccggctttgtttgtcttatttctaaattttattgatttatttattttcacagtcatagctctggagtcttttttatcttctcccctctaacctgctcccacccgaacctttccatttcagcagatagcatcattgcaacgggctgtgccagatccagccatcacatccacctttccagccaaagggagggtggaagggcaggatgcagaaggtcaatctccccctcctcagggacatttcatggaagttgcacgcattggccagaacccggtcacatggccacagctaactgcaaaggatgctgggaagtgttgcctgtgttgcagacagccacgtgccagtcgaaaatcagaggttctttctccctccgtcttgctgctggctcgcttctccagaccacagtcattgtgcacgtgtctcctgctgctccggctgtggcctgcactcctctcatcctcttccaagctgctgtcacagcgctgtttccagagggcaaatctgattggtcactcccctgctttactccccaagggcttcctgttttcttttatttttatttttattttcattttttgagatggagtctcgctctgtcgctcaggctggagtgcagtggcacaatgtcagctcactgcaagatctgcctcctgggttcatgccattctcctgcctcagcctcccaagtagctgggactacaggcgcccgccaccacgcccagttaattttttttgtatttttagtagagacggggtttcaccatctactcttagccaggatggtctcgatctcctgaccttgtgatctgcccgcctcagcctcccaaagtgctgggattacaggagtgagccaccgcgcccggccagcttcctgttttcttaacacatcaggtgcttaatgacttaaaagggcccagtgtgatcaagtttctgcctctgtgttctcagctcatgccgccttgtgctcctggcctttgcccaggctcttgctgtggcctggaatactcccctttctttgcctgccttccttcctcttgccctcccctgacctgcaggctggattaggagtttctgctgggcatcccatggcacccgtccctgcactggggatcctgctttcctggtaggccacagaccttgtgaggggagggactgtgtctgttgggttcatgacagtgtgcccagcccccagcaggtgcctggcgtagatcaggtttgtggaacaaatgaatgtgatatattaatttagctttagagtattcattgagggctgctgtgtgccaggccctctgtgccacctgggtggagggtggaggactgttgcattgagggcagttgaaggagtgagctgggaagtgggaggtggaggatggggactgggatgcagggtttgaggttatcaggggtcccagaagcagtaatgccaaggcctaggctgtgacctggagtgagggctgcgatggggtggggtggggtcgaggctgtggaggagggtcatcagggcactgctggagccctggggttctccagggccgggggtggtcattgcagtgttctcccagctcctctcaacaccctgcggtctgtggagagcaggcctggtgcactggacttgcctctggccagggctgagtttctgccttctaaacgatcttcctcctgtgttgccctagaggcctctggactgtcctgagtacttgacgcgtgttagagtgagcatgggctgctagccttccgctccaggtggaggagtttctgttgttcttttgctgctgttgctgcagtgagctgccaggctgagcttctggatggacctgggggatggaattaggagcttctgaattcttgggttgtataacctaaggccggagagtcccacagcactgctgctgggcggagagactggaccctgctgatacagacagcgacagcagcaggagcatctgcagtttcccagcaggtcctgcatgcctgggcttggcactagtctaagtagtaactcatgttatcctcacgacagtcccacgaggtggggtcattactgacctcctattacagatgaggaaacagaggcttgcagaatttgagatcacacagctggtcagcgtagcgattattcagaccctgtcacctggctccagaacccactcgtttacctttcttacatcagggctgctttgtagtgtggcgagctgagtggagctccacccgcctgggctgatcctggcccttcctgcctgacctatggtgcgggggccctggctctccccgtgtgagcccccaggggtcacttgtaatatgcctgtgtacactatgatagcatagatacttctgttcctggtacagattaatcatttacggctggcattgacttgtaacagatgacatttgatgaaatcaaccagcctctcactggtatctcagcagaaacagggctgtacctcccaggcatcctgggaaggatgatagaagtgtgtgatctgtgcttccctaccgggagctgacttttgaggctctctggactgggactttgccataaaactgcttatcagaaacctcagataagtggagtgccctgtgtcctggccacgtactctggggccagctcctccatccattcagtcctcccacatcccatcttcaccaagcagagtggaaagcggcaggtctctgcgagaaaaggaggctctgtacccagccttcagtgagataactttagagtggggccttgtattccctacacaggccttgtccccgacacggcctctttgcccttgcttctccttctgctaagaatgctccttcccaactccttggctggacacacggctcctgctctgtgggcctgtcctgttcccactcagagcctcagcaccccccatgtggccaagacacagcccctcttgccttaggttgccgtgggtctgtttccacatctgtttcccctccagactgcagggctcctgagggacagggcctggggccaagtctcctctgcgttcctgatgcctggtggtgtgccacgctctccgtgggtgcacggtaaatatctgccgagtggctagatgtatccatggttgctgaaggccaagtgtgttgaccagagggcgtgggaaaggctccactggggtggctggggtagagatagaccttaaggggtccagaagactccaccagctggagggaaaggccctacagagacaaggtactaggaaaggcccagaggacagaggaggggccctgtggggagcctgtgggcaggaagggcctgtgctgggctttgaaactggggactcaggtactgctctagcgtgagggtccttggcattttttttggtccaggaccccctgaggtccctggggaatgagaacaggctcacacagccactttcaagaggtttgcaggtcccctgaggcttagccacagacccctcccaccccagcagagacacagcagaggcttctgagtggaggccaggtggcttcagcctggggttctagaagggagggaagagacacacccccgtgtgtcctccagagcctcagccttctccctgaatctcccctttgcctcctcactgtaacccacacctggctctccttgaaggacccgcttgccccgcagcctcctgagagttttctctcccagtccctctcccactgggcctggaggtggggtagggtcctccttgcccccagccttgaatcttctgtcaccctacaataccacttgctgtcaccccggtgataggtatctacgagcctggggtgctcccccacatcctcaaagatgtgagcccctgactcagcgttgcctctggttcctgaccctccacattcacatgaccacgcgctggcctttatcatcgccagtgacagcagctctcccgtaaatacaagtttcaagcaccccactttccagtctctgccttctgtctttccagttcattccctctagtcctccacccacacagtgcttttccccattgacagggaattgctcctggccgcttttcccagccccatcccgttcatgtgccttgctttgtacccagcatggactccatggcctgtcattgtcactccttcacctatacttcctgcctccttgcttctctctctcttcgtcatcctggcatcaccaccccagaactgcttggtttcagttctccaccatggctaggggaacatacctttttgctgactgctctcactttctttttttttttttttcttttttttttttttgacacagagtctcgctctgttgcccaggctggagtgcagtggcacactctcagctcactgcaacctccacctccggggttcaagcagttctctctgcctcagcctcctgagtagctggtattataggcacccgccaccacacccggctaatttttgtattttttttagtacagacagggttttgccatggtggccaggctggtcttgaactcctgacctcaggtgatatgcctgccttggcctcccaaagtgctgggattacaggcatgaaccaccctgcccggccctattgctctcactttgaaatcacgacatgagccacagtgagcctatgatgtggtttgacgtctttctgcatttctctgttcacccctctcccagaaggcatgcctccttccctcccctcagcctgcagccccttcccctccacgcttactctcagctgatagccctgctgctgtctcgctgagaaaatagaaatagccagaggagaattccctctaccccatgcacacacctctgtccccgcctactccacattccctgttgtcagcaccgatgtgtttagctgagggtggtccccccattcaaggccatcatctcctgtcatctacttcttgacaccatttgaacaattatctcccctctttcctacataacactttccccttttctactatatattttttgctatggattgaaagtatccccccgaaatcatatgttgaagccccaatccctcgtgtgatggtattaggaggtagagcactatgggggtgattaggtcatgaggatggagccctcatgaatgggattagtgcccttagacgaagaggcaagaaagagatgatctgtctctgccatgtgagggcacaacgagaagatagccatctgcaaaccaggaagtgaaccctcatcaggaactctatcagccagcaccttgatcatagacttcctagcctctagaactgtgagaaataaaggttgtttaagcctcccagtctgtagttttctgttataatgtcctgacctaagttattttccatcgctatacaatgggttatttttttctttaaaaaaaaattatttcttgactctactttttcctccagagactgcttatattccactgtcttcattcttctcctcctgttttctctctttaaacttttcaaaaatagcaaaatataacacatatagagaaaatgatatacagctcagtgatttatcacaaacacctgtgtaaccaccactcgaatctagagataggacattacagcaccccagaagccctccttttgtcccctcttcccaaagaagggtaaccaataacttgccttttatgataaaggctttttttttttgagatggagtctcactgtgttgcccaggttggagtgcggtggcgcaatctctgcttactgcaagctctgcctcctgggttcacgccattctcctgcctcagcctcctgagtagctgggactacaggtgcccgccaccacgcccggctaattttttgtattttagtagagacgaggtttcaccgtgttagccaggatggtcttgatctcctgacctcgtgatccacctgcctcagcctcccaaagtgctgggattacaggcgtgagccaccgcccccggccaagataaaggcttttctatctggcttctttgttagcattttgttggcgagattgatacgttttgtgtgcagctgtctgtcattttcattgcaatagaattccattgtctactatatcacagttactcattctactactgatgaaaatttgggttatttctagtttttttggtgcatacatgcatacatttctggtagacatacctagaagtgaactggctgcattatgggccataacttgtcttcaacgttagtaaataataccgcccgtctgttttccaagcagcagtaaatggcactttctgttacttcatatcttctgttacttggtactgtcaggttttaaaattttagtcattctgtcgggtgtctagtagtatgttattgtggttttattttgcatttgcctgattgcaaatgaagttgagcactttttgatacagtgattaaccatttggatatcctcttcagtgaagtatcagctcaattctcttgactatttaaaaaataaagttgtttatctttttcttacagagttttaggaggagttttttggtacatgtgcagtccaaatacacaccttttgtcagtgatacgtgttcagctgcacacacggtgttttgcctttttattcttttaatggtatctattgataaacatgagttcttagttttaatgaagtcaaatttgttcatcttctttacggtgtactttttgtgtcttgtttaaggaagtccttctctatcttaaagctttgagaagcattccttctttctcctattttctaaaaattgttgaagatctccttccttccttccttccttccttccttccttcctttcatctatctctctctcacccaggccaaacttcagtggcatgatcatggctcactgcagcctcaacttcccaggctcaagtgatcctcctgcctcagcctcctgagtagccaggactacaggcacgcaccaccatacctggctaattttaaaaattttttgtagagacacggtctcatcaagttacccaggctggtcttgaactcctgggctcaaacaatcctcccacctcagcctcccaaagtgctgggattacaggcatgagtcacatgtctagcctgtattctttctttcttaaatgtttggaagaattcatgggtaaaaccatgtgaccctggagtttatttgtgggaagcttttaaaacatggattcgatttctttaacaaatataggactatgagattttcatctcatgtcggtttgggtatgttgtgttttcaaggaatttttctattttatcgaagttgtcaaatttgtctgcaggtccccttatttcctttttaatgtatggaggatctgaagggatggtactttgtgttgtctctatttcttgtttggttttgctagtgatttgccaatttaaaaaatctttccaaagaaccaacttttggctttgtttattttttgaaaacctgagtagctgggattacaggcgcccaccaccacacccggctaatttttttatttttagtagaggtggggtttcaccatattggccaggctggtctcgaactcctgacctcagatgatccacccgcctcggcctcccaaagtgctgggattacaagtgtgagccagtgtgcctggcaagccgctttttaaatggcaccaatcccattcatgagggcagagccctgatgatcgaattacctcctaatggccccatttcttaatactatcacactgagaattaagttttaacataagaattttaggaagacacaaacattcagaccatggaacatatataaaacagttgtcctaccaactaacagaatacacattcttttcaagaacacctatataaaaattatagacactgacctatgctggccataaagcaaatatgaacaaatttcagatacctgaagagatttagactatgttctccaactacagtgcaattaagctagaaatcaatagcaaaaatgtaactataaatgagcccgtatgtttgaattttaagcaagatatatgtaaattatctatggttcaaaaaagaagtcacagtgaaatttagaaaatatcttgacgtggcgggttgcagtggctcacgcctgtaatcccagcactgtgggaggccaaggcgggtggatcacctgaggtaaggagtttgagaccagcctggccaacatggtgaaaccctgtctctactaaaaatacaaaacattagccaggcgtggtggtgggcacctgtggtcacagctacttgggaggctgaagcgggagaatcacttgaacccgggaggcagaggttgcagtgagccgagattgcaccactgcactccagcctgggcaacatgagtgaaacttcatctcaaaaaaaaaaaaaaaagaaaagaaaaagaaaatatcttgacccaatgatgatgcaaatactacgtatcaaacttgtaggatgaacttccacttctggccatgacagaggagcctgtatcagactagccttcctatttatatatttatttttgagatggggtgtcgctctgttgcccaggctggagtgcggtggtgcaatctcagctcactgcaacctccacctcctgagttcaagtaattctcctgtcccagccttccaagtagctggaattacaggcgcccaccaccacacccagctagttttttatatttttagtagagacggggtttcaccatgttggccaggctggtctcgacacctgacctcaggtgatccacctgcccctgcctcccaaagtgccgggattacaggtgtgagccactgcgcctggccgtgagtgacctttttaatgtgttgttgaatttgatttgctggtattttgttgagaagttttgcatcaatatccatcagggatactggcctgtagttttctttttttatatgtctttgtctggttttggtgtcagggcaatactggcctcatagaatgagtttggaagttttctctcctctgtttttcataatagtttgagtagggttggtattagtttttgtttaaatgtttggtaaaattaagcagtgaagccactgggtcccaggcttttctttgctgggagacttttcattacagctttgatctcattacttgttattggtctatttaggttttggatttcttcacggttccatcttggtaggttgtgtatgcctaggaatttatccatttcttctagggttttcaatttattggcatataattgttcacagtaacctctaataatcctttgagtttctgtgatattggttgtaatatctcttttgtcatttctgatttttttgtttgggttttctctctttttttgttagtctagttaaagatttattgattttgtttatcttttcaaaaaactttattttgttgatcttttgtattgttttgtttcaatttcatttatttctgctatgatctttattatttcttttcttctactaattttgggtttggtttgctcttttctagttctttaagagacatcattagattattttgaagtttttctacttacttgatgtaggtgcttataggtacaactttcctcttagtacttctttccctgtatctcacaggttttgatatgttgtgtttccattatcatttgtttcaggatgtttttaaatttccttcttaatttcttcattgaccattcaagagcatattatttcatttccatgtgttcgtatggtgtgcaaaataccttgtttttgatttgtagttttatttcattgtgatcacagaagatacttgatatgatttcaaatttaaaaagtaatttggctgggagaagtggctcatgcttgtaatcccagcgctttgggaggccgaggcaggcagatcacgaggtcaggagatcgagaccatcctggctaacacagtgaaaccccgtctctactaaaaatacaaaaaattagccaggcatggtggcaggtgcctgtagtcccagctactcaggaggctgaggcaggagaatggtgtgaacccgggaggcagagctggtagtgagccgagatcgcgccgctgcactccagcctgggtgacagagcaagactctgtctcaaaaaaaaaataataacaataataataatttaagacttgttttgtggcctaccatatggtctatccttgagaatgatccatatgctgaggagaagaatgtgtattctgcagccgttggatgaaatgttctgtaaatatctaataggttcatctgatctatactgcagactaaggctggtgtttctttgttgattttctgtctggatgaactgtctaatgctgaaagtggagtattgaagtctccagctattattgtattgaggtctatctctctctttagctctaagaatacttcctttatatatctgggtgttccagtgttgagtgcatatgtatttaaaattgttacattatcttgctgaattgacccttttatataatgaccttctttgtctctttttatagtttttgtcttgaagtctgttttgcctcatagaatagcatagctattcctgctcttatttggtttccatttgcatggaatatctttctccatccctttagtttcagtctatgtgtgtctttacaggtaaagtgtgtttcatgtaggcaacagatcactgggtcttgtttttctatccgttctgccactctgtgtcttttgattggagagtttagtccatttatgttcaatgttattactgacaagtaaggacttactcctgccactttattaattattttcttgttgctttgtgatcttctttctttccttcctgttctccttttagtgaaggtgattttctctggtggtatgttttaatttcttgctttttatttttttgtgtgtatctgctgtatgttttttgatttgaggttaacatgaggcttgcaaataatatcttataacctaatattttaaactgatgacaccttaacactgattgcataaacagacaaacaagcaaagagaaaactaataaaaactctacattttaactttgtccccccactttttaacttattgtactgtttatgtctgaaaagttgtagttattatttttgattggttcctcttttagtctttctactcaagatatgagtggtctacatatgacagtgttataatattctatatgtttctgtgtacttgctattaccattaagttctgtactttcaagtgatttcttattgctcattaatgtccttttctttcagattgaaaaactccctttagcatttagcagtatgtgaactgcatttttcaagtccagaatttctgcttgattcttttttttttttttgagatggagtcttgctctgtcgcccaggctggagtgcagtggcgcgatttccgctcactgcaagctctgcctcccgggttcacaccattcttctgcctcagcctcccgagtagctgggattacaggcgcccgccaccacgcctggctaattttttgtatttttagtagagatgggatttcaccatgttagccaggatagtctcgatctcctgaccttgtgatccgcctgccttggccttccgaagtgctgggattacaggcgtgagccactgtgcccagcctgcttgattcttttaaattatttcaatctctttgctaagtttatctgttaggattctgaattccttctctgtgttagcttgaatttcactgagttccctcaaaacagctattttgaattctctgtctgaaaggtcacatatctctgtctctccagaattggccactggtaccttaattagttcatttggtgaggtcatgttttcctgtatggtcttgatgcttgtgatgttcgtcagtgtctgggcattgaagttaggtatttattgtagtctttgcagtctgggcttgtttgtatctgttcttcttaggaagactttccaggtaataaaagggacttgggtattgtgatctaagtttttggtcactgcagccatatctgcattagggggcaccccaagcctactaatactatggctcttgcagactcgtaaaggtaccacttgggtggtcttggataagatctggaagaattctctggattaccaggcagaggctcttgttctcttcccttactttctcccctaaaagtggagtctctctctctgtgctgggccgcctggagctaggagaggggtgacacaggcacctctgtggccactatcactaggactatgctggctcagacctgaagccagcacagcactgggtctcacccaaggcctacagtctccactgcctggctactgcctacgtttgcttaaggcactagggctctacagtcagcaggtggtgaagccagtgagattatgtccttcccttcaaggcagcaagttccccctacccccatcctgggaaggtccttagatgccatctgggaggcagggcctgcagtcagaaaccttagtaatctccccagtgctctattctattacagcctggctgatacccaagccataaggcaaagtccttcctgctcttccctcccctttccacaagcagagaagtctctctccatggccaccactgccccagccctgtggcagtgctgccaggccactgccaacgttcattcagggcctaagggctcttgaagcaactgaacactgccaggcctgggactctccctttagggtagtgggctcccctctgacccagggcaggtccagaactgccaccccacagccaacacttagaatctgggaccccaagagccctcttggtgctctgccacactgtagctgagctggtacctaggctgatttttgctttttatgaaggtacttttttgtgtgtatagttcaatttggttttcctccagggaggacaattggtggaggtttctatttgggcatcttttttttttttttttgagacggagttttgctctttcacccaggctggagtgcagtggcgcgatctcggctcactgcaacctctgcctcctgggttcaagcgattctccagcctcagcctccccagtagctgggattacaggtgcctgccaccatgcttggctactttttttttcaattaaaaagtaaactttaatgtcgaaaatgcaaacttggggaaggcagaaagatcacacacaaggctgtcgcttcacacttggaaggttgcacggcggccaggagaggcactcctcacttcccagacagggcgggggccgggcagaggcgctcctcacttgccagacggggcggcggccacatgcctggctaatttttgtatttttagtagggacggggattctccgtgttggccaggctggtctcaaactcctgacttcaggtgatccacgcacctcggcctcccaaagtgctgggattacaggcatgagccaccgcgcccagccctatttggccatcttgctttgcctccaccttcatttgataacagaacacccccatgtaaccaccaccacaatcaagatataagacatttctgttattctccaaatttccttcaccctcctttatagtccatggcacccaccccatccctgggcaacacctatgtgcttcctttttttttttccccgcaggaggacgtcttcctatacctatgtgcattccatcactgctgcttttaatcatatagcgtgtagtcttatgagtctgactttttcacttagcataatgcttttgcaatttgtgattgagcgttttcatatgattctgttttttctgtctcttagcttggaagttatacactttttagtagtaactgttgggagatcgttctccaagagtctctctcatatttccatacatcctgctagcagagacattgactacctgtttttgtctgtttagtgttgctataaaggaatacctaagtctgagtattatacatagaaaagaggttttatttgtctcatggctcctcaggccatacaagaaacatggtgccagcatcttaccagtgtcacatggcaagaaaggaagtgaggaagagaaaataagttgttaactggttgttaaaaagtgccaggcacgggccaggcacagtggctcgtgcctgtaatcccagcactttgggtggccaaggcgagtggatcacctgaggtcgggagttttgagaccagcctgaccaacatggagaaaccctgtctctactaaaaaaaatacaaaaaaattagctgggcatggtggtgcatgcctgtaatcctagctactcgggaggctgaggcaggagaatttcttgaatccaggaggtggaggttgcagtgagccaagatcacctgggcgacaagagcgaaactctgtctcaaagaaaaaaaaagtgccaggctctttttaacaaccagttcttacaggaactaatagagtgaaaactcactcacccccaccccacagggagggcattcattcatgagggatccacccctatgacccaaacacctcccattagccccccacctccaacattggaatcaaaatttaacatgaggtttggggggcagaaatccaaattatagcactacctttgttccaggctaccttcaaaggatgtttatacagcaaacagccttggaaaatagagttagggtctccttgtagagcacagggtaagtttgcttacttttcagcataatcaagattgtgtcttcttctggagcaaaactttgacaacaacaagcggggcaaagtctgaaaccttttgcacatcttgacagaaccttagagattacgagatttatctctgccttactcaaggtccattagtatcttccagaacaataagttggtcttagaatcctttagctatgtattcccttccaggcttcgatgctgtgtgctgttgttttatttagtttttattttaaacccaacaagacgctataccatcaatacttatttagatccccccacatatttaacttgccatggtgcttcattctttcatgcctctttaagcatccatctaggatcgtgttcattccacatgaagagaaagcttttggcccagcacgatggctcacacctgtaatcccagcactttgggaagcctaggcgggaggatcgcttgagcccaggatttccagaccagcctgggctacgtggcaaaaccctgtctctactgaaaatacaaaaaattagccaggtgtggtggttcacgtccctgctactcgggaggctgaggtgggaggattacttaaacctgggaggttgaggctgcagtgagcgttgattgcaccactgcactccagcgtgggtgacaggagtgagaccatgtctccaaaaaaaaaaaagaaggaaagaaaaagcttttgtatttcctttcgtgtaggtctgctaatgacaaagtctctgggttttttgtttgactagagaaatgttttaattttaaccttattcttgaaggttttgtttttgttttcattttgttttgtgtgctaagtacagaattctcattggcatttatttatttagagacagagtcttgctctgtggcccaggctagagtacagtggcacgatctccgcctcccaggttcaagcgattctcctccctcaacctcctgagtagctggggctacaggcatgcaccactacacctgactaatttttgtatttttagtagagacggggtttcaccgtgttgcccaggctgatctcaaactcctgagctcaagtgatttgcctgccttggcctcccaaagtgctgggattataggcatgagccgccgtgcctggccagcatttattttcttttcagctctttaaggaagtcattccattatctctgggttccattgttgagaagccagctgtcattctaatggttgccctttgaagataacttttttccctctgctattttaaatatttcctccttgtattttattttcaacaggtgtaatgtggcacatatatcagcaattgttatgttacatacaatacatattgtgcaacatatgtatcattatcagttattgctgtgtaacaaactactccagaacacagtggcttataaaaggaatcatttatttagtccttaaatctgcaatttgagcagagctcagtgggaaagcctcagctttactttatatggcaccatataaggtaactcgcaactggcaagttggtgctggctgttggctggtagttcattcagggctcagggcccaggaccaagagtcgtcaccatggcttgcttcagcctccttgaggcatgatggctgggtcccaagagaagagaaatagaaacttccagtctcttaaggcattggtctggaagctgggacggcatcacttttgccatattctgttggtaacgcagttacatcgccagattaaagggtaaagagatacaaattcccactgctcagtgcaaggaatatcagtgattttagggggccctgttttaaaacccctacaaggtgctaagcgtggatttctggggctttcttgttttttgtttttttctatgtgtttttttttttttttttggtggtggggtcagggagggcttatagggtatgttaaatcagcagaataattttatttatttatttggagatggagtttcactcttttgcctaagctggagtgaagtagcgtgatcagagatggagtttcactcttttgcctaagctggagtgaagtagcgtgatctcggctcactgcaacctccgccccgctggttcaagcaattcccctgccttagcctcccaagtagctgggattataggcacccaccgccacgcccggctaatttttatatttttagtagacatggggtttcgccatggctagtctggaattcctgacctcaggtgatccacccaccttggcctcccaaagtggtgggattacaggtatgagccactgtgcctgacctataatgttttttaaaaatcagttttggaaagtttgcagacattaacttttcaaatgtagcttccatttgattctttttctactctgcctctgatcctccacttatgtatgtatgctagatcttttattagatagtctgtgtctcttatgtactctactatattttgtattcttctgtctctccatgctttattctgtttactctttcctgattatattttttaattttgtaatttccatttgatgcttttttgatcattcaaaactcttcaccaaaattctaaatttccttttttaacctctcgaatgttatcacagttactttaaagtctattttggataacttaaatatttacagtcccctcacagatatgtttcttttgtatattgtttctgttggttttctttcatgtcttatctccacatatgcctggtgagttttgattatgtgttggtcattgtatttgcaagtatgctcgtagaaataatctggaatggccgggcgcagtggctcatgcctgtaatcccagcactttgggaggctgaggcaggtggatcacgagatcaggagatcaagaccatcctggctaacatggtgaaaccccatctctactaaaaatacaaaaaattagctgagcatggtggcacgttcctgtaatccctgctactcgggaggctgaggcaggagaatcacttgaaccaggaggcagaggttgcagtgagccgagatcacgccactgcactccagcctgggtgacagagcgagactccgtctcaaaaaaaaaaaaaaaaaaaaaaaaagaaataatctagagcctagtttgatgtttccttacaaagaatgaatttatttttgcttctcccattgcaactaggataacctcagtctagtttctggaactgaaatcacttgaggctgaactgtggtctctgtgagagcgtgtctgtgtatggctcacccttattcctaggctacgtagttctttaggaccctaacccaaagtaagagatgttcatcagggctctcctcttggcagacgcctgggctccagtccctgtgtcctgagccccatgaggctgttactggtgctgctcgtctgcccatcctctccagtaacagccacctgaacactgcaattcctgggtttccatcattccttccagcctggtgagtcatcagtgtcttttgaggtatccagtgcctgccagcagatgttttttaataatttgtccagcatttctggctgtcctcagtaggtggtctgtttcacattccctagtctgctgttaatggaaagtggaagttctgagagagaatcatcgttcccgtcagcattcaaatgcctgattacactttccccattcgctatcctttcctttatttgctcctcaccacagcaaaactcctcaaaaatatctatctttgcaatcttcagattctcacattgtgtccttaaacccactttaatcaggccttggttccctccattccactaaaagtaatgttgtcaaggtcgtgcatgcctccgtgatgctaattccagtgatgagttttcagttgtcattctctgacatatcggcaacacttgatgtggagtaccctgatgttgagaggctggtgagatgaaggaaaaacccagccaagggcaatgaggaatggcttccttccgcctcctccttccctatctttgttgtggtttttgttgtttctgtaacactgattacgttatagtttatttaatgtacttccttattctatgtttttactttagtcattttgttgatctcctccataataacataggctcgggccaagcacagtggctcacgcctgtaatcccagcactttgggagaccaagatgggtggatcacttgaggtgaggagttcgagaccagcctggccaacatggcgaaaccctgtgcctactaaaaatacaaaaattagctgggcgtggtagcaagcgcctgtaatcccagctactagggaggctgaagcaggagaattgcaggagaatcacttgaacccagggggcagaggttgcagtgagctgagatcgcgccactgcactccagcctgggtaacagagtgagactctgtctcaaaaaaaaaaaaaaaaaaaaggcttcaggagggcagagcattttatgcaattgttcattaattgacccctccatttggcacagatcacatgcccagtagttaactgttaatcaacgcactctctgtggaacaacaggctggtcccgttgagccaacactctctgggcactgccttcactagactctggctggctgctgcgcttgtagaggtatgcaagacaaaaccttttggtatgttaaaagccctggtcagaactttaagtaaccatcactgacatataatggttatggttttgaaagtgcttttatagtggtttttcatctgtcctcacagcacctctgggaggtaggtaggacaggtacagttagtctcatgtttcaaatggggctcagagagggaaaaggatttcccaagatcacacagcaccttagtagcaaaacttggactcaacctcaacacttaaaaatgaacaaagctggccgggcgcagtggctcatgcctgtaatcctagcactttgggaggcccaggcaggcaggtcacctgaggccaggagtttaagatcagcctggccaacatgacaaaactctgtctcttctaaaaatacaaaaaattagccgggcatggtggcgggtgcctgtaatcccagctactcaggaggctgaggcaggagaatcacttgaacctgggagatggaggctgcagtgagccgagatcgtgccattgtactccagcctgggcaacaagaatgaaactccatctcaaaaaaaaaaaaaagaaaagaaaagaaaaagaaaagtttccctttttttaaatatctcattttaatgactgcataatagtttattacatagttataccataatttatataatattttgttgctgtacatttaggttaaacaatacttacttagttcctactatgaagaggggccaagtactcgaggctggagctctcacatgtggcaatgaaattagaaagtggatatggcagggctgtggtaaaataaaatataaaaataataaatgatattaccaaagaaaaggaaagtttttcaaaataaaggaaaatctagacaagcatagtggctcacacctgtaatcccagtacttttggaggctgaggcaggaggaacacttgaggccaggagttcaagaccagcctgggcaacatagcaagaccccctgtcaacaaaaataaaaaaaaattaggccaggcacagtggctcacggtggctagtgcctgaaatcctagcactttgagaggctgaggggggtggattgcctgagctcaggagttcgagaccagcctgggcaacatggccaaaccccatctctactaaaaacacaaaaaattagccaggtgtggcagcacacgcctttaatcccagctactctggagactgaggtaggagaattgcttgaacccgggaggtgaaggtcgcagtgaggtgagattacaacactgcactccagcctgggtgacaaaatgagactctatctcaaaaaaaaaaaaaattagctgggcatggtggtgcatgcctgtaatcccagctactcaggaactaaggtaggaggatcccttcagcccaggaattcgaagatgcagtgagtcatgatcacaccaccgcaccccagcctgggttacagagcaagaccttgtctctaaaaaacaaagaaagtctaacctaaacgccattatgtcatttacatgtgtataggggtgtgtgtgtgtgtgtgtgtgtgtgtgtgtgtgtgtgtgtgtgtgtgtgtttgcttgggaggggagtcgggctggagctggccaggccgcagcctggggaccttctgattccagcagggatgtgggccgagggtcccgccttactcatttcgggtcttgctcctctgtcctggctctacagactcttccagctggagttggaggctgacgccctagtgaatttccatcagtattcttcccagctgctacccttctatgagagctcccctcaggtcctgcacactgaggtcctgcagcacctgaccgacctcatccgtaaccaccccagctggtcagtggcccacctggctgtggagctagggatccgcgagtgcttccatcacagccgtatcatcaggtgagcaagggaacaagaccatttggacaacgtgtgtgtacctgcttgtgtgggcagtgggggccgcaggcctcggttcccctccatagtttgacttaaaaaggagcagggcctggcatggtcgctcactaacgcagtcccagcactttgggaggctgaggagggaggatcacttgagactaggagttcaagaccagcctggcaaaatagcaagaccttgtctctacgaaaaaattaaaaaattagcatgtgtctatactcctagctacttgggatgctgaggcaggaggattgcttgagcccaggagttagagtttacagtgagctatgattgcaccactgcacttcagcctgggtgacagaatgagaccttgtctctaggaaaaaaaaaaaaaaaaaaaaaaaggtgctgcgttgctaccagattaaaatgtaagaaggacaatgtaatgtttccagagtccggagtgctcaccaggtgccaggtctgtgggagctgatttctacccaccatgaaattgaattttcccaacccccacaaggtatcgtcattttattttactttattttattttattttattttattttattttattttattttatgttacgttatgttattttattttgagacggagtcttattctgtcacccaggctggagtgcagtggcgcgatcttggctcactgcaccctctgcctcctgggttcaggtgattctcctgcctcagcctccggaatagctgggattacagtaatgtgccatcatgcccgggtaattttttttttttttttttttttttttgagacggagtctcgctctgtcgcccaggctggagtgcagtggcgcgatctcggctcactgcaagctccgcctcccgggttcacgccattctcctgcctcagcctcccgcgtagctgggactacaggcgcccgccaccacgcccggctaatttttttgtgttttttagtagagacggggtttcaccatgttggccaggttggtctcgaactcctaacctcaggtgatctgccctccttggcctcccaaagtgccgggattacaggcgtgagccaccatgcccggcccaggtatcatcattctagagagagctaacaggacttgtgcaggtcactcagccagagagggtgaaagaggggcttggatccttggtgtctgcccaggctgctcttctggaagctgaaggcctccttttgtgaatccattcagccagcagatggagcagctgttgcccctggtgagggcactgtccccacccttgcacagggcaccagttggccatcttgtgcagaggtagccacacctcctctgagtctctatcctagatagctcagttaagctcccaggcccagaactcaaaacctcactgctggccgggcgtggtggctcacacctgtaatcccagcactttgtgaggccgaggcgggtgtatcacttgaggtcaggagtttgagaccagcctggccaacgtggtgaaaccccgtctctactaaaaatacaaaaaattagcaaggcgtggtggcgcacgcctgtaatcccagctactcgggaggctgaggcaggagaattgcttgaacccagaggcggaggttgcagtgagccgagattgtgtcactgcattacagcctgggcaacaagagtgaaactccacctcaaaaaaacaaaacaaaacaaaaaccctcactgcactttagtttccaggcgtgcttttggacagcactgtctcatctcaccatcactctgtccatttcctggggcaggcacagcagcttgtgtcgataaggatattgacgcccagaaaggttaagtgaattgcctgaggctagtgagatatccgtgttctgtgaccctttcctgtgccaccaccctgcccacttcctgctggtgtggccctggggcccatctcttgtacgagtgagcaaactgaacagaaacctgatacaggtcacatcagatataattacattcaaatcagcccaactagctgagtggcgggaatgctcttgagctcaaataaaccagaaagtccgagtttccgagtgcacttccctgcatgtgcacttaggtccccctgccaccttgtaccacacctgctcacctctgctcaccctggccctctcctgcagctgtgccaattgcgcggagaacgaggagggctgcacacccctgcacctggcctgccgcaagggtgatggggagatcctggtggagctggtgcagtactgccacactcagatggatgtcaccgactacaagggagagaccgtcttccattatgctgtccagggtgacaattctcaggtgctgcaggtgagcagggggaggggcagggtgactggtactgatacctcccggtgtccacggttccctttgggcccctaggctcaggtgtcactctcaggcctctcactgtcccccattggtccttgaggcctgagctccttcatggagggtgcagacccctccctggctcttccctcccagcccttttccaggagccacgtcctcagtctctttgcttgataaacctggggacggcctccaacccagcaaaataaaccccaaaaaaggcccagctccagtcagttagttcagttccacttttcctgagcacaaactgtgagccagatgcctgcctggaggggctcgtgggccagcgggacctgggcttaaccttttgcaagcttgtccaatctgtggccctgcaggctgcatgcagcccaggacggctttgaatgtggcccaacacaaattcacaaactttcttaaaacattatgagatccatgcatggaccttttttttagatcagctgttgttagcgttcatgtattttatgtgtgacccaagacaattcttctgatgtggcccagggaggccaaaatattggacaaccctattttacaggaattcaaaccaagcaaaccaaactgtctccagttcctgtaggcatttgtgccagaggccctcctgttaacgtttttgattacctgggcaaaagatgtgattttttaattgtgggcaagcagatggggtgatactattaaatagctatttcatatattagattgaacagaaaaggcaggatgttggattatgttttattgtctagaattagaaaattcttctaaagatcatgttctctctgccttggcatcagaatgcaactacgttataccagaaaatgtggattcctttttttttttttttttttttttttttgagacagagtttccctatgtctcccaggctagagtgcagtggtgcgatctcggctcactgcaacctccacctcctgggttgaagtgatgctcgtgcctcagcttcctgagtagctgggattacaggcatgtgccaccatgcctgggtagtttccgtatttttagtagggatggggttttgccatgttgcccaggctggtctccaactcctggccttaagtgatccacctgcctcagcctcccaaaatgccgggattacaggtgtgagccactgtgcccggcccagaaaatgtggattcatatcttatgcttcttgctctcagggaagggaattctccacccactgttgaactccactttcaccgagaatcctctgcgcacccagcatggtgccgcgcagaccctgcctccatgcgggggtgtgcacacccgcttctcgatagtcatgcacgactgcagctgtcctttatccggtgctgattggtgcctgaccttgaactgagtgttgtatgtgttccagttaattcttagaatacactcatggggtggaggtcattattcccctttcctctccgaagaaactgaggttcagtgttgttaattaagaagcgtgcccagggagggccacaaagctgagagagtggggcttgaccttacattggcctcgatgccagccctttgctcttcctgctgtgtctctggcctgccttcaggtccagtgggactgctgtgaggtgaccctggtgtcacatgggtacactgtggttgtaatgaacctcatggggacagcactgagccaaaagtgagacagtaaaaccctcctagcactttcttttttttgagacagcatctagctctgtcgcccaggctggagtgcagtggtgtgattgtggctcactgcagcctcaacctcctggactcaggtgatcctcccacctcagcctcctgagcagctgggactacaggctcgtgccaccacatgggctaattttttttttttttgagacggagtcttgctctgtcgcccaggctggagtgcagtggcgcgatcttggctcactgcaagctctgcctcccgggttcatgccatcctcctgcctcagcctccagagtagctgggactacaggcgcccgccaccacacccggctaattttttttgtatttttagtagagacagggtttcaccgtgttcgccaggatggtcttggtctcctgaccttgtgatccgcctgcctcggcctcccaaagtgctgggattacaggcgtgagccaccacacccaggccacgccagctaatttttaaaatttttttggtaaagatggggtctccctatgttgccgaggctggtatcacactcttggtctcaagtgatcctctcacctcccagtgtgttggaattacaagcatgagccactgcgcctggcccctggctctctttttaatactgctgttctttcattgaaaacatagtacctgcatgtagaaaaaaatcagtcaggacagaatgaaaagcaagaatcattcccacctggacccccagtgcccatcctgagatacagctaccttttaagttccttgactcagaaatgtttcatgtgagccacagtcatgccaggtcgaccccttccctcccatccacactggcacttggctttcctggtgcttctctttacgttctttttttttagacagagtttttgctctattgcccaggctagagtgcaatgatgcaatctcagctcactgcaacctctgcctcctgggttcaagcgattctctttcctcaggttcctgagtagctgggattacaggtgcctgccaccatgcccggctaatttttgtatcgttagaagagacgacatttcaccatgttggccaggctggtctcaaactcttgacctcaggtgatccacccaccttggcctcccaaagtgctaggattacaggcatgagccactgcgcccggcctctttacgttcttatcagcatcctatggagtcaaacttcccttcctctttcatcagctccttggaaggaacgcagtggctggcctgaaccag

SEQ ID NO: 13333 - DNA, 571 bp, Homo sapiens
aggaaacagtgtggatcacaaggaggtgattgagagctactctgcgtctggaagagtgaggaggagcctgtgtggcagaacaaaatggataaggtcgttccagccgtgcagaagtgtggaggtgtgagcctgcagactcttccagctggagttggaggctgacgccctagtgaatttccatcagtattcttcccagctgctacccttctatgagagctcccctcaggtcctgcacactgaggtcctgcagcacctgaccgacctcatccgtaaccaccccagctggtcagtggcccacctggctgtggagctagggatccgcgagtgcttccatcacagccgtatcatcagctgtgccaattgcgcggagaacgaggagggctgcacacccctgcacctggcctgccgcaagggtgatggggagatcctggtggagctggtgcagtactgccacactcagatggatgtcaccgactacaagggagagaccgtcttccattatgctgtccagggtgacaattctcaggtgctgcagctccttggaaggaacgcagtggctggcctgaaccag

SEQ ID NO: 13334 - DNA, 1346 bp, Homo sapiens
cccgaatgactttggggagactcctacattcctagcctccaaaatcggcagacgtatgtgctctgcactctggggctggagtggggtgagggttgggtggatacagggaccgaggaggagggaagtcccaggcatcaggtgccagcatcctgtgctgacccgccctgctcagagctgccaggagcacctcgtactcagagagggggcttccttacccaagcacaagggccctgagcagtagatgcaggcccaccacggggcttgctataccagcatcctctcccgtgcagcgccccccacctcagggagctaagattcccagcaggggtggggacaggagagccagcagcagccttctttccccaccgttggggaattcactgatggaaccactggctagaatgaccaagggtgcatgcactacactgcacgagctctgggcatgcctgtgtgggcagagtgcatggccatgtgctgcacgctcgcacagtgagccttagcttcagagctggacagagcagatcctcctcaccagaggcctggagcccgctctggagggtttcagcagctgtgggggtcactgtgggcaggtacctgatggcagcagtgtgtgtgtgccagtgcacacgtgtgtgtctgcatgcaccgcatctatgacctccttttcagcaatcccatccatcaaatggagtaggtgccccctggctggctcattagtccctttggaaccctgaactatcacttagcatttttgagaatcactgaatgtggccatgggattcctgctttcttggctggagtagaaggaaagaaggggttcccacaggcatcgggcagggtgacactgacctcctcctcccatatcctccttccctggccttaggaagctgcttgggatgtaccagcctgggggcagcactccctgtcagggtgggctgaggcctctggagcagcccacgtgcccagggcctgggagctgggacaggggacggagtgtggaaaggaggggcctctcctttgcatgttgacatcatttctgatcctgtgccatctccccttccccaaaccatgacaagttgtcaccaggaaggcgatcttgactctgctgagaaccgtgggggccgaatactgcttcccacccatccacggggtccccgcggagcagggctctgcagcgccacatcatcccttctccctggaaagagctcagcccccaccgatcagcctaaacaacctaggtaggcctcgcctcccgactccctcttctccagctggttcccaggcccctggatcacagcaggccccaccaaagcaacaggatccctaggacggaagtcactaaagga

SEQ ID NO: 13335 - DNA, 323 bp, Homo sapiens
cccgaatgactttggggagactcctacattcctagcctccaaaatcggcagacttgtcaccaggaaggcgatcttgactctgctgagaaccgtgggggccgaatactgcttcccacccatccacggggtccccgcggagcagggctctgcagcgccacatcatcccttctccctggaaagagctcagcccccaccgatcagcctaaacaacctaggtaggcctcgcctcccgactccctcttctccagctggttcccaggcccctggatcacagcaggccccaccaaagcaacaggatccctaggacggaagtcactaaagga

SEQ ID NO: 13336 - DNA, 4025 bp, Homo sapiens
cctggggagggggagacaccgcttcgcagccctcggttctgctttgctgcttctagactctgcacagtggtggggggctgtcagagttggggtcacgcgggctgctgcaccaggcacctggggactgggctgcttgtcaggaggggcagctagtcagttgggtggacgtcaggcaggccttggacacaaaggaagacatggacagagtggatggtgggcctgatcccggaggccactgggatttccagacctgggatcaggacgagggatgtctcctttcatccatggacttaaaccccgaggaacgtcctgactcagccttttgactaaatgaccttgggtgaattatggaccctcttagagcctcacctgtcaatagggaataagaattcttaggccccaggtggttattgcagcatcggctccgatgcaagaagaagcactttgtctgaagaggacacgcaagggtattcatgccttggggtttcaagaggaagagattgaggggaacctgggagctggctgggcagggtggggagcccttcccagagcagtgggcccccctttccactccagcccatttctctcctgtggcctgtggctcagctttctcctgggacagagtccttcctgtggggaagggacagatgacagggggagtggggggatgagggcgtggccgtgggcgaggcacagcccaggtttgatctagggacctctggggtagcagggcttggggacccacctgaccacagcatgccctgctctgtgcctcacagaactacaggatctcatgcacatctcacgggcccggaagccagcgttcatcctgggctccatgagggacgagaagcggacgtaagtggatcgagatcgggggcagagcggggaacgtgtgcgctttcctgcccctcacccaccccctgttgtgggctcagggctttactctctgcaccctcacagccggcgaagtggctctgctcctagtcttatagttctcagcagagacagaacatggagagcctgtgtcgctcgttcattaatgctgggcggtgcaggctctggagaccagcccagggtgccaggcttcttggacttggtggggctggcgcagtgttctggcctccctccctgatctccttatggctagaagagggggagatgcctgggtcccccctggggagatctcagcagctgcttcccactgctcctactggcttccttaaccacctcccactgcagaatagtggcgtgggctgccttccccagcacctgctgtatacctagtcccattgtaagaggcgggcctgggtgacaggatgcaaagagaagacgcccaggccttgcccttcaggcataatcccgggtgcttgaactcagtgccagctggcacggcaaggtaccaggacaaatgcgtttccagccactgtgctgtcgccacctcccttgattgctgcagttgattcatttattctttattagtctctcatgttcctaatagccttcccagggaggaatttgtaaccttgttttacagatgcagaacctgagcccctgagaggtgaagtgacttgctcaaggtcacacggagtgagtgtcagggtggcaactcacagccgggtcttccgaacccacgtcctttgtgctaccgcaggctctctctgggttctctgtggactctatacctagtgccagccctctgcagggaaagctctcttctcagaatcagaggcagctccactcccagggccaggcagtgatcgtgcagctctgtgggtcctctcacttcgcactcacttccatgctaccctgttgtgtgccctggaggttcccctgccccatcagcattccctcccctgtgccccctgcatgctcttgcacgcgggcacacgcacacacacacgcacacatgcacgcacacacacccacatgcacatgcctgcgggttgcccacatgcatgtgttgcccacatgcaaacacatggacacgcacacacatgcacacatgcaaacacacgtgcatgcacacacatacacatgcgcacacatacacatgcatgcatgcacatggacacccacacacatgcacacacatgtacacacatgcatgtacatacacacacctgtgcaggggctgaggtgaggcagctgcacctgaaggggggacccacatttcccaagggaggaaaagcagattccccagattctggagcctcagaaccctgcctggagcggggctgaggcaagagtcaggagacccctcggtagctccccacttgggccttccaagctacagagccctgcgccctctgggttgatctctgtcgccagccccgcatcttcgggagtttgctttggcctccagcaacagtgtagtctctcccctgccacctctaggcttgctgtggggctgggtacctggtccaggaaaagacccctagaggtgggacccgggcctcctccatttatcagccctcttgggcacctcctgcatccccttgacacacagcgctgcccagagcagaggcggcttctgccctggtggagcttccaggtcagcgcaggagagagtaaaagaaagattgcgaatggaatggaagcagcctccaccaggaagcaggtggagcagcaggcgggctgtgagggagggtctcgatggcatcagggcaggcttctctcagcttcatcaagctgagatgggaagatgagaagatcagaggaaggttccagactgaaccaaccacaaaggcattcccccagggcatggccaatgaggacaggcaggatgtggggagacgtgtcagggcgcgctggagagcatgtgactcaggaggcggcagacctgggtccaggtccagtccgcatccatatgacttggttcccgtcacctaacctctgagctacactccctccgtcactcaaaaatatgcacagagagtaggcgcagtggctcctgcctgtagtcccagctactcgggaggatcacttgagctcagaaggttgaggctgccgtgaactgtgattgcaccaccacacaccagcctgggtgacagagtgagaccctgtctctataaataaataaataaataaataaggctgggcacggtggctcgtgcctgtaatcccagcactttgggaggccgagacaggcggatcacatgaggtcgggagttcaagaccagcctggccaacatggagaaaccccgtctctattaaaaatacaaaattagctgggtgtggtggcgggcacctgtgatcccagctactcgggaggttgaggcaggagaatcgtttgaacccgggaggcagaggttgcggtgagccgagatcgcgttattgcactccagcctgggcaacaagagtgaaactccgtctctaaataaataagcacagggatgtcagggagggtctgcctcagaggcgtttgggacaatgacatgagctaatgctggtagcacccctcccatagcccctggcatgaacctctcccttcctccctgccccctcctcccctgcttcttccaccttgtgtggaggccctgatactctgtcactgcccattcctggcctggctgtagggtccccgcccctccttccccagccttatttaattccaacagactttatcaggcacctgctttggatcaggcctgatactgaccaaaatcaggtgtcccaagttggggagactggccgagatcctgctgggatggcgcctggtcagtgatgctatcccccgaccttcctttccctttctctgttgcactctccagcccctgaaatactagacatttgttcctttactgccctcacccccaccctcgctgtcctgcataggacagaagttcctcgggtccgtctgggtctgtctgccaggacacagctgcaggggacaagggctatgagggtggatgtaaagtactgggctgtggcaggaccctcctctctcccactgctgttcccactgcagccacgaccacctgctgtgcctggatggaggaggagtgaaaggcctcatcatcatc

SEQ ID NO: 13337 - DNA, 601 bp, Homo sapiens
cctggggagggggagacaccgcttcgcagccctcggttctgctttgctgcttctagactctgcacagtggtggggggctgtcagagttggggtcacgcgggctgctgcaccaggcacctggggactgggctgcttgtcaggaggggcagctagtcagttgggtggacgtcaggcaggccttggacacaaaggaagacatggacagagtggatggtgggcctgatcccggaggccactgggatttccagacctgggatcaggacgagggatgtctcctttcatccatggacttaaaccccgaggaacgtcctgactcagccttttgactaaatgaccttgggtgaattatggaccctcttagagcctcacctgtcaatagggaataagaattcttaggccccaggtggttattgcagcatcggctccgatgcaagaagaagcactttgtctgaagaggacacgcaaggaactacaggatctcatgcacatctcacgggcccggaagccagcgttcatcctgggctccatgagggacgagaagcggacccacgaccacctgctgtgcctggatggaggaggagtgaaaggcctcatcatcatc

SEQ ID NO: 13338 - DNA, 5997 bp, Homo sapiens
atgccttggggtttcaagaggaagagattgaggggaacctgggagctggctgggcagggtggggagcccttcccagagcagtgggcccccctttccactccagcccatttctctcctgtggcctgtggctcagctttctcctgggacagagtccttcctgtggggaagggacagatgacagggggagtggggggatgagggcgtggccgtgggcgaggcacagcccaggtttgatctagggacctctggggtagcagggcttggggacccacctgaccacagcatgccctgctctgtgcctcacagaactacaggatctcatgcacatctcacgggcccggaagccagcgttcatcctgggctccatgagggacgagaagcggacgtaagtggatcgagatcgggggcagagcggggaacgtgtgcgctttcctgcccctcacccaccccctgttgtgggctcagggctttactctctgcaccctcacagccggcgaagtggctctgctcctagtcttatagttctcagcagagacagaacatggagagcctgtgtcgctcgttcattaatgctgggcggtgcaggctctggagaccagcccagggtgccaggcttcttggacttggtggggctggcgcagtgttctggcctccctccctgatctccttatggctagaagagggggagatgcctgggtcccccctggggagatctcagcagctgcttcccactgctcctactggcttccttaaccacctcccactgcagaatagtggcgtgggctgccttccccagcacctgctgtatacctagtcccattgtaagaggcgggcctgggtgacaggatgcaaagagaagacgcccaggccttgcccttcaggcataatcccgggtgcttgaactcagtgccagctggcacggcaaggtaccaggacaaatgcgtttccagccactgtgctgtcgccacctcccttgattgctgcagttgattcatttattctttattagtctctcatgttcctaatagccttcccagggaggaatttgtaaccttgttttacagatgcagaacctgagcccctgagaggtgaagtgacttgctcaaggtcacacggagtgagtgtcagggtggcaactcacagccgggtcttccgaacccacgtcctttgtgctaccgcaggctctctctgggttctctgtggactctatacctagtgccagccctctgcagggaaagctctcttctcagaatcagaggcagctccactcccagggccaggcagtgatcgtgcagctctgtgggtcctctcacttcgcactcacttccatgctaccctgttgtgtgccctggaggttcccctgccccatcagcattccctcccctgtgccccctgcatgctcttgcacgcgggcacacgcacacacacacgcacacatgcacgcacacacacccacatgcacatgcctgcgggttgcccacatgcatgtgttgcccacatgcaaacacatggacacgcacacacatgcacacatgcaaacacacgtgcatgcacacacatacacatgcgcacacatacacatgcatgcatgcacatggacacccacacacatgcacacacatgtacacacatgcatgtacatacacacacctgtgcaggggctgaggtgaggcagctgcacctgaaggggggacccacatttcccaagggaggaaaagcagattccccagattctggagcctcagaaccctgcctggagcggggctgaggcaagagtcaggagacccctcggtagctccccacttgggccttccaagctacagagccctgcgccctctgggttgatctctgtcgccagccccgcatcttcgggagtttgctttggcctccagcaacagtgtagtctctcccctgccacctctaggcttgctgtggggctgggtacctggtccaggaaaagacccctagaggtgggacccgggcctcctccatttatcagccctcttgggcacctcctgcatccccttgacacacagcgctgcccagagcagaggcggcttctgccctggtggagcttccaggtcagcgcaggagagagtaaaagaaagattgcgaatggaatggaagcagcctccaccaggaagcaggtggagcagcaggcgggctgtgagggagggtctcgatggcatcagggcaggcttctctcagcttcatcaagctgagatgggaagatgagaagatcagaggaaggttccagactgaaccaaccacaaaggcattcccccagggcatggccaatgaggacaggcaggatgtggggagacgtgtcagggcgcgctggagagcatgtgactcaggaggcggcagacctgggtccaggtccagtccgcatccatatgacttggttcccgtcacctaacctctgagctacactccctccgtcactcaaaaatatgcacagagagtaggcgcagtggctcctgcctgtagtcccagctactcgggaggatcacttgagctcagaaggttgaggctgccgtgaactgtgattgcaccaccacacaccagcctgggtgacagagtgagaccctgtctctataaataaataaataaataaataaggctgggcacggtggctcgtgcctgtaatcccagcactttgggaggccgagacaggcggatcacatgaggtcgggagttcaagaccagcctggccaacatggagaaaccccgtctctattaaaaatacaaaattagctgggtgtggtggcgggcacctgtgatcccagctactcgggaggttgaggcaggagaatcgtttgaacccgggaggcagaggttgcggtgagccgagatcgcgttattgcactccagcctgggcaacaagagtgaaactccgtctctaaataaataagcacagggatgtcagggagggtctgcctcagaggcgtttgggacaatgacatgagctaatgctggtagcacccctcccatagcccctggcatgaacctctcccttcctccctgccccctcctcccctgcttcttccaccttgtgtggaggccctgatactctgtcactgcccattcctggcctggctgtagggtccccgcccctccttccccagccttatttaattccaacagactttatcaggcacctgctttggatcaggcctgatactgaccaaaatcaggtgtcccaagttggggagactggccgagatcctgctgggatggcgcctggtcagtgatgctatcccccgaccttcctttccctttctctgttgcactctccagcccctgaaatactagacatttgttcctttactgccctcacccccaccctcgctgtcctgcataggacagaagttcctcgggtccgtctgggtctgtctgccaggacacagctgcaggggacaagggctatgagggtggatgtaaagtactgggctgtggcaggaccctcctctctcccactgctgttcccactgcagccacgaccacctgctgtgcctggatggaggaggagtgaaaggcctcatcatcatccagctcctcatcgccatcgagaaggcctcgggtgtggccaccaaggacctgtttgactgggtggcgggcaccagcactggaggcatcctggccctggccattctgcacagtgagggcggcccctggggatggggccaggcggggctgagacctgtgtcctcaaggggccgagtttgtcttcagggctttgcaaaaagagagtggaggagtagaggagggctataagcactttgaggaggcaggggcggggctgcaggtgctgaggtcccaggctggaaggagaagggctgggcccatgggcttgggtttggggatcccccgccctctggccacagagggtagagctggctgtgtgaaattttggcataggaagcgtttcctatcgactgccttaacccctcctcccctcacccctgcaaagcaggcaccaggggccacacagcctgctgcacataaggaatcccattcccagggtgcacgcagcaggcagtctcaggaatgaggagccactgagcctcaggatgccagagccctcgcctgcacacttcattttactgggaaattttactgggaaattaagttcccaggtggggagggatgacgtgaagtcacatagctcatccatggggtcgctgggctggagcacagtcccctagactcccagcctggcacctcctaggccacagggcactgtgtagtctcctttcactgccgctttgcgaaggcgcctggcttgctggacagatagccgggtggtcagtgttgtgacggctcctctgtggagctgtctgagcttctaggtgctgacaggtggggaggggcactgccagatcagggtcctcagctccccccaaccccctggacattgtcctgggactcaacatgtctgactggtgcccctgcccctgtgctggtcagattccattttctccagagcgcccccacatctggatcctggtcatgcaaagtcttggaggtgcccggggaggactccccaccctagggtgggtatcagggcctgtgggccaggcctgtgttggatgctggggatgcagagctgagccaggcataccccagcctcaggagcagggggctcagccagtccaggaggtgctggggacagagtcccatgggcggaggaggagagtcatctgtcaagttgccgggacgttagtgtccacggcggtttattgactggtatttcatttccttttgatgattctcaccatagccctgcggggtgagcagatggggaaactgagaaccagagaggatcagccagtgaattgggcagtcaggactgggtctccagcagtgtgcccagctctctaccccagcctcagggtcccagcatcccctctctggtcttccacagggtccaagggcgggcacgaggtctgagcaggcagactgggcagagtcctagcttcttctccaaaagggccacgtccttcttcagggaccatttcttccccatccggggtcttgagactcccaggggccatggaggggatttgagaggtctcctggctgatcctccggtgtgggcagatggcctcctttcagctaccctctgcttgtacatccctggccctggggaactcactgcctcacgggggaagtggggcagcttctccttcctggaggtgcagccggccccttggccctgtctgttctgaaggctcaaaggacagggctattccttgttttctgtgacaaacaacgtgggtctagcttttataagcttttactcttgaggggctcttctttaaggaaaataatacaaaatcatgaatacaagatgaagtgcagagccgtggggcttcagtggtttttgagtctctccgttgcccaggctggagtgcagtggtgcatcttggctcactgcaacctccgctcccgggttcaagcgattctcctgcctctcagcctcccgagtagctgggactacaggcgcccgccaccacacctggcgaatttttgtatttttaatagacggggtttcaccatgttgggcaggctggtctcaaactcctgacctcaagtgatccacctgcctcagcctcccaaagtgctgggattacaggcgcgagccaccatgtccagccggaaggaggtttctctctgtctgtctgggaggttgcaaaggaagggcccagaatttgggtttgcttaggcctcggtaaacccgcttcctcctgccacctcctgcgttcaggcgctctgcaggctgttctacgggagccctgcgtgtggccgctgcatctccccgcctctgacccctttgttcctaggtaagtccatggcctacatgcgcggcatgtactttcgcatgaaggatgaggtgttccggggctccaggccctacgagtcggggcccctggaggagttcctgaagcgggagtttggggagcacaccaagatgacggacgtcaggaaacccaa

SEQ ID NO: 13339 - DNA, 753 bp, Homo sapiens
atgccttggggtttcaagaggaagagattgaggggaacctgggagctggctgggcagggtggggagcccttcccagagcagtgggcccccctttccactccagcccatttctctcctgtggcctgtggctcagctttctcctgggacagagtccttcctgtggggaagggacagatgacagggggagtggggggatgagggcgtggccgtgggcgaggcacagcccaggtttgatctagggacctctggggtagcagggcttggggacccacctgaccacagcatgccctgctctgtgcctcacagaactacaggatctcatgcacatctcacgggcccggaagccagcgttcatcctgggctccatgagggacgagaagcggacatgcagaacctgagcccctgagaggtgaagtgacttgctcaaggtcacacggaccacgaccacctgctgtgcctggatggaggaggagtgaaaggcctcatcatcatccagctcctcatcgccatcgagaaggcctcgggtgtggccaccaaggacctgtttgactgggtggcgggcaccagcactggaggcatcctggccctggccattctgcacagtaagtccatggcctacatgcgcggcatgtactttcgcatgaaggatgaggtgttccggggctccaggccctacgagtcggggcccctggaggagttcctgaagcgggagtttggggagcacaccaagatgacggacgtcaggaaacccaa

SEQ ID NO: 13340 - DNA, 7503 bp, Homo sapiens
tgggtttgcttaggcctcggtaaacccgcttcctcctgccacctcctgcgttcaggcgctctgcaggctgttctacgggagccctgcgtgtggccgctgcatctccccgcctctgacccctttgttcctaggtaagtccatggcctacatgcgcggcatgtactttcgcatgaaggatgaggtgttccggggctccaggccctacgagtcggggcccctggaggagttcctgaagcgggagtttggggagcacaccaagatgacggacgtcaggaaacccaagtaagccctggcgcactggggccgtggccgcagctgtgcccactgtggctgttccctggggacagagggctccctgtcctgctgagggagggggaagagcgccccacgcttgaggggagcagagggaacccccttcccagggaggcagagggctggggtgtggctctcacttgggcatgcagacacctgctgagcgcaggaggggcgtggcctggtgggcctggctctgccctgcctggctctgccctgcccggctctgccctgccggctctgccctgcctggctctgccctgcccggccaggggtctggggcttgcctggagagagcctgggccacccttctctgagaccacctgggcagaggctgggtttttgctgcccaggcaaaaggaacccactggcctttcaaatgacacggctaaacattttctcacatttcagacagcactcgctcccaggatcggactactaggttataatcagagggcttcagtcttacctttaatttaaggcctacaagacttgaactaatttaagtcagactgaaggagaaagtcacatttccaggaaacatttgtttgggaagcccaaatcctaggactaagcaatgcatcccgttcggggctggatgaatggtgtgttccaagaggagtgttttgagcatttctgagtgattttttcatattttgaaagtgagtgtcccccagtcttaggggcccggcatcccctctgcggtcttccctagggtccaaggccagggaccttcaatcttttttcccactctgtggcttgtctttctgctctgtggtgtttctaggtttttgttttttgttttttgttttggttttggttttggtggcccatgttcttaatgaggtagataatatttataaatatttttcttcttgtagtttgtgattttttcctttctttctttcttttttttgaaacagggtcttgctgtggggcccatgctggagtatattgctgtgaacacggcttactgcagcctcgacctcctgggttcaagcagtcctcccatctcagccgcctgagtgcctgggactactagcatgtgccaacacatgtattttttgtagagatggggtttcaccatgttgtccaggctagtcttgaactcctgagctgaggcgatcctcccgccttggtttcccattacaggcatcagccaccatgcccagcctagtttgtgctttttatttctcgttcataaacccctttgctgcccccaagcagcacacgattctcctgtgtcgagctggaaagctctctagatctgccttttacattgaggtcttttatcaacctggaattgatttttgtatgagggtgaaatccaagatccaatttaatgttttccacgtgattggccaatttttcccagccccatctgtgaagtctgtccttccctccgcttcctcagcagtgggtcaagcatccctctgctcttggatctgctccaggctgtgttttgttccactggttggaaagctgtctctgtgcccggaccacagagcataaaaaactaccgctgtgtggtgagtcctggtgtctgggtggcagatcctccaccttggccttcttcaaaaacatcatggctattcttgggggcagtagagagaagtggatacaagcatagaccctgaagtttctacctcttctcaaaaataggaatatgccaggcatggtggctcaagcctgtaatcccagctctttgggaggctgaggcaggaggatcacttgaggccaggaggtcgagaccagcctgggcaacatagtgagaccctcatctctacaaaaaatttaaaactaacaattagctgggcatggtggcactatggctgtagtcccagctaattgagaggctgaggtgggaggatcacttgagccccggaggctgaggctacagtgggctgtgatcccatcactgcactccagcctgggcaatagagtgagaccctgtcttaagacaaaaaaaaaaaaacaaaaacaaacaaactcacaaactataaaaagaaaaaatatttataaattctactccattaagaacatgggtccatccaaataaataaataaaacaaaaacaccataaagggagtaaaaagacaagccacagagtgggagaaaagatttcgaatccatacatccatcaaaggactcattttcaaaatatgaaaagatcattcagaaatgctcaaaatagtaaccaccattttactttctcttcctatgagtttaactgctccaggtactgttaagtaaaatttttaggggataattgatttggaccaggattctgtaccaggcccaacagaagaaacgaatatggagtcattcatgccaagtgaacctagttagcttaggcgtatacccatgtaacaaatagctgagttctggttagctacaacagctaagctttaatcaatcatagatggccacctgattcaaacaaggcaaaccaattaagctccacacctcactttggttttcagcccatcaacactgcctgaccacgttgcaggccagagttctttgaacctattctggttttgtggcctgcctgactctcagttcatcaataaaagccaattaacatctttaaatttgttgcaattttatctttgaccgtaccttatgtaagtggaatcatacagtatttgtctttttgtgactggcttatttctttctttttttttttttttgagatggagtcttgctctatcacccaggctggagtgcagtggcgcgatctcggctcactgcaatttctgcttcccaggttcaagtgattctcctgcctcagcctccggagtagctgggattataggcgtgcaccaccatgcccggctaattttttgtattttagtagagacagggtttcaccatgttggccaggccagtctcaaactcctaacctcgtgatccacccacctcggcctcccaaagtgctgggattacaggggtgagccaccgtgcccggccatgactggcttatttcacttggcatccatgttgtagcgtgtgtcagaatttccttcctttttaaggctgaaaaactccattgtctgttggatacacgttttgcttctccattcatccattgatggatattttagttgtaaattgactgctgtcaatgtcggatgtgcaaatacctgtttgaggcctactctctcttactggtgccttctctagagagaattctgatgggttcagtttgatcatattttgtttaagatttttggccaggcgcagtggctcacgcttgtaatcccagcactttgggaggccgaggtgggcggatcatgaggtcaggagatcaagaccacagtgaaaccccatctctactaaaaatacaaaaaattagccgggcgtggtggcgggcgcctgtagtcccagctactcagagaggctgaggcaggagaatggcgtgaacccgggaggcagatcttgcagtgagccgagattgcgccactgtactacagcctgggcaacagagtgagactccgtctcaaaaaaaagatttttgtgtccacgctcgtgggcgaacttgacccgttttttcctattttgggttttgaggaaatatttcctctttttatttttcttggaagagttagtataatagtttattttgaatttatggtagaacttgatagtaaattcttctaggcctggagtttgcttggtgggaggatttttgatgatggaattaatttctatagtggttgtgagactgaccactcggggtttctaaatacctttttgagttagttttggttaagtgaggtttttctaggaatgtgtccatttcatctaaatctttaagcttattggcttagagttgttcaaaatattctgtttttttttttttttttttttttttgagacggagtttcactcttatcgcccaggctggagtgcaatgacgtgatctcggctcactgcaacctctgcctcctgggttcaagcaattctcttgcttcagcctcccaagtagctgggattacaggcatgcgcaaccacacctaatttttgtattattagtagagacggggtttccccatgttggccaggctggtctcgaactcctgacctcaggtgatccacctgcctcggcctcccaaagtgctgggattacagacatgagccaccatgcccagccgattctcctttttctaacgtctgcagtgtgtgttggtgcggcccccttttctttcctgattttgataacagataacagccatgttttatcagtcttgcaacaggtttttccattggattagcctttcaaaaaaaccaacttttgctgaattgtgcccccaaggttggaccaatctgacactcctccagcactgccggagagagcctgttttgcggggatggtgcggggagaagcccacctatcccgaacagaggttggagtgggcactctgctacccaaggccctggggtgtgaattgtggggaaagggaaaggtggatgggcgggtggctcagccgtcctcctgcctcatttctctccagggtgatgctgacagggacactgtctgaccggcagccggctgaactccacctcttccggaactacgatgctccagaaactgtccgggagcctcgtttcaaccagaacgttaacctcaggcctccagctcagccctcaggtttaaaccatgtttgatgcatccatgggaagcgactggcccgagaggctgtggggtggtgggtgggagtcgtgcacttgccatcaggcaccctcaccgtgccaccagcccacccgctgcactggtctttattggctgaggacagggattgcgggggagctgtcaggcccctggcaggttagaaaagtccctggaaagtcctcagctgtacctgccttccaccaggacgaactagccagagagtgtggcttcgtgggtcctgcttctgaagagttcccagcctcccctcttcccgcacccccagcccccaacacgcacaccctgagatctggagtgcatgggttttatgccagtcccttgtgccactgggccgccctccttccccgcccctagaccagctggtgtggcgggcggcccgaagcagcggggcagctcctacttacttccgacccaatgggcgcttcctggacggtgggctgctggccaacaaccccacgctggatgccatgaccgagatccatgagtacaatcaggacctgatccgcaaggtgagtgccgtaggccagagggcctggacccactgctccctggagccaatcctgtgtcagcaaaccatgctagggaccgacccccaggacagcaggtggcttttacacacgcactcattcatatgtgcacacagggcaaattgatctcactggaacctgttccatgggtgggatctgcctgaagcactgtgctaagggggatctgaggaccactgtgctctaagtgtgcatgagtggggagggcggcatgcataccatgaacgtgccactcgagccagcctggggacaggacacatgcttgcccttgagctcacctctgtggatagacagtcccacaggaatgcctgtccccacgggttgccggtgctgtggtggaggaccgtgaggcctctgctaaaaggcctgggggctcggaaagggctccatggaacaggggacccatcctgaggcccttggggacagagcagtgcagaatcagtgatctggaggaagagcagcagccctctctctgcagaggtacagcagaggctggcaggacccagcatgctaggggaggccctgtggcgtggcgggcggtgggtgaccggggtgggcgagcgcggtggctgagctcagaccctggagccagggcgcctctgggggtccccgttctgcctgcactcactgcagctacctaatggggccatcatagcgcctgcctggggaggctgcgaggccttggcatgctgttgtctgtgaaatgttcacagcactgccgggagcctgagctgcatccttgctgctgtggtttcccgaagccccagggcgtcctgggcagcgcagcagaggctctgggcagacagagaagcgccctctaggggccagatcgggcagggcgggcttcctgcaggcggcagagaccgtcagactgtcagacactagccagtctaactctcctattgcgtgcggatggggagcctgggacccagagtgggaggcatcacccaagatcatccagcaaatcggcagcagagcttgttcggaagcaaataagagaggcagcggccgggcgcagcggctcacgcctgtaatcccagcactttgggaggccgaggcaagtggatcatgaggtcaggagatcgagaccatcctggctaacacggtgaaaccctgtctctactaaaaatacaaaaaaattagccaggcgggcatagtggcaggagcctgtagtcccagctactcgggatgctgaggcaggagaatggtgtgaacccaggaggcggagcttgcagtgagccgagatcgcgccactgcactccagactgggagacagagcgagactccgtctcaaaaaaaaaaaaaaaaaggcagcacccagggctcaggttcaagccttagcccctacttccctaccacgtggcccctgcagctgcttcccggcctgagcttcgctgagagccctcatttgcaaactgggtgatcagtgccctctccacagactggctggagattaaatgaagtaatgatgcaaatacctggcaaatcaccaacaccaaggaacaccgtctgcctttcctcccctggccacgacttgacttgggccagcatcagatggggtgggcgggatccttcttgcagctggtgtatgtgtggtcctgttggtacacagatgctgtcctgagcagatggcatgtgatgcccgcaccagccgttctggggtcacgtgcaagaggctggctggaaatcatgccaggcatgctcttgccaccagagacctcttgccctgttctcatgtgccccagagcccagtcttgggcctccccttgacgctccccttcgtgccccctacctgtggaaggtctcttctgactgcccctgtcctgttcccaacagggtcaggccaacaaggtgaagaaactctccatcgttgtctccctggggacagggaggtccccacaagtgcctgtgacctgtgtggatgtcttccgtcccagcaacccctgggagctg

SEQ ID NO: 13341 - DNA, 859 bp, Homo sapiens
tgggtttgcttaggcctcggtaaacccgcttcctcctgccacctcctgcgttcaggcgctctgcaggctgttctacgggagccctgcgtgtggccgctgcatctccccgcctctgacccctttgttcctaggtaagtccatggcctacatgcgcggcatgtactttcgcatgaaggatgaggtgttccggggctccaggccctacgagtcggggcccctggaggagttcctgaagcgggagtttggggagcacaccaagatgacggacgtcaggaaacccaaggtgatgctgacagggacactgtctgaccggcagccggctgaactccacctcttccggaactacgatgctccagaaactgtccgggagcctcgtttcaaccagaacgttaacctcaggcctccagctcagccctcaggacgaactagccagagagtgtggcttcgtgggtcctgcttctgaagagttcccagcctcccctcttcccgcacccccagcccccaacacgcacaccctgagatctggagtgcatgggttttatgccagtcccttgtgccactgggccgccctccttccccgcccctagaccagctggtgtggcgggcggcccgaagcagcggggcagctcctacttacttccgacccaatgggcgcttcctggacggtgggctgctggccaacaaccccacgctggatgccatgaccgagatccatgagtacaatcaggacctgatccgcaagggtcaggccaacaaggtgaagaaactctccatcgttgtctccctggggacagggaggtccccacaagtgcctgtgacctgtgtggatgtcttccgtcccagcaacccctgggagctg

SEQ ID NO: 13342 - DNA, 8507 bp, Homo sapiens
aaactgaacagaaacctgatacaggtcacatcagatataattacattcaaatcagcccaactagctgagtggcgggaatgctcttgagctcaaataaaccagaaagtccgagtttccgagtgcacttccctgcatgtgcacttaggtccccctgccaccttgtaccacacctgctcacctctgctcaccctggccctctcctgcagctgtgccaattgcgcggagaacgaggagggctgcacacccctgcacctggcctgccgcaagggtgatggggagatcctggtggagctggtgcagtactgccacactcagatggatgtcaccgactacaagggagagaccgtcttccattatgctgtccagggtgacaattctcaggtgctgcaggtgagcagggggaggggcagggtgactggtactgatacctcccggtgtccacggttccctttgggcccctaggctcaggtgtcactctcaggcctctcactgtcccccattggtccttgaggcctgagctccttcatggagggtgcagacccctccctggctcttccctcccagcccttttccaggagccacgtcctcagtctctttgcttgataaacctggggacggcctccaacccagcaaaataaaccccaaaaaaggcccagctccagtcagttagttcagttccacttttcctgagcacaaactgtgagccagatgcctgcctggaggggctcgtgggccagcgggacctgggcttaaccttttgcaagcttgtccaatctgtggccctgcaggctgcatgcagcccaggacggctttgaatgtggcccaacacaaattcacaaactttcttaaaacattatgagatccatgcatggaccttttttttagatcagctgttgttagcgttcatgtattttatgtgtgacccaagacaattcttctgatgtggcccagggaggccaaaatattggacaaccctattttacaggaattcaaaccaagcaaaccaaactgtctccagttcctgtaggcatttgtgccagaggccctcctgttaacgtttttgattacctgggcaaaagatgtgattttttaattgtgggcaagcagatggggtgatactattaaatagctatttcatatattagattgaacagaaaaggcaggatgttggattatgttttattgtctagaattagaaaattcttctaaagatcatgttctctctgccttggcatcagaatgcaactacgttataccagaaaatgtggattcctttttttttttttttttttttttttttgagacagagtttccctatgtctcccaggctagagtgcagtggtgcgatctcggctcactgcaacctccacctcctgggttgaagtgatgctcgtgcctcagcttcctgagtagctgggattacaggcatgtgccaccatgcctgggtagtttccgtatttttagtagggatggggttttgccatgttgcccaggctggtctccaactcctggccttaagtgatccacctgcctcagcctcccaaaatgccgggattacaggtgtgagccactgtgcccggcccagaaaatgtggattcatatcttatgcttcttgctctcagggaagggaattctccacccactgttgaactccactttcaccgagaatcctctgcgcacccagcatggtgccgcgcagaccctgcctccatgcgggggtgtgcacacccgcttctcgatagtcatgcacgactgcagctgtcctttatccggtgctgattggtgcctgaccttgaactgagtgttgtatgtgttccagttaattcttagaatacactcatggggtggaggtcattattcccctttcctctccgaagaaactgaggttcagtgttgttaattaagaagcgtgcccagggagggccacaaagctgagagagtggggcttgaccttacattggcctcgatgccagccctttgctcttcctgctgtgtctctggcctgccttcaggtccagtgggactgctgtgaggtgaccctggtgtcacatgggtacactgtggttgtaatgaacctcatggggacagcactgagccaaaagtgagacagtaaaaccctcctagcactttcttttttttgagacagcatctagctctgtcgcccaggctggagtgcagtggtgtgattgtggctcactgcagcctcaacctcctggactcaggtgatcctcccacctcagcctcctgagcagctgggactacaggctcgtgccaccacatgggctaattttttttttttttgagacggagtcttgctctgtcgcccaggctggagtgcagtggcgcgatcttggctcactgcaagctctgcctcccgggttcatgccatcctcctgcctcagcctccagagtagctgggactacaggcgcccgccaccacacccggctaattttttttgtatttttagtagagacagggtttcaccgtgttcgccaggatggtcttggtctcctgaccttgtgatccgcctgcctcggcctcccaaagtgctgggattacaggcgtgagccaccacacccaggccacgccagctaatttttaaaatttttttggtaaagatggggtctccctatgttgccgaggctggtatcacactcttggtctcaagtgatcctctcacctcccagtgtgttggaattacaagcatgagccactgcgcctggcccctggctctctttttaatactgctgttctttcattgaaaacatagtacctgcatgtagaaaaaaatcagtcaggacagaatgaaaagcaagaatcattcccacctggacccccagtgcccatcctgagatacagctaccttttaagttccttgactcagaaatgtttcatgtgagccacagtcatgccaggtcgaccccttccctcccatccacactggcacttggctttcctggtgcttctctttacgttctttttttttagacagagtttttgctctattgcccaggctagagtgcaatgatgcaatctcagctcactgcaacctctgcctcctgggttcaagcgattctctttcctcaggttcctgagtagctgggattacaggtgcctgccaccatgcccggctaatttttgtatcgttagaagagacgacatttcaccatgttggccaggctggtctcaaactcttgacctcaggtgatccacccaccttggcctcccaaagtgctaggattacaggcatgagccactgcgcccggcctctttacgttcttatcagcatcctatggagtcaaacttcccttcctctttcatcagctccttggaaggaacgcagtggctggcctgaaccaggtgaataaccaagggctgaccccgctgcacctggcctgccagctggggaagcaggagatggtccgcgtgctgctgctgtgcaatgctcggtgcaacatcatgggccccaacggctaccccatccactcggccatgaagttctctcagaaggggtaagacctcctcccctccccatctgctggcctgctgggctccagctctcctgtcacctgtcccgtgcctgaggcaagcagtatccaccatagatcttagcatctccagcctcagagcagaggccccgggttcacaagcctcattaggccccgcctggcccaaagaaggtgctccatcattgtatcatgggtaggaatctcggttcacaagttcagctgtgcaaggaggagactttaaaatttttctggctgggcgcggtgtctcacgcctgtaatcccaacactttgggaggctgaggtgggcagatcacctgaggtcgggagttcgagaccagcctgaccaacatgaagaaaccccatctctactaaaaaatacaaaattagctgggcgtggtgacacatgcctgtaatcccagctacttggaaggctgaggcaggagaatcggttgaacccgggaggcggaggttgcagtgagccgagatcgcaccgttgcactccagcctgggcaataagagcgaaactgtctcaaaaaataaataaataaataaataaataaataaataaaaataaatttatttaatgtaccttaattcctaggagtgaatctccctctataaaactggagacaaccaatcttagccctctttggggtctcctctttccagctcccctccaggtggtgctccagttctggagtctgatgcaaccccaaggcccacctggcccctcctctaacccagcccagcctgatctgaacagccccccgatggcttcagtgctccttggtttcttgtgtgcccagctcaaagcctgggaaatgcttggtaaggtggccgagtgcccgtccacctagatgcctctttcctttctggctggtggcacgttgggaggcaggtacaggctcatgttttgggagcctgggaacccctggtgtcaggaaaattgtcttcaaaggggtaggggatgagataaaaagataaatgaatatctcaaatctcaaaatactatctaggccaggcgcggtggctcacacctgtaatcccagcagtttgggaggccaaggtgggtggatcacctgaagtcaggagttcgagaccagcctgaccaatatggtgaaaccctgtctctactaaaaatacaaaaattagccaggtgtggtggtgtgtgcctgtagtcccagctactcaggaggctgagacaggagaattgtttgaaactgggaggcagaggttgcagtgatttgagattgtgccacagcactccagccagggcgacagaacaagactccatctcaagaaaaaaaatactatctaacaggaacaacatctagaatgaatgaatgagccaatgagtccttcgatcctggcactgtgctaaagcaccagcctcaccgaaatgaataagccactccaggacaggagacaccccagccacccagaatctcatagcgcagtgccagacaagcagtgagaaggcatggacgggcagcactcaggcagggaggctggcacttgtgcctgtcctcaggttgttccttcctctgggagctgcatccaccttgctagccccatggggcattgctagcccttctaagggctggaccaagcctggacaaaccctcctttccttgaatctcccaagcacagccagaatgagctagagctttcagaaatacttgaccaaacagagaagataccaacacccccagccccgcagtcaggttccccatttgcaggttgtgacctgagtggacaccaggtgatgctcttctctacccagagggctggcacatggccccactcttgcttgtctccagccaccctgagctgtactgggcaggagctgtaattgaccagttttctctctcttcaaacaacctcagccctcaccggtccctctgtccccacacaggccatcctgggtgggtccagcgtcccatcacataagaggatctttgcacagaagacaaaggaagaggctcctaccttgagtggagcagggagatcccttatcgacttggcagccagcacagccctactccaagaatcccacggcctcagtgttactgacaagtggttccctcacagctcagactaggagctccctcgctgtttttctttttcttttcttttctttgttttgtttttgagacagagtttcactctgtcacccaggctggagtgcaatggcatgatcttggctcactgcaacctctgcctcccaggttcaactgattctcctgcctcagcctcccaaggagctgggattacaggtgtgcgccactatgcccagctaatttttgtatttttagtagagatggggtttcatcatgttgaccaggctagtcttgaactcctgacctcaggtgatctacttgcctcgccctcccaacatgctgggattacaggcgtgagccaccgcgcctggccacctctgctgtttttcaatgcagctgacctttcccacaaagctcggtttgtgcctgcggttctcagatggttaagcccctgctgaggaagggaaacagataatcccagacagtgagatggaggctgagactgaggatgcctgggggctgcactaggagctcagagacggcatcaggcagctggagttcagggaaggtttgggggcagcagagcccgagccaagccatggacactagccggagctggccactcgggtgaagacttggggggctccagagggcccagggaaagaagctgggcctgactccatgtgcctagtgctgagcaccaagcgctggcataagggctgtagggagctgggcagcataaatcctgggcctgtgctgggcacccctaataatagagaacagcagctgaacactaacgctgtcccagccaccggcttagccttcatgtgggctatttcactatagcccagagagctgatgtattttattccccctctaaagctgagggccaagtgtggtggctcatgcctctaatcccagcactttgggaggctgaggcaggaggatcgcttgagcctaggagtttgaggctacagtgagctatgatcatgccattgccctccagcctgggtgacaaagggaaatcctgtctcaaacaaacaaacaaaaaacagatgaggaaaccagggcttagagagattaagtaatttgctcaaagtcaggcagtcagtaagtgccagacctgggaattaaacccatgtgggctgtcctagtaattgcactaaaaaaaaaaaaaaaaaaaagctttattgagatatagttcctattccatacaatccacctattgaaagtatacaatgattctgatatattatgtttattttttccaactgtgatagattatatataacataaaatttgccattttaaccacttttgttttttgtttttgagacagagtttcgctctcgttgctcaggctggagtgcaatggtgtgatctcggcttaccgttacctccacctcccgggttcaagtgattctcctgcctcagcctcccgagtagtagctgggattacaggcatgcaccaccatgcccagttaattttgtattttttagtagagacagggtttctccatgttggtcaggctggtctcgaactcccgacctcaggtgatccacccaccttggcctcccaaagtgctgggattacaggcgtgagccaccacacccggcccattttaaccacttttaagtgtacaattcggtggttttaatcacatttacaatgttgtccaaccattacccctttctaaaacttttcttatcacctcaaacagaaactgtaaccattaataactcccgattctcccctccccacagcccccgataagtcccatatcctctctgtctctcagaacttgcctgttctagaacctcgtatcagtgaaatcatacagcgtttgtccttttgtgcctggcttatttcacttagcatgatgtcttcaaggctcatccatgttgcagcacgtatcagaatttcctttctttttaaggcagaatactattttgtttatccattcagtccttcactgatagacgcctgggttgtttccaccttttgtctgttgtgaagaatgctgctgtgtacatgggtctgcaaatgtccattcaagtccctgcattccgtcctttgatacttccgacctcaggtgatccgcctgcctcagcctcccaaagtgttgggattacaggcgtgagacaccgcgcccagccagaaaaattttaaagtcttctccttgcacagctgaacttgtgaaccgagattcctacccatgatacaatgatggagcactttctttgggccaggcggggcctaatgaggcttgtgaacccggggcctctgctctgaggctggagatgctaagatctctggtggacactgcttgcctcaggcaccgagtagaaagcaattgtgctctttcccactctgtcatactgcttcctatagcatgcaggtcactgtgtgactcactgacagtgtggtaaggaggtggagggtggctgtgtgccaggcacagaactgggctctgaaatgcctggtcttccttacaccccagccactcctctcagcactctctccatgttgctcagcttctggaggccaccagtgaggaagctggggcttgacttcaagcccatctgactctaaagccagtaccagggagggtgatcattgctggtggcagcatcaggaaggcttcctggaggagggggttagttgtgccttgaggggctcagtacagccttaaccatggtgagtgtgctggttgggtttgctgaactttgtttgcagtgatgctctctgtaagcagtagatgaagctccaagtcctggcttcatcccacgccacgcagaccctagcttctgctcaccaaccggggcccctctctcaccaggtgtgcggagatgatcatcagcatggacagcagccagatccacagcaaagacccccgttacggagccagccccctccactgggccaagaacgcagag

SEQ ID NO: 13343 - DNA, 675 bp, Homo sapiens
aaactgaacagaaacctgatacaggtcacatcagatataattacattcaaatcagcccaactagctgagtggcgggaatgctcttgagctcaaataaaccagaaagtccgagtttccgagtgcacttccctgcatgtgcacttaggtccccctgccaccttgtaccacacctgctcacctctgctcaccctggccctctcctgcagctgtgccaattgcgcggagaacgaggagggctgcacacccctgcacctggcctgccgcaagggtgatggggagatcctggtggagctggtgcagtactgccacactcagatggatgtcaccgactacaagggagagaccgtcttccattatgctgtccagggtgacaattctcaggtgctgcagctccttggaaggaacgcagtggctggcctgaaccaggtgaataaccaagggctgaccccgctgcacctggcctgccagctggggaagcaggagatggtccgcgtgctgctgctgtgcaatgctcggtgcaacatcatgggccccaacggctaccccatccactcggccatgaagttctctcagaaggggtgtgcggagatgatcatcagcatggacagcagccagatccacagcaaagacccccgttacggagccagccccctccactgggccaagaacgcagag

SEQ ID NO: 13344 - DNA, 595 bp, Homo sapiens
accaccacctctccctggcttcttcccttggaagccagcagagctgacctccagggtctgcaggttcatgacgtcttctggaggcataaggagagaggtgactcttgagggactgacaactgccttgtccagtcagcagccacaaccctccaacgtccccctccctggccccaccagtccactccagagacatcctgtagaaggcccacccgctggcatgggctcctttctggctgctgagccattctgctcgctctgtgaggacagggaaaaaatgtgttttcctagctcttggcagtcagcactgctggagcctcctccctgctggaaggggagcaaggctggaagaaccaagcaccacagagaagcaacggcctggggttccagccccagttcagacagagggggaagacggtggggcctccccacctgccccgcagaagatgcagttctttggccgcctggtcaataccttcagtggcgtcaccaacttgttctctaacccattccgggtgaaggaggtggctgtggccgactacacctcgagtgaccgagttcgggaggaagggcagctgattctgttccagaacactcc

SEQ ID NO: 13345 - DNA, 2870 bp, Homo sapiens
tttgcggaagtaggaggaagtagaagtgctgagtaagccgagagggggaagacggtggggcctccccacctgccccgcagaagatgcagttctttggccgcctggtcaataccttcagtggcgtcaccaacttgttctctaacccattccgggtgaaggaggtggctgtggccgactacacctcgagtgaccgagttcgggaggaagggcagctgattctgttccagaacactcccaaccgcacctgggactgcgtcctggtcaaccccaggaactcacagagtggattccgactcttccagctggagttggaggctgacgccctagtgaatttccatcagtattcttcccagctgctacccttctatgagagctcccctcaggtcctgcacactgaggtcctgcagcacctgaccgacctcatccgtaaccaccccagctggtcagtggcccacctggctgtggagctagggatccgcgagtgcttccatcacagccgtatcatcagctgtgccaattgcgcggagaacgaggagggctgcacacccctgcacctggcctgccgcaagggtgatggggagatcctggtggagctggtgcagtactgccacactcagatggatgtcaccgactacaagggagagaccgtcttccattatgctgtccagggtgacaattctcaggtgctgcaggtgtgcggagatgatcatcagcatggacagcagccagatccacagcaaagacccccgttacggagccagccccctccactgggccaagaacgcagagatggcccgcatgctgctgaaacggggctgcaacgtgaacagcaccagctccgcggggaacacggccctgcacgtggcggtgatgcgcaaccgcttcgactgtgccatagtgctgctgacccacggggccaacgcggatgcccgcggagagcacggcaacaccccgctgcacctggccatgtcgaaagacaacgtggagatgatcaaggccctcatcgtgttcggagcagaagtggacaccccgaatgactttggggagactcctacattcctagcctccaaaatcggcagacttgtcaccaggaaggcgatcttgactctgctgagaaccgtgggggccgaatactgcttcccacccatccacggggtccccgcggagcagggctctgcagcgccacatcatcccttctccctggaaagagctcagcccccaccgatcagcctaaacaacctagaactacaggatctcatgcacatctcacgggcccggaagccagcgttcatcctgggctccatgagggacgagaagcggacccacgaccacctgctgtgcctggatggaggaggagtgaaaggcctcatcatcatccagctcctcatcgccatcgagaaggcctcgggtgtggccaccaaggacctgtttgactgggtggcgggcaccagcactggaggcatcctggccctggccattctgcacagtaagtccatggcctacatgcgcggcatgtactttcgcatgaaggatgaggtgttccggggctccaggccctacgagtcggggcccctggaggagttcctgaagcgggagtttggggagcacaccaagatgacggacgtcaggaaacccaaggtgatgctgacagggacactgtctgaccggcagccggctgaactccacctcttccggaactacgatgctccagaaactgtccgggagcctcgtttcaaccagaacgttaacctcaggcctccagctcagccctcagaccagctggtgtggcgggcggcccgaagcagcggggcagctcctacttacttccgacccaatgggcgcttcctggacggtgggctgctggccaacaaccccacgctggatgccatgaccgagatccatgagtacaatcaggacctgatccgcaagggtcaggccaacaaggtgaagaaactctccatcgttgtctccctggggacagggaggtccccacaagtgcctgtgacctgtgtggatgtcttccgtcccagcaacccctgggagctggccaagactgtttttggggccaaggaactgggcaagatggtggtggactgttgcacggatccagacgggcgggctgtggaccgggcacgggcctggtgcgagatggtcggcatccagtacttcagattgaacccccagctggggacggacatcatgctggatgaggtcagtgacacagtgctggtcaacgccctctgggagaccgaggtctacatctatgagcaccgcgaggagttccagaagctcatccagctgctgctctcaccctgagggtccccagcctctcaccggccccagctgacctcgtccattcagcccctgccaggccaagcccagccactgccctcccgggcagatctgggcccaggcacctctgagtccatagaccaggcctgggagaatgccaagctgcctgcccgaggctggtcctgaaggcctgtctcccactaaccccgccttccagcactttctgtcattccaggctgggaaagtctagagccccctttggcccctttccctgactgtcaaggacaactgactcccccatcagctcaaacattaagggtacccgggcacaaccgtacccctgcccccagccccagcctccctgagggcctgccgggctgcctctgccccagcccccagcaagggcactcccaggcttcctggtgggtgcagcccactccctctgccctctgctccgttccctgggggctgggactaaagaaatgggtgtcccccaccccatcagctgggaaagcccaggccgcaggagtgggatgcccgttggactttgcccctcacactggcccagcccctcacac

SEQ ID NO: 13346 - DNA, 3195 bp, Homo sapiens
gccacgagcgtggcgggcccgcgggcggcggccacggagcgcgcgaagccctgcagcgcctcgcacttgccgcgcagcgcgtcgagctccaggcgcatggcggcgttctcgcgcgccagcttgtccacctcgcgctccagctccgacttctgcttctgcagctcctccttctggcacacgcgcttcacgcggcagctggcggcgtagccacggtttttgagtgtgcggcgccgctgcttgagccgtgtcacctcctcggcggagagcccgcgcagatgccggttcagctcgcgcaccgacagccccatcagcgcctcgtccgacagagggggaagacggtggggcctccccacctgccccgcagaagatgcagttctttggccgcctggtcaataccttcagtggcgtcaccaacttgttctctaacccattccgggtgaaggaggtggctgtggccgactacacctcgagtgaccgagttcgggaggaagggcagctgattctgttccagaacactcccaaccgcacctgggactgcgtcctggtcaaccccaggaactcacagagtggattccgactcttccagctggagttggaggctgacgccctagtgaatttccatcagtattcttcccagctgctacccttctatgagagctcccctcaggtcctgcacactgaggtcctgcagcacctgaccgacctcatccgtaaccaccccagctggtcagtggcccacctggctgtggagctagggatccgcgagtgcttccatcacagccgtatcatcagctgtgccaattgcgcggagaacgaggagggctgcacacccctgcacctggcctgccgcaagggtgatggggagatcctggtggagctggtgcagtactgccacactcagatggatgtcaccgactacaagggagagaccgtcttccattatgctgtccagggtgacaattctcaggtgctgcagctccttggaaggaacgcagtggctggcctgaaccaggtgaataaccaagggctgaccccgctgcacctggcctgccagctggggaagcaggagatggtccgcgtgctgctgctgtgcaatgctcggtgcaacatcatgggccccaacggctaccccatccactcggccatgaagttctctcagaaggggtgtgcggagatgatcatcagcatggacagcagccagatccacagcaaagacccccgttacggagccagccccctccactgggccaagaacgcagagatggcccgcatgctgctgaaacggggctgcaacgtgaacagcaccagctccgcggggaacacggccctgcacgtggcggtgatgcgcaaccgcttcgactgtgccatagtgctgctgacccacggggccaacgcggatgcccgcggagagcacggcaacaccccgctgcacctggccatgtcgaaagacaacgtggagatgatcaaggccctcatcgtgttcggagcagaagtggacaccccgaatgactttggggagactcctacattcctagcctccaaaatcggcagacttgtcaccaggaaggcgatcttgactctgctgagaaccgtgggggccgaatactgcttcccacccatccacggggtccccgcggagcagggctctgcagcgccacatcatcccttctccctggaaagagctcagcccccaccgatcagcctaaacaacctagaactacaggatctcatgcacatctcacgggcccggaagccagcgttcatcctgggctccatgagggacgagaagcggacccacgaccacctgctgtgcctggatggaggaggagtgaaaggcctcatcatcatccagctcctcatcgccatcgagaaggcctcgggtgtggccaccaaggacctgtttgactgggtggcgggcaccagcactggaggcatcctggccctggccattctgcacagtaagtccatggcctacatgcgcggcatgtactttcgcatgaaggatgaggtgttccggggctccaggccctacgagtcggggcccctggaggagttcctgaagcgggagtttggggagcacaccaagatgacggacgtcaggaaacccaaggtgatgctgacagggacactgtctgaccggcagccggctgaactccacctcttccggaactacgatgctccagaaactgtccgggagcctcgtttcaaccagaacgttaacctcaggcctccagctcagccctcagaccagctggtgtggcgggcggcccgaagcagcggggcagctcctacttacttccgacccaatgggcgcttcctggacggtgggctgctggccaacaaccccacgctggatgccatgaccgagatccatgagtacaatcaggacctgatccgcaagggtcaggccaacaaggtgaagaaactctccatcgttgtctccctggggacagggaggtccccacaagtgcctgtgacctgtgtggatgtcttccgtcccagcaacccctgggagctggccaagactgtttttggggccaaggaactgggcaagatggtggtggactgttgcacggatccagacgggcgggctgtggaccgggcacgggcctggtgcgagatggtcggcatccagtacttcagattgaacccccagctggggacggacatcatgctggatgaggtcagtgacacagtgctggtcaacgccctctgggagaccgaggtctacatctatgagcaccgcgaggagttccagaagctcatccagctgctgctctcaccctgagggtccccagcctctcaccggccccagctgacctcgtccattcagcccctgccaggccaagcccagccactgccctcccgggcagatctgggcccaggcacctctgagtccatagaccaggcctgggagaatgccaagctgcctgcccgaggctggtcctgaaggcctgtctcccactaaccccgccttccagcactttctgtcattccaggctgggaaagtctagagccccctttggcccctttccctgactgtcaaggacaactgactcccccatcagctcaaacattaagggtacccgggcacaaccgtacccctgcccccagccccagcctccctgagggcctgccgggctgcctctgccccagcccccagcaagggcactcccaggcttcctggtgggtgca

SEQ ID NO: 13347 - DNA, 3171 bp, Homo sapiens
gtttgcggaagtaggaggaagtagaagtgctgagtaagccgagagggggaagacggtggggcctccccacctgccccgcagaagatgcagttctttggccgcctggtcaataccttcagtggcgtcaccaacttgttctctaacccattccgggtgaaggaggtggctgtggccgactacacctcgagtgaccgagttcgggaggaagggcagctgattctgttccagaacactcccaaccgcacctgggactgcgtcctggtcaaccccaggaactcacagagtggattccgactcttccagctggagttggaggctgacgccctagtgaatttccatcagtattcttcccagctgctacccttctatgagagctcccctcaggtcctgcacactgaggtcctgcagcacctgaccgacctcatccgtaaccaccccagctggtcagtggcccacctggctgtggagctagggatccgcgagtgcttccatcacagccgtatcatcagctgtgccaattgcgcggagaacgaggagggctgcacacccctgcacctggcctgccgcaagggtgatggggagatcctggtggagctggtgcagtactgccacactcagatggatgtcaccgactacaagggagagaccgtcttccattatgctgtccagggtgacaattctcaggtgctgcagctccttggaaggaacgcagtggctggcctgaaccaggtgaataaccaagggctgaccccgctgcacctggcctgccagctggggaagcaggagatggtccgcgtgctgctgctgtgcaatgctcggtgcaacatcatgggccccaacggctaccccatccactcggccatgaagttctctcagaaggggtgtgcggagatgatcatcagcatggacagcagccagatccacagcaaagacccccgttacggagccagccccctccactgggccaagaacgcagagatggcccgcatgctgctgaaacggggctgcaacgtgaacagcaccagctccgcggggaacacggccctgcacgtggcggtgatgcgcaaccgcttcgactgtgccatagtgctgctgacccacggggccaacgcggatgcccgcggagagcacggcaacaccccgctgcacctggccatgtcgaaagacaacgtggagatgatcaaggccctcatcgtgttcggagcagaagtggacaccccgaatgactttggggagactcctacattcctagcctccaaaatcggcagacttgtcaccaggaaggcgatcttgactctgctgagaaccgtgggggccgaatactgcttcccacccatccacggggtccccgcggagcagggctctgcagcgccacatcatcccttctccctggaaagagctcagcccccaccgatcagcctaaacaacctagaactacaggatctcatgcacatctcacgggcccggaagccagcgttcatcctgggctccatgagggacgagaagcggacccacgaccacctgctgtgcctggatggaggaggagtgaaaggcctcatcatcatccagctcctcatcgccatcgagaaggcctcgggtgtggccaccaaggacctgtttgactgggtggcgggcaccagcactggaggcatcctggccctggccattctgcacagtaagtccatggcctacatgcgcggcatgtactttcgcatgaaggatgaggtgttccggggctccaggccctacgagtcggggcccctggaggagttcctgaagcgggagtttggggagcacaccaagatgacggacgtcaggaaacccaaggtgatgctgacagggacactgtctgaccggcagccggctgaactccacctcttccggaactacgatgctccagaaactgtccgggagcctcgtttcaaccagaacgttaacctcaggcctccagctcagccctcagaccagctggtgtggcgggcggcccgaagcagcggggcagctcctacttacttccgacccaatgggcgcttcctggacggtgggctgctggccaacaaccccacgctggatgccatgaccgagatccatgagtacaatcaggacctgatccgcaagggtcaggccaacaaggtgaagaaactctccatcgttgtctccctggggacagggaggtccccacaagtgcctgtgacctgtgtggatgtcttccgtcccagcaacccctgggagctggccaagactgtttttggggccaaggaactgggcaagatggtggtggactgttgcacggatccagacgggcgggctgtggaccgggcacgggcctggtgcgagatggtcggcatccagtacttcagattgaacccccagctggggacggacatcatgctggatgaggtcagtgacacagtgctggtcaacgccctctgggagaccgaggtctacatctatgagcaccgcgaggagttccagaagctcatccagctgctgctctcaccctgagggtccccagcctctcaccggccccagctgacctcgtccattcagcccctgccaggccaagcccagccactgccctcccgggcagatctgggcccaggcacctctgagtccatagaccaggcctgggagaatgccaagctgcctgcccgaggctggtcctgaaggcctgtctcccactaaccccgccttccagcactttctgtcattccaggctgggaaagtctagagccccctttggcccctttccctgactgtcaaggacaactgactcccccatcagctcaaacattaagggtacccgggcacaaccgtacccctgcccccagccccagcctccctgagggcctgccgggctgcctctgccccagcccccagcaagggcactcccaggcttcctggtgggtgcagcccactccctctgccctctgctccgttccctgggggctgggactaaagaaatgggtgtcccccaccccatcagctgggaaagcccaggccgcaggagtgggatgcccgttggactttgcccctcacactggcccagcccctcacactgccccaccccgagaaccctcagctctcaaaggtcactcctgggagtttcttcttcccaatggaagtggcttaagagccaaaactgaaataaatcatttggattcaagttca

SEQ ID NO: 13348 - DNA, 2959 bp, Homo sapiens
ggcccgtttgtttgcggaagtaggaggaagtagaagtgctgagtaagccgagacagagggggaagacggtggggcctccccacctgccccgcagaagatgcagttctttggccgcctggtcaataccttcagtggcgtcaccaacttgttctctaacccattccgggtgaaggaggtggctgtggccgactacacctcgagtgaccgagttcgggaggaagggcagctgattctgttccagaacactcccaaccgcacctgggactgcgtcctggtcaaccccaggaactcacagagtggattccgactcttccagctggagttggaggctgacgccctagtgaatttccatcagtattcttcccagctgctacccttctatgagagctcccctcaggtcctgcacactgaggtcctgcagcacctgaccgacctcatccgtaaccaccccagctggtcagtggcccacctggctgtggagctagggatccgcgagtgcttccatcacagccgtatcatcagctgtgccaattgcgcggagaacgaggagggctgcacacccctgcacctggcctgccgcaagggtgatggggagatcctggtggagctggtgcagtactgccacactcagatggatgtcaccgactacaagggagagaccgtcttccattatgctgtccagggtgacaattctcaggtgctgcagctccttggaaggaacgcagtggctggcctgaaccaggtgaataaccaagggctgaccccgctgcacctggcctgccagctggggaagcaggagatggtccgcgtgctgctgctgtgcaatgctcggtgcaacatcatgggccccaacggctaccccatccactcggccatgaagttctctcagaaggggtgtgcggagatgatcatcagcatggacagcagccagatccacagcaaagacccccgttacggagccagccccctccactgggccaagaacgcagagatggcccgcatgctgctgaaacggggctgcaacgtgaacagcaccagctccgcggggaacacggccctgcacgtggcggtgatgcgcaaccgcttcgactgtgccatagtgctgctgacccacggggccaacgcggatgcccgcggagagcacggcaacaccccgctgcacctggccatgtcgaaagacaacgtggagatgatcaaggccctcatcgtgttcggagcagaagtggacaccccgaatgactttggggagactcctacattcctagcctccaaaatcggcagaccatgccctgctctgtgcctcacagaactacaggatctcatgcacatctcacgggcccggaagccagcgttcatcctgggctccatgagggacgagaagcggacccacgaccacctgctgtgcctggatggaggaggagtgaaaggcctcatcatcatccagctcctcatcgccatcgagaaggcctcgggtgtggccaccaaggacctgtttgactgggtggcgggcaccagcactggaggcatcctggccctggccattctgcacagtaagtccatggcctacatgcgcggcatgtactttcgcatgaaggatgaggtgttccggggctccaggccctacgagtcggggcccctggaggagttcctgaagcgggagtttggggagcacaccaagatgacggacgtcaggaaacccaaggtgatgctgacagggacactgtctgaccggcagccggctgaactccacctcttccggaactacgatgctccagaaactgtccgggagcctcgtttcaaccagaacgttaacctcaggcctccagctcagccctcagaccagctggtgtggcgggcggcccgaagcagcggggcagctcctacttacttccgacccaatgggcgcttcctggacggtgggctgctggccaacaaccccacgctggatgccatgaccgagatccatgagtacaatcaggacctgatccgcaagggtcaggccaacaaggtgaagaaactctccatcgttgtctccctggggacagggaggtccccacaagtgcctgtgacctgtgtggatgtcttccgtcccagcaacccctgggagctggccaagactgtttttggggccaaggaactgggcaagatggtggtggactgttgcacggatccagacgggcgggctgtggaccgggcacgggcctggtgcgagatggtcggcatccagtacttcagattgaacccccagctggggacggacatcatgctggatgaggtcagtgacacagtgctggtcaacgccctctgggagaccgaggtctacatctatgagcaccgcgaggagttccagaagctcatccagctgctgctctcaccctgagggtccccagcctctcaccggccccagctgacctcgtccattcagcccctgccaggccaagcccagccactgccctcccgggcagatctgggcccaggcacctctgagtccatagaccaggcctgggagaatgccaagctgcctgcccgaggctggtcctgaaggcctgtctcccactaaccccgccttccagcactttctgtcattccaggctgggaaagtctagagccccctttggcccctttccctgactgtcaaggacaactgactcccccatcagctcaaacattaagggtacccgggcacaaccgtacccctgcccccagccccagcctccctgagggcctgccgggctgcctctgccccagcccccagcaagggcactcccaggcttcctggtgggtgcagcccactccctctgccctctgctccgttccctgggggctgggactaaagaaatgggtgtcccccaccccatcagctgggaaagcccaggccgcaggagtgggatgcccgttggactttgcccctcacactggcccagcccctcacactgccccaccccgagaaccctcagct

SEQ ID NO: 13349 - DNA, 2807 bp, Homo sapiens
gtttgtttgcggaagtaggaggaagtagaagtgctgagtaagccgagagggggaagacggtggggcctccccacctgccccgcagaagatgcagttctttggccgcctggtcaataccttcagtggcgtcaccaacttgttctctaacccattccgggtgaaggaggtggctgtggccgactacacctcgagtgaccgagttcgggaggaagggcagctgattctgttccagaacactcccaaccgcacctgggactgcgtcctggtcaaccccaggaactcacagagtggattccgatcacatgcccagtagttaactgttaatcaacgcactctctgtggaacaacaggctggtcccgttgagccaacactctctgggcactgccttcactagactctggctggctgctgcgcttgtagagactcttccagctggagttggaggctgacgccctagtgaatttccatcagtattcttcccagctgctacccttctatgagagctcccctcaggtcctgcacactgaggtcctgcagcacctgaccgacctcatccgtaaccaccccagctggtcagtggcccacctggctgtggagctagggatccgcgagtgcttccatcacagccgtatcatcagctgtgccaattgcgcggagaacgaggagggctgcacacccctgcacctggcctgccgcaagggtgatggggagatcctggtggagctggtgcagtactgccacactcagatggatgtcaccgactacaagggagagaccgtcttccattatgctgtccagggtgacaattctcaggtgctgcagctccttggaaggaacgcagtggctggcctgaaccaggtgaataaccaagggctgaccccgctgcacctggcctgccagctggggaagcaggagatggtccgcgtgctgctgctgtgcaatgctcggtgcaacatcatgggccccaacggctaccccatccactcggccatgaagttctctcagaaggggtgtgcggagatgatcatcagcatggacagcagccagatccacagcaaagacccccgttacggagccagccccctccactgggccaagaacgcagagatggcccgcatgctgctgaaacggggctgcaacgtgaacagcaccagctccgcggggaacacggccctgcacgtggcggtgatgcgcaaccgcttcgactgtgccatagtgctgctgacccacggggccaacgcggatgcccgcggagagcacggcaacaccccgctgcacctggccatgtcgaaagacaacgtggagatgatcaaggccctcatcgtgttcggagcagaagtggacaccccgaatgactttggggagactcctacattcctagcctccaaaatcggcagacaactacaggatctcatgcacatctcacgggcccggaagccagcgttcatcctgggctccatgagggacgagaagcggacccacgaccacctgctgtgcctggatggaggaggagtgaaaggcctcatcatcatccagctcctcatcgccatcgagaaggcctcgggtgtggccaccaaggacctgtttgactgggtggcgggcaccagcactggaggcatcctggccctggccattctgcacagtaagtccatggcctacatgcgcggcatgtactttcgcatgaaggatgaggtgttccggggctccaggccctacgagtcggggcccctggaggagttcctgaagcgggagtttggggagcacaccaagatgacggacgtcaggaaacccaaggtgatgctgacagggacactgtctgaccggcagccggctgaactccacctcttccggaactacgatgctccagaaactgtccgggagcctcgtttcaaccagaacgttaacctcaggcctccagctcagccctcagaccagctggtgtggcgggcggcccgaagcagcggggcagctcctacttacttccgacccaatgggcgcttcctggacggtgggctgctggccaacaaccccacgctggatgccatgaccgagatccatgagtacaatcaggacctgatccgcaagggtcaggccaacaaggtgaagaaactctccatcgttgtctccctggggacagggaggtccccacaagtgcctgtgacctgtgtggatgtcttccgtcccagcaacccctgggagctggccaagactgtttttggggccaaggaactgggcaagatggtggtggactgttgcacggatccagacgggcgggctgtggaccgggcacgggcctggtgcgagatggtcggcatccagtacttcagattgaacccccagctggggacggacatcatgctggatgaggtcagtgacacagtgctggtcaacgccctctgggagaccgaggtctacatctatgagcaccgcgaggagttccagaagctcatccagctgctgctctcaccctgagggtccccagcctctcaccggccccagctgacctcgtccattcagcccctgccaggccaagcccagccactgccctcccgggcagatctgggcccaggcacctctgagtccatagaccaggcctgggagaatgccaagctgcctgcccgaggctggtcctgaaggcctgtctcccactaaccccgccttccagcactttctgtcattccaggctgggaaagtctagagccccctttggcccctttccctgactgtcaaggacaactgactcccccatcagctcaaacattaagggtacccgggcacaaccgtacccctgcccccagccccagcc

SEQ ID NO: 13350 - DNA, 2813 bp, Homo sapiens
gtgctgagtaagccgagacagagggggaagacggtggggcctccccacctgccccgcagaagatgcagttctttggccgcctggtcaataccttcagtggcgtcaccaacttgttctctaacccattccgggtgaaggaggtggctgtggccgactacacctcgagtgaccgagttcgggaggaagggcagctgattctgttccagaacactcccaaccgcacctgggactgcgtcctggtcaaccccaggaactcacagagtggattccgactcttccagctggagttggaggctgacgccctagtgaatttccatcagtattcttcccagctgctacccttctatgagagctcccctcaggtcctgcacactgaggtcctgcagcacctgaccgacctcatccgtaaccaccccagctggtcagtggcccacctggctgtggagctagggatccgcgagtgcttccatcacagccgtatcatcagctgtgccaattgcgcggagaacgaggagggctgcacacccctgcacctggcctgccgcaagggtgatggggagatcctggtggagctggtgcagtactgccacactcagatggatgtcaccgactacaagggagagaccgtcttccattatgctgtccagggtgacaattctcaggtgctgcagctccttggaaggaacgcagtggctggcctgaaccaggtgaataaccaagggctgaccccgctgcacctggcctgccagctggggaagcaggagatggtccgcgtgctgctgctgtgcaatgctcggtgcaacatcatgggccccaacggctaccccatccactcggccatgaagttctctcagaaggggtgtgcggagatgatcatcagcatggacagcagccagatccacagcaaagacccccgttacggagccagccccctccactgggccaagaacgcagagatggcccgcatgctgctgaaacggggctgcaacgtgaacagcaccagctccgcggggaacacggccctgcacgtggcggtgatgcgcaaccgcttcgactgtgccatagtgctgctgacccacggggccaacgcggatgcccgcggagagcacggcaacaccccgctgcacctggccatgtcgaaagacaacgtggagatgatcaaggccctcatcgtgttcggagcagaagtggacaccccgaatgactttggggagactcctacattcctagcctccaaaatcggcagacttgtcaccaggaaggcgatcttgactctgctgagaaccgtgggggccgaatactgcttcccacccatccacggggtccccgcggagcagggctctgcagcgccacatcatcccttctccctggaaagagctcagcccccaccgatcagcctaaacaacctagaactacaggatctcatgcacatctcacgggcccggaagccagcgttcatcctgggctccatgagggacgagaagcggacccacgaccacctgctgtgcctggatggaggaggagtgaaaggcctcatcatcatccagctcctcatcgccatcgagaaggcctcgggtgtggccaccaaggacctgtttgactgggtggcgggcaccagcactggaggcatcctggccctggccattctgcacagtaagtccatggcctacatgcgcggcatgtactttcgcatgaaggatgaggtgttccggggctccaggccctacgagtcggggcccctggaggagttcctgaagcgggagtttggggagcacaccaagatgacggacgtcaggaaacccaaggtgatgctgacagggacactgtctgaccggcagccggctgaactccacctcttccggaactacgatgctccagaaactgtccgggagcctcgtttcaaccagaacgttaacctcaggcctccagctcagccctcagaccagctggtgtggcgggcggcccgaagcagcggggcagctcctacttacttccgacccaatgggcgcttcctggacggtgggctgctggccaacaaccccacgctggatgccatgaccgagatccatgagtacaatcaggacctgatccgcaagggtcaggccaacaaggtgaagaaactctccatcgttgtctccctggggacagggaggtccccacaagtgcctgtgacctgtgtggatgtcttccgtcccagcaacccctgggagctggccaagactgtttttggggccaaggaactgggcaagatggtggtggactgttgcacggatccagacgggcgggctgtggaccgggcacgggcctggtgcgagatggtcggcatccagtacttcagattgaacccccagctggggacggacatcatgctggatgaggtcagtgacacagtgctggtcaacgccctctgggagaccgaggtctacatctatgagcaccgcgaggagttccagaagctcatccagctgctgctctcaccctgagggtccccagcctctcaccggccccagctgacctcgtccattcagcccctgccaggccaagcccagccactgccctcccgggcagatctgggcccaggcacctctgagtccatagaccaggcctgggagaatgccaagctgcctgcccgaggctggtcctgaaggcctgtctcccactaaccccgccttccagcactttctgtcattccaggctgggaaagtctagagccccctttggcccctttccctgactgtcaaggacaactgactcccccatcagctcaaacattaagggtacccgggcacaaccgtacccctgcccccagcccc

SEQ ID NO: 13351 - DNA, 2499 bp, Homo sapiens
ggagagcggtggtcaggccatcacgtggcccgaggcccgtttgtttgcggaagtaggaggaagtagaagtgctgagtaagccgagacagagggggaagacggtggggcctccccacctgccccgcagaagatgcagttctttggccgcctggtcaataccttcagtggcgtcaccaacttgttctctaacccattccgggtgaaggaggtggctgtggccgactacacctcgagtgaccgagttcgggaggaagggcagctgattctgttccagaacactcccaaccgcacctgggactgcgtcctggtcaaccccaggaactcacagagtggattccgactcttccagctggagttggaggctgacgccctagtgaatttccatcagtattcttcccagctgctacccttctatgagagctcccctcaggtcctgcacactgaggtcctgcagcacctgaccgacctcatccgtaaccaccccagctggtcagtggcccacctggctgtggagctagggatccgcgagtgcttccatcacagccgtatcatcagctgtgccaattgcgcggagaacgaggagggctgcacacccctgcacctggcctgccgcaagggtgatggggagatcctggtggagctggtgcagtactgccacactcagatggatgtcaccgactacaagggagagaccgtcttccattatgctgtccagggtgacaattctcaggtgctgcagctccttggaaggaacgcagtggctggcctgaaccaggtgaataaccaagggctgaccccgctgcacctggcctgccagctggggaagcaggagatggtccgcgtgctgctgctgtgcaatgctcggtgcaacatcatgggccccaacggctaccccatccactcggccatgaagttctctcagaaggggtgtgcggagatgatcatcagcatggacagcagccagatccacagcaaagacccccgttacggagccagccccctccactgggccaagaacgcagagatggcccgcatgctgctgaaacggggctgcaacgtgaacagcaccagctccgcggggaacacggccctgcacgtggcggtgatgcgcaaccgcttcgactgtgccatagtgctgctgacccacggggccaacgcggatgcccgcggagagcacggcaacaccccgctgcacctggccatgtcgaaagacaacgtggagatgatcaaggccctcatcgtgttcggagcagaagtggacaccccgaatgactttggggagactcctacattcctagcctccaaaatcggcagacaactacaggatctcatgcacatctcacgggcccggaagccagcgttcatcctgggctccatgagggacgagaagcggacccacgaccacctgctgtgcctggatggaggaggagtgaaaggcctcatcatcatccagctcctcatcgccatcgagaaggcctcgggtgtggccaccaaggacctgtttgactgggtggcgggcaccagcactggaggcatcctggccctggccattctgcacagtaagtccatggcctacatgcgcggcatgtactttcgcatgaaggatgaggtgttccggggctccaggccctacgagtcggggcccctggaggagttcctgaagcgggagtttggggagcacaccaagatgacggacgtcaggaaacccaaggtcttgctgtggggcccatgctggagtatattgctgtgaacacggcttactgcagcctcgacctcctgggttcaagcagtcctcccatctcagccgcctgagtgcctgggactactagcatgtgccaacacatgtattttttgtagagatggggtttcaccatgttgtccaggctagtcttgaactcctgagctgaggcgatcctcccgccttggtttcccattacaggcatcagccaccatgcccagcctagtttgtgctttttatttctcgttcataaacccctttgctgcccccaagcagcacacgattctcctgtgtcgagctggaaagctctctagatctgccttttacattgaggtcttttatcaacctggaattgatttttgtatgagggtgaaatccaagatccaatttaatgttttccacgtgattggccaatttttcccagccccatctgtgaagtctgtccttccctccgcttcctcagcagtgggtcaagcatccctctgctcttggatctgctccaggctgtgttttgttccactggttggaaagctgtctctgtgcccggaccacagagcataaaaaactaccgctgtgtggtgagtcctggtgtctgggtggcagatcctccaccttggccttcttcaaaaacatcatggctattcttgggggcagtagagagaagtggatacaagcatagaccctgaagtttctacctcttctcaaaaataggaatatgccaggcatggtggctcaagcctgtaatcccagctctttgggag

SEQ ID NO: 13352 - DNA, 3283 bp, Homo sapiens
ggaagtaggaggaagtagaagtgctgagtaagccgagacagagggggaagacggtggggcctccccacctgccccgcagaagatgcagttctttggccgcctggtcaataccttcagtggcgtcaccaacttgttctctaacccattccgggtgaaggaggtggctgtggccgactacacctcgagtgaccgagttcgggaggaagggcagctgattctgttccagaacactcccaaccgcacctgggactgcgtcctggtcaaccccaggaactcacagagtggattccgacgcctgggctccagtccctgtgtcctgagccccatgaggctgttactggtgctgctcgtctgcccatcctctccagtaacagccacctgaacactgcaattcctgggtttccatcattccttccagcctgactcttccagctggagttggaggctgacgccctagtgaatttccatcagtattcttcccagctgctacccttctatgagagctcccctcaggtcctgcacactgaggtcctgcagcacctgaccgacctcatccgtaaccaccccagctggtcagtggcccacctggctgtggagctagggatccgcgagtgcttccatcacagccgtatcatcagctgtgccaattgcgcggagaacgaggagggctgcacacccctgcacctggcctgccgcaagggtgatggggagatcctggtggagctggtgcagtactgccacactcagatggatgtcaccgactacaagggagagaccgtcttccattatgctgtccagggtgacaattctcaggtgctgcagctccttggaaggaacgcagtggctggcctgaaccaggtgaataaccaagggctgaccccgctgcacctggcctgccagctggggaagcaggagatggtccgcgtgctgctgctgtgcaatgctcggtgcaacatcatgggccccaacggctaccccatccactcggccatgaagttctctcagaaggggtgtgcggagatgatcatcagcatggacagcagccagatccacagcaaagacccccgttacggagccagccccctccactgggccaagaacgcagagatggcccgcatgctgctgaaacggggctgcaacgtgaacagcaccagctccgcggggaacacggccctgcacgtggcggtgatgcgcaaccgcttcgactgtgccatagtgctgctgacccacggggccaacgcggatgcccgcggagagcacggcaacaccccgctgcacctggccatgtcgaaagacaacgtggagatgatcaaggccctcatcgtgttcggagcagaagtggacaccccgaatgactttggggagactcctacattcctagcctccaaaatcggcagacaactacaggatctcatgcacatctcacgggcccggaagccagcgttcatcctgggctccatgagggacgagaagcggacatgcagaacctgagcccctgagaggtgaagtgacttgctcaaggtcacacggaccacgaccacctgctgtgcctggatggaggaggagtgaaaggcctcatcatcatccagctcctcatcgccatcgagaaggcctcgggtgtggccaccaaggacctgtttgactgggtggcgggcaccagcactggaggcatcctggccctggccattctgcacagtaagtccatggcctacatgcgcggcatgtactttcgcatgaaggatgaggtgttccggggctccaggccctacgagtcggggcccctggaggagttcctgaagcgggagtttggggagcacaccaagatgacggacgtcaggaaacccaaggtgatgctgacagggacactgtctgaccggcagccggctgaactccacctcttccggaactacgatgctccagaaactgtccgggagcctcgtttcaaccagaacgttaacctcaggcctccagctcagccctcagaccagctggtgtggcgggcggcccgaagcagcggggcagctcctacttacttccgacccaatgggcgcttcctggacggtgggctgctggccaacaaccccacgctggatgccatgaccgagatccatgagtacaatcaggacctgatccgcaagcctgggacccagagtgggaggcatcacccaagatcatccagcaaatcggcagcagagcttgttcggaagcaaataagagaggcagcggccgggcgcagcggctcacgcctgtaatcccagcactttgggaggccgagggtcaggccaacaaggtgaagaaactctccatcgttgtctccctggggacagggaggtccccacaagtgcctgtgacctgtgtggatgtcttccgtcccagcaacccctgggagctggccaagactgtttttggggccaaggaactgggcaagatggtggtggactgttgcacggatccagacgggcgggctgtggaccgggcacgggcctggtgcgagatggtcggcatccagtacttcagattgaacccccagctggggacggacatcatgctggatgaggtcagtgacacagtgctggtcaacgccctctgggagaccgaggtctacatctatgagcaccgcgaggagttccagaagctcatccagctgctgctctcaccctgagggtccccagcctctcaccggccccagctgacctcgtccattcagcccctgccaggccaagcccagccactgccctcccgggcagatctgggcccaggcacctctgagtccatagaccaggcctgggagaatgccaagctgcctgcccgaggctggtcctgaaggcctgtctcccactaaccccgccttccagcactttctgtcattccaggctgggaaagtctagagccccctttggcccctttccctgactgtcaaggacaactgactcccccatcagctcaaacattaagggtacccgggcacaaccgtacccctgcccccagccccagcctccctgagggcctgccgggctgcctctgccccagcccccagcaagggcactcccaggcttcctggtgggtgcagcccactccctctgccctctgctccgttccctgggggctgggactaaagaaatgggtgtcccccaccccatcagctgggaaagcccaggccgcaggagtgggatgcccgttggactttgcccctcacactggcccagcccctcacactgccccaccccgagaaccctcagctctcaaaggtcactcctgggagtttcttcttcccaatggaagt

SEQ ID NO: 13353 - DNA, 2830 bp, Homo sapiens
cgccggaccctcctttggatattcctcgtgtctccgattctgagacagagggggaagacggtggggcctccccacctgccccgcagaagatgcagttctttggccgcctggtcaataccttcagtggcgtcaccaacttgttctctaacccattccgggtgaaggaggtggctgtggccgactacacctcgagtgaccgagttcgggaggaagggcagctgattctgttccagaacactcccaaccgcacctgggactgcgtcctggtcaaccccaggaactcacagagtggattccgactcttccagctggagttggaggctgacgccctagtgaatttccatcagtattcttcccagctgctacccttctatgagagctcccctcaggtcctgcacactgaggtcctgcagcacctgaccgacctcatccgtaaccaccccagctggtcagtggcccacctggctgtggagctagggatccgcgagtgcttccatcacagccgtatcatcagctgtgccaattgcgcggagaacgaggagggctgcacacccctgcacctggcctgccgcaagggtgatggggagatcctggtggagctggtgcagtactgccacactcagatggatgtcaccgactacaagggagagaccgtcttccattatgctgtccagggtgacaattctcaggtgctgcagctccttggaaggaacgcagtggctggcctgaaccaggtgaataaccaagggctgaccccgctgcacctggcctgccagctggggaagcaggagatggtccgcgtgctgctgctgtgcaatgctcggtgcaacatcatgggccccaacggctaccccatccactcggccatgaagttctctcagaaggggtgtgcggagatgatcatcagcatggacagcagccagatccacagcaaagacccccgttacggagccagccccctccactgggccaagaacgcagagatggcccgcatgctgctgaaacggggctgcaacgtgaacagcaccagctccgcggggaacacggccctgcacgtggcggtgatgcgcaaccgcttcgactgtgccatagtgctgctgacccacggggccaacgcggatgcccgcggagagcacggcaacaccccgctgcacctggccatgtcgaaagacaacgtggagatgatcaaggccctcatcgtgttcggagcagaagtggacaccccgaatgactttggggagactcctacattcctagcctccaaaatcggcagacaactacaggatctcatgcacatctcacgggcccggaagccagcgttcatcctgggctccatgagggacgagaagcggacccacgaccacctgctgtgcctggatggaggaggagtgaaaggcctcatcatcatccagctcctcatcgccatcgagaaggcctcgggtgtggccaccaaggacctgtttgactgggtggcgggcaccagcactggaggcatcctggccctggccattctgcacagtaagtccatggcctacatgcgcggcatgtactttcgcatgaaggatgaggtgttccggggctccaggccctacgagtcggggcccctggaggagttcctgaagcgggagtttggggagcacaccaagatgacggacgtcaggaaacccaaggtgatgctgacagggacactgtctgaccggcagccggctgaactccacctcttccggaactacgatgctccagaaactgtccgggagcctcgtttcaaccagaacgttaacctcaggcctccagctcagccctcagaccagctggtgtggcgggcggcccgaagcagcggggcagctcctacttacttccgacccaatgggcgcttcctggacggtgggctgctggccaacaaccccacgctggatgccatgaccgagatccatgagtacaatcaggacctgatccgcaaggcggcagagaccgtcagactgtcagacactagccagtctaactctcctattgcgtgcggatggggagcctgggacccagagtgggaggcatcacccaagatcatccagcaaatcggcagcagagcttgttcggaagcaaataagagaggcagcggccgggcgcagcggctcacgcctgtaatcccagcactttgggaggccgagggtcaggccaacaaggtgaagaaactctccatcgttgtctccctggggacagggaggtccccacaagtgcctgtgacctgtgtggatgtcttccgtcccagcaacccctgggagctggccaagactgtttttggggccaaggaactgggcaagatggtggtggactgttgcacggatccagacgggcgggctgtggaccgggcacgggcctggtgcgagatggtcggcatccagtacttcagattgaacccccagctggggacggacatcatgctggatgaggtcagtgacacagtgctggtcaacgccctctgggagaccgaggtctacatctatgagcaccgcgaggagttccagaagctcatccagctgctgctctcaccctgagggtccccagcctctcaccggccccagctgacctcgtccattcagcccctgccaggccaagcccagccactgccctcccgggcagatctgggcccaggcacctctgagtccatagaccaggcctgggagaatgccaagctgcctgcccgaggctggtcctgaaggcctgtctcccactaaccccgccttccagcactttctgtcattccaggctgggaaagtctagagccccctttggcccctttccctgactgtcaaggacaactgactcccccatc

SEQ ID NO: 13354 - DNA, 2638 bp, Homo sapiens
aggaaacagtgtggatcacaaggaggtgattgagagctactctgcgtctggaagagtgaggaggagcctgtgtggcagaacaaaatggataaggtcgttccagccgtgcagaagtgtggaggtgtgagcctgcaggcaggtggctctggttggatcccaggtgcatgcagggctttgatcacatgcccagtagttaactgttaatcaacgcactctctgtggaacaacaggctggtcccgttgagccaacactctctgggcactgccttcactagactctggctggctgctgcgcttgtagagactcttccagctggagttggaggctgacgccctagtgaatttccatcagtattcttcccagctgctacccttctatgagagctcccctcaggtcctgcacactgaggtcctgcagcacctgaccgacctcatccgtaaccaccccagctggtcagtggcccacctggctgtggagctagggatccgcgagtgcttccatcacagccgtatcatcagctgtgccaattgcgcggagaacgaggagggctgcacacccctgcacctggcctgccgcaagggtgatggggagatcctggtggagctggtgcagtactgccacactcagatggatgtcaccgactacaagggagagaccgtcttccattatgctgtccagggtgacaattctcaggtgctgcagctccttggaaggaacgcagtggctggcctgaaccaggtgaataaccaagggctgaccccgctgcacctggcctgccagctggggaagcaggagatggtccgcgtgctgctgctgtgcaatgctcggtgcaacatcatgggccccaacggctaccccatccactcggccatgaagttctctcagaaggggtgtgcggagatgatcatcagcatggacagcagccagatccacagcaaagacccccgttacggagccagccccctccactgggccaagaacgcagagatggcccgcatgctgctgaaacggggctgcaacgtgaacagcaccagctccgcggggaacacggccctgcacgtggcggtgatgcgcaaccgcttcgactgtgccatagtgctgctgacccacggggccaacgcggatgcccgcggagagcacggcaacaccccgctgcacctggccatgtcgaaagacaacgtggagatgatcaaggccctcatcgtgttcggagcagaagtggacaccccgaatgactttggggagactcctacattcctagcctccaaaatcggcagacaactacaggatctcatgcacatctcacgggcccggaagccagcgttcatcctgggctccatgagggacgagaagcggacccacgaccacctgctgtgcctggatggaggaggagtgaaaggcctcatcatcatccagctcctcatcgccatcgagaaggcctcgggtgtggccaccaaggacctgtttgactgggtggcgggcaccagcactggaggcatcctggccctggccattctgcacagtaagtccatggcctacatgcgcggcatgtactttcgcatgaaggatgaggtgttccggggctccaggccctacgagtcggggcccctggaggagttcctgaagcgggagtttggggagcacaccaagatgacggacgtcaggaaacccaaggtgatgctgacagggacactgtctgaccggcagccggctgaactccacctcttccggaactacgatgctccagaaactgtccgggagcctcgtttcaaccagaacgttaacctcaggcctccagctcagccctcagaccagctggtgtggcgggcggcccgaagcagcggggcagctcctacttacttccgacccaatgggcgcttcctggacggtgggctgctggccaacaaccccacgctggatgccatgaccgagatccatgagtacaatcaggacctgatccgcaagggtcaggccaacaaggtgaagaaactctccatcgttgtctccctggggacagggaggtccccacaagtgcctgtgacctgtgtggatgtcttccgtcccagcaacccctgggagctggccaagactgtttttggggccaaggaactgggcaagatggtggtggactgttgcacggatccagacgggcgggctgtggaccgggcacgggcctggtgcgagatggtcggcatccagtacttcagattgaacccccagctggggacggacatcatgctggatgaggtcagtgacacagtgctggtcaacgccctctgggagaccgaggtctacatctatgagcaccgcgaggagttccagaagctcatccagctgctgctctcaccctgagggtccccagcctctcaccggccccagctgacctcgtccattcagcccctgccaggccaagcccagccactgccctcccgggcagatctgggcccaggcacctctgagtccatagaccaggcctgggagaatgccaagctgcctgcccgaggctggtcctgaaggcctgtctcccactaaccccgccttccagcactttctgtcattccaggctgggaaagtctagagccccctttggcccctttccctgactgtcaaggacaactgactcccccatcagctcaa

SEQ ID NO: 13355 - DNA, 2760 bp, Homo sapiens
ggaagtaggaggaagtagaagtgctgagtaagccgagacagagggggaagacggtggggcctccccacctgccccgcagaagatgcagttctttggccgcctggtcaataccttcagtggcgtcaccaacttgttctctaacccattccgggtgaaggaggtggctgtggccgactacacctcgagtgaccgagttcgggaggaagggcagctgattctgttccagaacactcccaaccgcacctgggactgcgtcctggtcaaccccaggaactcacagagtggattccgacgcctgggctccagtccctgtgtcctgagccccatgaggctgttactggtgctgctcgtctgcccatcctctccagtaacagccacctgaacactgcaattcctgggtttccatcattccttccagcctgactcttccagctggagttggaggctgacgccctagtgaatttccatcagtattcttcccagctgctacccttctatgagagctcccctcaggtcctgcacactgaggtcctgcagcacctgaccgacctcatccgtaaccaccccagctggtcagtggcccacctggctgtggagctagggatccgcgagtgcttccatcacagccgtatcatcagctgtgccaattgcgcggagaacgaggagggctgcacacccctgcacctggcctgccgcaagggtgatggggagatcctggtggagctggtgcagtactgccacactcagatggatgtcaccgactacaagggagagaccgtcttccattatgctgtccagggtgacaattctcaggtgctgcagctccttggaaggaacgcagtggctggcctgaaccaggtgaataaccaagggctgaccccgctgcacctggcctgccagctggggaagcaggagatggtccgcgtgctgctgctgtgcaatgctcggtgcaacatcatgggccccaacggctaccccatccactcggccatgaagttctctcagaaggggtgtgcggagatgatcatcagcatggacagcagccagatccacagcaaagacccccgttacggagccagccccctccactgggccaagaacgcagagatggcccgcatgctgctgaaacggggctgcaacgtgaacagcaccagctccgcggggaacacggccctgcacgtggcggtgatgcgcaaccgcttcgactgtgccatagtgctgctgacccacggggccaacgcggatgcccgcggagagcacggcaacaccccgctgcacctggccatgtcgaaagacaacgtggagatgatcaaggccctcatcgtgttcggagcagaagtggacaccccgaatgactttggggagactcctacattcctagcctccaaaatcggcagacaactacaggatctcatgcacatctcacgggcccggaagccagcgttcatcctgggctccatgagggacgagaagcggacccacgaccacctgctgtgcctggatggaggaggagtgaaaggcctcatcatcatccagctcctcatcgccatcgagaaggcctcgggtgtggccaccaaggacctgtttgactgggtggcgggcaccagcactggaggcatcctggccctggccattctgcacagtaagtccatggcctacatgcgcggcatgtactttcgcatgaaggatgaggtgttccggggctccaggccctacgagtcggggcccctggaggagttcctgaagcgggagtttggggagcacaccaagatgacggacgtcaggaaacccaaggtgatgctgacagggacactgtctgaccggcagccggctgaactccacctcttccggaactacgatgctccagaaactgtccgggagcctcgtttcaaccagaacgttaacctcaggcctccagctcagccctcagaccagctggtgtggcgggcggcccgaagcagcggggcagctcctacttacttccgacccaatgggcgcttcctggacggtgggctgctggccaacaaccccacgctggatgccatgaccgagatccatgagtacaatcaggacctgatccgcaagggtcaggccaacaaggtgaagaaactctccatcgttgtctccctggggacagggaggtccccacaagtgcctgtgacctgtgtggatgtcttccgtcccagcaacccctgggagctggccaagactgtttttggggccaaggaactgggcaagatggtggtggactgttgcacggatccagacgggcgggctgtggaccgggcacgggcctggtgcgagatggtcggcatccagtacttcagattgaacccccagctggggacggacatcatgctggatgaggtcagtgacacagtgctggtcaacgccctctgggagaccgaggtctacatctatgagcaccgcgaggagttccagaagctcatccagctgctgctctcaccctgagggtccccagcctctcaccggccccagctgacctcgtccattcagcccctgccaggccaagcccagccactgccctcccgggcagatctgggcccaggcacctctgagtccatagaccaggcctgggagaatgccaagctgcctgcccgaggctggtcctgaaggcctgtctcccactaaccccgccttccagcactttctgtcattccaggctgggaaagtctagagccccctttggcccctttccctgactgtcaaggacaactgactcccccatcagctcaaaca

SEQ ID NO: 13356 - DNA, 16279 bp, Homo sapiens
gtgggctccggctgcagctccggtctgctctcttggctccggaacccccgcgggcgctggctccgtctgccagggtgagggggccgggaaggggcgcgcgggggtcccgggtctcggaaatcgggcggggacggaacgggctcgggctgcggggcctccagactcagtcgcacgctcagatttcgggatttctacccccggctgggatcgcgtaacttcctcattcccgcctggacccctgcccccggcccgcctggcctggcgtgagccccgtagccgcgcgctctccggaccacccagggccgcttccccgcgcagctgctgcgccgccccaggtcggagccttccgggcctggctgggtgttccccggggctctggttacgggacggggcggggggcggggggcgggactgggattgtggatgaaggactaaggtaggggatgggggctcgaaggggtcggtggggcgttgcaaactggtcaggcgtcatccgcgggcggtcaggaggccgtgggggaagaggaggatctggaagagatggaggacctgcgggagttaggatggggggcgggttctgcaggacagctcgcctccctgaggcttcccaatgttcctaggatgacggcgacccctgagagcctcttccccactggggacgaactggactccagccagctccagatggagtccgatgaggtggacaccctgaaggagggagaggacccaggtacacagggaagatggatggccctcagggaggagaggcgttcgggagccagggggctggggcctgttgtggtctacactcctcgactttctttcctcccagccgaccggatgcacccgtttctggccatctatgagcttcagtctctgaaagtgcaccccttggtgttcgcacctggggtccctgtcacagcccaggtggtgggcaccgaaagatataccagcggatccaaggtggccagactggccccagggagggggaaagggagggcggcccggaatggatccaaggtggctgggctggccccagggaaggggcaaaaggagggctggccagagtggggaggcggggacccacgcaggggacatccattcagttcctcatacccctaggtgggaacctgcactctgtattctgtccgcttgactcacggcgacttttcctggacaaccaagaagaaataccgtcattttcaggagctgcatcgggacctcctgagacacaaagtcttgatgagtctgctccctctggctcggtgagggcgaccggactgcttcctgtagagggcaggtgctccccaccctcctttctgtctgtctcaccccggggccacaacctttcctccctgcaactctggccactgtgctgcctcccctgaccccagttaccaggaaactttccctgctcagctttccctgtccatggttctgtgccagcatctcagctgggcgggatgcccaaaatgctcttggcagcctcacccttttctagtctccattcccagggtagggggcctccgttttgccagcctctaggccttttgtttgttttttgtttttgttttgtacaaggtctccctctgtcacccaggctagagtgcagtggtatgatcttggctcatggcaacctcctgggctcaagcagtcctcccgtctcagcctccagagtagctaggaccacagccaccacacccaactaatttttgtatattttgtagagatggggtgctgctgtgttgcccaggctggtcttaaattcctgagctcaagtgatccacctgctgcggcctccccaagtgctgggattccaggcgtgagccaccacgcctggccacctccaggcctcttcttttcctccgagccccatctccagtgttttcaggaaccagagcacccagcctcccagctcttacctgaccttcatccatcctttccacagatttgccgttgcctattctccagcccgagatgcaggcaacagagagatgccctctctaccccgggcaggtcctgagggctccaccagacatgcagccagcaaacaggtgggaccagatgccaggtcctccgggaaggcattggaggtgcaaatggctcggtcccatctgtctctctctctctctcatctccacttcagaaatacctggagaattacctcaaccgtctcttgaccatgtctttctatcgcaactaccatgccatggtaaggtccaggggccgattttagatgtggagcaggattatcagaccctcggggaggagggccaggggccccagggtctgaggggctgaaagccaggtgtctcctccgggcttttgttttcctctgcagacagagttcctggaagtcagtcagctgtcctttatcccggacttgggccgcaaaggactgtgagtgtctggcccccttcacccaggcatccgtagacatcactcttaatttctccctgcctgagattggggcaagcagtgcagggtgggctgggggtctggagtcctcatcccgcctctcttcctgattgtcccacagggaggggatgatccggaagcgctcaggtggccaccgtgttcctggcctcacctgctgtggccgagaccaagtttgttatcgctggtccaagaggtacgggctatggccaagcagctgggcagtgggtgggggtgaggaagaaaattttgagggcagagaggaacacacggagcccttctgctctaggtggctggtggtgaaggactccttcctgctgtacatgtgcctcgagacaggtgccatctcatttgttcagctctttgaccctggctttgaggtgcaagtggggaaaaggagcacggaggcacggcacggcgtgcggatcgatacctcccacaggtgaggcctccctggggtgagagacaccagctgagtggtgagcccacccacggccttgctgggagttgagaaagagagaccacaggagagaggaaggcttttccacctccctggatcgggacatagttttgaaccaggaactggtctagccagatgcttgggactgctcttagactgggcccagagaaaggggattagtagaagcctgggaagggaactgctgacataaacgaaattccatttgttcatttgttcattcaacaaacccgagtgcctggtacaatactggttgctgatgcaatactaggatccaactatgagtaaggtggatatggccgggcgcggtggctcacacctacaatcccagcactttgggaggccgaggcgggtggatcacctgaggtcaggagttcgagaccagcccagccaacatgctaaaaccttgtctctactaaaaatacaaaaattagccgggcgtggtggtgcgtgcctgtaatcccagctatttgggaggctgaggcaggagaatcgcttgaagctggggtgcagaggttgcagtgagcagagatcgcaccactgcactccagcctgggggacaagagctaaactctgtctcaaaaataaataaataaataaggcagatacatacacgccctatccctgtgcagttgtgattagggactaagggaggaagtgggaaaggggaggtctctaggcaagatcacaggtatggagggcgaggatttatggacatctcatcgttcccatccaggtccttgattctcaagtgcagcagctaccggcaggcacggtggtgggcccaagagatcactgagctggcacagggcccaggcagagacttcctacagctgcaccggcatgacagctacgccccaccccggcctgggaccttggcccggtggtgagacactgacatcccttctgagcttgtctgtggctttcttgaccccctgtgtaatctctgagtccttcatcctctcttttctcatctgaaccctcctgacctcaatgacccgccccgtgacttctttaatcttcctgacctttgacatctttaaccacattgatctctctgatttcgcgccgacctttctgacccccaaacttggtcatctcttctgacccttgacctctctaacctcctataaccttttaaacccctctctacaatactgaccctctctgttctccatgatcttctcaaatctctctgatttagtccttcatttaataaacattttcttttctttttttttttttttttttttgagagagagttttgttctgttgatctcggctcactgcaacctccgcctcccaggttcaagcgattcttctgcctcagcctcccgagtagccgggattacaggcgcccaccaccacacctggctaatttttgtatttttagtagagacgggggtttcaccatgttggccaggctcttctcgaactcctgacctcgggtgatccgcccgcctcggcctcccgaagtgctgggattacaggcgtgagccaccgtgcccagccttaataaacatttttctaagcacctagcagtgctggcagtaacacacagtcctctctgggttagggaagtaggtgatcaaatcgtgaaacaatgtgaacttgccgtactggtgataggtagaaggtgacacgcacagacaggaagtacctggcccagcagggatatcaggacaggtttccaggaggtggtgaccctcaggtagttttgctttaaatcagagactgacacaatattaattttgttggtttttgttggagacagtgtcttgctctgtcaccaggcgtgtagtgcagtagtgtgatcatggctcacggcaacttcaacctcccaggctcaaatcatcctcctgcctcagcctcccaagtagctgagactacagacacatgccaccacacccggctaattaaaaacatttttttttacaaaaaattttaaaaattagacgggtgtggtctcgaactcctgggctcaagggatcatcctgcctcggcctccccaaagtgctggattgcaggcatgagcgacagtgcctggcctatatacttttttttttttaaggcagagtttcgctcttgttgcccaggctagcgtgcagtggcacaatctcagctcactgcaacctcagcctcccaggttcaagggattctcctgcctcagcctcccaagtagctgggatcacaggtgcatgccaccacacccagctaatttttgttttggttttttttttttttttttgagatggagtctgtctctgtcaccaggctggagtgcagtggcaggatcccacctcactgcaacctctgactccccggttcaagtgattcttctgcctcagcctcctgagtagctaggattacaggcatatgccaccatgtccagctaatttttgtatttttagtagagccagggtttcaccatgttggccaggatggtctcgatctcctgacttcgtgatctgcccacctcggcctcccaaagtgctgggattacaggcttgagccactgcacctggctataaacttctaaaacagccaaaaccaatccacagtgatggaaatcagatcagcagttgcctgtggcagggtatggggaaatgattgcctatagtggggcacacgagggaacattccaggacgataaaaatgtcctatattttgataggactggtgattgcgtgggaacatacacttgctgatcctcatggaactatacaagataaagaaaatgcagaacagtccaggcacagaagacagaaatagctcagggtgtttgggaaccaccaggacatattgttgttactgagtgaggaggagcagtcagaggagaagctgggagtcagtggcacctgatctcacagggtcccatgtgctaatatcacaggcacacagggcagtcatggaaggaagttttgtttgttcgtttgttttgttttggtttggtttggtttttgagatggagtctggctctgtcgcccaagctggagtgcagtggcgcgataccagctcactgcagtctctgccccctgggttcaagcgattctcctgcctcggcctcctgagtagctgggattacaggcgtgcaccactatgctcagctgatttttgtatttttagtagagataggatttcaccatgttggccaggctggtcacgaactcctgaccttaagtgatccacccgcttcggcttcccaaagggctgggattacaggcatgagccaccttgcccagccttcctgcatattttcacatgtgcatgcacgtgttacttttgtttcaacataaatgagatcatgcaacctcttctgtgacttattttttcacttaatacctgtgtgagagattagacacttatattatttcccatttttcactcttacaaacaatgtgatgaacacaacatttgcctaggcattgtattagatgtattcctagacatgtaattaccatgtatatttaatgatattaaagggtatatgcatttaatattttgatactgctgaccagtcgctttggctcatgcctgtaatcccagcactttgggaggccgaggcgggtagatcattggggtcaggagttcaagaccaacctggccaacatggcaaaaacccgtctctactaaaaatacaaaaattagccaggcgtggtggcgggcgcctgtaatttcagttacttgggaggctgagacaggaaaattgcttgaacccaagaggcggaggttgcagtgagccaagatcatgccattgcactccagcctgggtgacagagcgggacaccatctccaaaaagctatatatatattttttgatactgccaaattgtctcctaaaagttatattcccatagtctatgagaatacccacttccccagcatattgaatattgatattgaatgttaccagtgatttgaattattaccaatctaatggattttttaaatgtaatttcattttaatttcgttgtttactagtgaaactgaacatttgccacgattggccattttaatttctctgtgaactgtcagttcttactctttgctcatttttcagttggctcatgtgactttttcttgtcgatttattggtgttctttatgtatgatgtattaatcctcctgttctttagttgattaggttattgtgtctttttgtaatttttatttgtatttagcgcatatgggcaaacactattttgatgtgtctgataccacttgtgttctctgatcatttctgatctttgaccttgctgtcacctctgacccacgactgtcctccggtcttcactctccagagctttctggcttctgactcccctgacctccttggcttggcctccccccaggtttgtgaatggggcaggttactttgctgctgtggcagatgccatccttcgagctcaagaggagattttcatcacagactggtggtgagtgggaaaaggccccaacaacatggggcaggatagagcctggggcagatcagcattaggaggagaaggggggtgcagctggtggtctggggcttcgtttgcccctaatccactgccctgaatcccaggttgagtcctgaggtttacctgaagcgtccggcccattcagatgactggagactggacattatgctcaagaggaaggcggtgaggagagtggtcaggccgcagggggagggggttgcctgtgggtggaggttgattagcagggctgcagtgtgggagaattaggcagtctgaggcttcaggggagggaaaagtgtccatcctggcccagcacctgtcagacatcacctccgccctctccctctgccctaaggagaactgacaacttcctcttcatgctccctccacctggcagagacttccctcccagtatacataatactttattgtgttatctgggggtatacatgtctatctctctcactggactagttaatatcactgttccactacaaggcacagtacctgccatggagggggcatgtgtggtgttgatggacaggaagaaggatgcatggatgatgcagggtggctgggcaggtggatggatagaggacagaaagggtgatggatggaaggatatgagttggaaaggtggagggctaggagggtaggcaggtagatggatgaatgatagacggtacataaagggatgagtaaatgcttgggaagatggatggatggatgatgaagggtgggtggatagatgtgtggatgggtgagtgggtgagcacacagatgacatttagtctaagtctgtggcaagcagcaaagcagggcatatgtggcagagcctctaggatctccagacaagctggagggacacacgtggaaaaggtttgggagtgtggaaaggggctactctgggagaggcactaggatctgattccccaactcaccaccaggaggagggtgtccgtgtgtctattctgctgtttaaagaagtggaattggccttgggcatcaacagtggctatagcaagagggcgctgatgctgctgcaccccaacataaaggtgactctcggcctcagagaccctcccacatgacagcccttctccccacactgtcccagcccccagcgctcccgctccctgatggtctcatctttccatctttcctctctccctcccagtacctcctgttttccttcacctaaacccaccctcatgaaccctccatgcctgctccaggtgatgcgtcacccagaccaagtgacgttgtgggcccatcatgagaagctcctggtggtggaccaagtggtagcattcctggggggactggaccttgcctatggccgctgggatgacctgcactaccgactgactgaccttggagactcctctgaatcagctgcctcccaggtaatccccctgaggccttcctgagcacccccaaactcagataagctcaatcaacaccatttcccagctccagccttaccccctcagtcattccaggccctgccaacctcagggttcctcagactttctgggactccaagaacccactttgaaagtgctgtaactggccgggagccatggcttatgcctgtaatcccagcactttgggaggccaaggcgggtggatcacctgaggtctggagttcgagaccagcctgaccgacatggtgaaaccctgtctctactaaaaatgcaaaaaattagctgggcatggtggcagttgcctgtcattgaagctactcgggaggctgaggcaggagaatcacttgaacccaggaggcggaggttgcagtgagccgagattgtgccattgtactccaccctgggcaacagagcgagactctgtctcaaaaaaaaaaaaaaaagtgctgtcacccacccagtcctttccccattttcactgaccatcaccccattcctctaaaagtgtcaaaggcaactggaggggagggctggggaatcagaccctctgtttcattcttcctctcggtctctctcactctttcagtgctcctctctttggccctggctctgtacagccccatgacttccccttgcccctggcttgggtgtgttccccctacagcctcccaccccgcgcccagactcaccagccaccccagacctctctcacaaccaattcttctggctgggcaaggactacagcaatcttatcaccaaggactgggtgcagctggaccggcctttcgaaggtgaagcctcccacccgccaaagccccagagagctgagagcagggtcagaagctggggctggtactgagagtgggatgagaggggtcaacggtggtacagccctccctctggcaggctctttctccctgccccaagtgtcccaaggagtccagccctgacatctcccctgactctcctgggaccccccagatttcattgacagggagacgacccctcggatgccatggcgggacgttggggtggtcgtccatggcctaccggcccgggaccttgcccggcacttcatccagcgctggaacttcaccaaggtgttcattccctccgataggggctggaggtagggagggagccagggcagattggcacctcctgctgactctgccatccctccacgtcagaccaccaaggccaagtacaagactcccacatacccctacctgcttcccaagtctaccagcacggccaatcagctccccttcacacttccaggagggcagtgcaccaccgtacaggtgaggccccccacttcagccagccctcccctttgtctccttcagcctaacaccccaacccactctccctggtgtgagagctgcccacactctcctttcctggggttaagaagcacatcacggccaggcacggtggctcacgcctataatcccagcactttggaaggccaaggcaggcggatcacaaggtccggagatcgagaccatcctggctaacatggtgaaaccccatctctactaaaaatacaaaaaattagccgggcgtggtggtgcgtacctgtagtcccagctactagggaggctaaggcaggagaatcgcttgaacccaggaggaggatgttgtagtgagctgagatcacgccactgcactccagcctgggcaacagagtgagactccatctcaaaaataaaataaaaggccaggcgcagtggcttacgcctgtaatcccagcactttgggaggccgaggcaggcggatcacgaggtccggagagcaagaccatcctggctaacaccatgaaaccctgtctctactaaaaatacaaaaaattagccgggagtggtggtgcgtacctgtagtcccagctacttaggaggctgaggcaggagaatggcgtgaacccaggaggaggagcttgcagtgagcggagatcatgccactgcactccagcctaggcaacagagcgagactctgtcttaaaaaagaaaagaaatgaagcacatcgcattcaccattccctaggtcttgcgatcagtggaccgctggtcagcagggactctggagaactccatcctcaatgcctacctgcacaccatcagggagagccagcacttcctctacattgaggtctgactgggaggaggtgggggagagcatggaaggggtgtcccaggagagagacctggggaatgagtggagtcagtcattgagggctggtggagcagaagcagacgcctggagcctgggaccaaggctggaggccgaggacagggccaggggccaggctgctgatgtctgtctctgattcttgccccagaatcagttcttcattagctgctcagatgggcggacggttctgaacaaggtgggcgatgagattgtggacagaatcctgaaggcccacaagtaaggtggactgtcaggaaggtggggactgtgggtgtggtttgagcccggttgaagggggtggggtttgagggaccagtcgcacctctgactccaccccctccccagacaggggtggtgttaccgagtctacgtgcttttgcccttactccctggcttcgagggtgacatctccacgggcggtggcaactccatccaggccattctgcactttacttacaggtgaccccccaggcggactccagctctcagtggccccatcccacccgtgtccccctcctgattctgtcctgatcccttcctgctgggccttaaagaagggccacctctcctgacctcccctcccctctgccagcctccacttctctccctctttcttttctctcaggaccctgtgtcgtggggagtattcaatcctgcatcgccttaaagcagccagtgagtgctgggggctgggggctcaagccctgggcccctgggagagggagattggggcgctgcaggcctgggggtgggggaaggaggctgtcactcctgtgagcctctgacgctacgcagaccatagctggcctttcactgcagggagaaggagagagaccagactctatgtaggaagagtttctggagtgagaggaggtgggacagggccctgtgcacacagagccacctctcacctcacttcccctcctgtcacgcagtggggacagcatggcgggactatatttccatctgcgggcttcgtacacacggagagctgggcgggcaccccgtctcggagctcatctacatccacagcaaggtgctcatcgcagatgaccggacagtcatcattggtcagtgccggatctagtcctctggcagggagagggtgtggggacaggcgaagagatgagaggcaggatgacagagactgcagctgaggctcgtgtaggggtggagggtccaagaaggaatgttgcaggccagtgctttggtagaggggatggggtactggggagagtgccctgggcccaagcacacagtgtgccccgcatccaccccaggttctgcaaacatcaatgaccggagcttgctggggaagcgggacagtgagctggccgtgctgatcgaggacacagagacggaaccatccctcatgaatggggcagagtatcaggcgggcaggtttgccttgagtctgcggaagcactgcttcgggtagagctggggcgggatgccacagggtgggagggagatgggggcgtctgccttttgagcaggacaagaggtagcaccgcataggtactcccggagccagaggtagaggcagtactagattctcaataggcaaggctgggcgcggcagctcacgcctctaatcccagcactttgggaggccaaggcgggtggattgcctgaggtcaggattttgagaccagcctggctaacatagtgaaacccgtctctactaaaaatacaaaaaatcagctgggtgtggtggcgggcgcctgtgatcccagctactaggactaatcagtttagagtatcagtaaagcaggaacaccaaaaaacaaaaagagaaaaaaatcttttttttttgagacggagttttgctcttgttgcccaggctggagtgcaatggcgagatctcagctcactgcaacctctgccctgggttcaagcgattctcctgcctcagcctcccgagtagctgggattacaggcatgcgccaccacgcccagctaattttgtatttttagtagagatggggtttcgccgtgttggtcaggctggtctcgaactcccgacctcaggtgatccacccacttcagcattccaaagtgctgggattacaggcgtgagccactgcacctggccacgaaaaagaaatcttttttgttgttgttgttgttgttgttgagacacggtttcactcttgtcgcccaggctggagtgcaatggcacgatcctggctcactgcaacctccgcctcctgggttcaagcaattcttctgcctcagcctccggagtagctgggattacaggcgcccaccaccacgcccagctaatttttgtatttttagtagagacagggtttcgctgtgttggccaggctgatcttgaactcctgacctcaggcttcggcctcccaaagtgctgggattacaggcatgaaccaccgcccctggccaaaaaaaaaaaaaaatcttttttttttttctttttttttgagagggagtctcactgtcgcccaggctggagtgcagtggcgcgatctcggctcactgcaggctccgccgcccagggttcatgccattctcctgcctcagcctcccgagtagctgggactacaggcacccgccacctcgcccggctaattttttgtatttttagtagagacggggtttcaccgtgttagccaggatggtctagatctcttgacctcgtgatctgcccgcctccgcctcccaaagtgctgggattacaggcatgagccaccacgcccggccaaaaaaaaaaaacttttgtgttttgtttgtttgtttgttttctttttgagacggagtcgctctgtcacccacgctggagtgcagtggcgcgatctcggctcactgcaagctccgcctcccgggttcataccattctcctgcctcagcctcccgagtagctgggattacaggcgcccgccaccatgcccagctaattttttgtatttttagtatagatggggtttcaccgtgttagccaggatggtctcgatctcctgacctcgtgatccgcccatctcagcctcccaaagtgctgggattacaggcatgagccaccgtgcccggccaaaaaaaaaatcttttaaaagtaatttttttcacaggttctgaggattggggaaagaacagaaaaagaagaaaatttaaaataaaaataattttttaaagcatcaaggtagtcatcaaagtcaagacaaatcagaactctgttggcttcttttacacttattttactattttatattgcatttattttgtttttgtttgtttgtttgttttgagatagggtcttgctctgtcacccagctagagttcagtggcgttaccacggctcactgcaacctcgacttcgccagctgaagtgatcctcccacttcagcctcccaagtagctgggactataggcacatgccaccgtgcctggctaatttttgtatttttttgtagagatggggttttgccatattgcccaggctggtcttgaattcctgagctcaagcaatccacctgcctcatcctcccaaagtgctgggaatacaggcgtgagccaccgcacccagccaattttgaattacctgagtagggacaatgtaacttttctggtactcaggttctctaaggatcttaatctggccctgctgggacccctttctcctatagtgtgattcttggagcaaatacccggccagacttggatctccgagaccccatctgtgatgacttcttccagttgtggcaagacatggctgagagcaacgccaatatctatgagcaggtgggaacttgggaggggtgggggagagtggcctggggaaatttgtggattatcctgctcagggtaggatggagagaagcgccaccatacagtcattattggaagggggatgagggcctggggacatttgctatcaagagatttagtggcccaggccgggtgcagtggctcatgcctgtaatcccagcactttgggaggccaaggcccggtggatcacctgaggtcaggagtttgagatcagcctcccaacatggcaaaaccccatctctactaaaaatacaaaaaaattagctaggtgtggctgggaggctgaggcaggagaatctcttgaactcaggagacagagatttcagtgagccgagatcacgccattgcactccagccacctgggcaacaagagcaaaactctgtctcaaaaaaaaaaagtacaaaagttagccgggcatggtggtgggcacctgtaatcccagctactcaggaggcagaggcaggagaatcacttgaacccgagaggtggagattgtagtgagccgagatcgcaccattgcactccagcctgggcaaaaagagtgaaactccgtctcaaaaaaaaaaagagagagagagttagtggcccagggtcaacggggggtatggagagatggtatgggggaaggggtctagcctagttggacttagattgttgggagagtctccccaagccttactggcgtccatgcccccgcccacagatcttccgctgcctgccatccaatgccacgcgttccctgcggactctccgggagtacgtggccgtggagcccttggccacggtcagtccccccttggctcggtctgagctcacccaggtccagggccacctggtccacttccccctcaagttcctagaggatgagtctttgctgcccccgctgggtagcaaggagggcatgatccccctagaagtgtggacatagttgaggcccccgtcagggagaggtcaccagctgctgtgccccaccacgtctggctccctgccccttaaccccaaggactgagggcagtgccctttgagatctggggaggcaggcattcctgaagggaactagaggtgttacagaggacccttacgtgagaaatagctgaaaagggcactcccaaccctgggctggggaggaggagagagtcccagagctcatcccccctgctgcccagtgcaaaccacttctccatgctgcaaaggagaagcacagctcctgccagggtgagcagggtcaagcctcttattccaggagaagggggctctgccccaggccctactacccattgttcccttcctcttcctgcccttgaaccccctccctgtcccagggccctcccagcccattgctgccaaggtggagggaaggataaagccacttctggcttcagcccccaccaggggaaggaaggagggcacattaactccctccaccagcctgctgacagacactaactttgtatccgttcaataagcatttcataaataaaggtgtagaaaagg

SEQ ID NO: 13357 - DNA, 3443 bp, Homo sapiens
gtgggctccggctgcagctccggtctgctctcttggctccggaacccccgcgggcgctggctccgtctgccagggatgacggcgacccctgagagcctcttccccactggggacgaactggactccagccagctccagatggagtccgatgaggtggacaccctgaaggagggagaggacccagccgaccggatgcacccgtttctggccatctatgagcttcagtctctgaaagtgcaccccttggtgttcgcacctggggtccctgtcacagcccaggtggtgggcaccgaaagatataccagcggatccaaggtgggaacctgcactctgtattctgtccgcttgactcacggcgacttttcctggacaaccaagaagaaataccgtcattttcaggagctgcatcgggacctcctgagacacaaagtcttgatgagtctgctccctctggctcgatttgccgttgcctattctccagcccgagatgcaggcaacagagagatgccctctctaccccgggcaggtcctgagggctccaccagacatgcagccagcaaacagaaatacctggagaattacctcaaccgtctcttgaccatgtctttctatcgcaactaccatgccatgacagagttcctggaagtcagtcagctgtcctttatcccggacttgggccgcaaaggactggaggggatgatccggaagcgctcaggtggccaccgtgttcctggcctcacctgctgtggccgagaccaagtttgttatcgctggtccaagaggtggctggtggtgaaggactccttcctgctgtacatgtgcctcgagacaggtgccatctcatttgttcagctctttgaccctggctttgaggtgcaagtggggaaaaggagcacggaggcacggcacggcgtgcggatcgatacctcccacaggtccttgattctcaagtgcagcagctaccggcaggcacggtggtgggcccaagagatcactgagctggcacagggcccaggcagagacttcctacagctgcaccggcatgacagctacgccccaccccggcctgggaccttggcccggtggtttgtgaatggggcaggttactttgctgctgtggcagatgccatccttcgagctcaagaggagattttcatcacagactggtggttgagtcctgaggtttacctgaagcgtccggcccattcagatgactggagactggacattatgctcaagaggaaggcggaggagggtgtccgtgtgtctattctgctgtttaaagaagtggaattggccttgggcatcaacagtggctatagcaagagggcgctgatgctgctgcaccccaacataaaggtgatgcgtcacccagaccaagtgacgttgtgggcccatcatgagaagctcctggtggtggaccaagtggtagcattcctggggggactggaccttgcctatggccgctgggatgacctgcactaccgactgactgaccttggagactcctctgaatcagctgcctcccagcctcccaccccgcgcccagactcaccagccaccccagacctctctcacaaccaattcttctggctgggcaaggactacagcaatcttatcaccaaggactgggtgcagctggaccggcctttcgaagatttcattgacagggagacgacccctcggatgccatggcgggacgttggggtggtcgtccatggcctaccggcccgggaccttgcccggcacttcatccagcgctggaacttcaccaagaccaccaaggccaagtacaagactcccacatacccctacctgcttcccaagtctaccagcacggccaatcagctccccttcacacttccaggagggcagtgcaccaccgtacaggtcttgcgatcagtggaccgctggtcagcagggactctggagaactccatcctcaatgcctacctgcacaccatcagggagagccagcacttcctctacattgagaatcagttcttcattagctgctcagatgggcggacggttctgaacaaggtgggcgatgagattgtggacagaatcctgaaggcccacaaacaggggtggtgttaccgagtctacgtgcttttgcccttactccctggcttcgagggtgacatctccacgggcggtggcaactccatccaggccattctgcactttacttacaggaccctgtgtcgtggggagtattcaatcctgcatcgccttaaagcagccatggggacagcatggcgggactatatttccatctgcgggcttcgtacacacggagagctgggcgggcaccccgtctcggagctcatctacatccacagcaaggtgctcatcgcagatgaccggacagtcatcattggttctgcaaacatcaatgaccggagcttgctggggaagcgggacagtgagctggccgtgctgatcgaggacacagagacggaaccatccctcatgaatggggcagagtatcaggcgggcaggtttgccttgagtctgcggaagcactgcttcggtgtgattcttggagcaaatacccggccagacttggatctccgagaccccatctgtgatgacttcttccagttgtggcaagacatggctgagagcaacgccaatatctatgagcagatcttccgctgcctgccatccaatgccacgcgttccctgcggactctccgggagtacgtggccgtggagcccttggccacggtcagtccccccttggctcggtctgagctcacccaggtccagggccacctggtccacttccccctcaagttcctagaggatgagtctttgctgcccccgctgggtagcaaggagggcatgatccccctagaagtgtggacatagttgaggcccccgtcagggagaggtcaccagctgctgtgccccaccacgtctggctccctgccccttaaccccaaggactgagggcagtgccctttgagatctggggaggcaggcattcctgaagggaactagaggtgttacagaggacccttacgtgagaaatagctgaaaagggcactcccaaccctgggctggggaggaggagagagtcccagagctcatcccccctgctgcccagtgcaaaccacttctccatgctgcaaaggagaagcacagctcctgccagggtgagcagggtcaagcctcttattccaggagaagggggctctgccccaggccctactacccattgttcccttcctcttcctgcccttgaaccccctccctgtcccagggccctcccagcccattgctgccaaggtggagggaaggataaagccacttctggcttcagcccccaccaggggaaggaaggagggcacattaactccctccaccagcctgctgacagacactaactttgtatccgttcaataagcatttcataaataaaggtgtagaaaagg

SEQ ID NO: 13358 - DNA, 1270 bp, Homo sapiens
cgagactctgtcttaaaaaagaaaagaaatgaagcacatcgcattcaccattccctaggtcttgcgatcagtggaccgctggtcagcagggactctggagaactccatcctcaatgcctacctgcacaccatcagggagagccagcacttcctctacattgaggtctgactgggaggaggtgggggagagcatggaaggggtgtcccaggagagagacctggggaatgagtggagtcagtcattgagggctggtggagcagaagcagacgcctggagcctgggaccaaggctggaggccgaggacagggccaggggccaggctgctgatgtctgtctctgattcttgccccagaatcagttcttcattagctgctcagatgggcggacggttctgaacaaggtgggcgatgagattgtggacagaatcctgaaggcccacaagtaaggtggactgtcaggaaggtggggactgtgggtgtggtttgagcccggttgaagggggtggggtttgagggaccagtcgcacctctgactccaccccctccccagacaggggtggtgttaccgagtctacgtgcttttgcccttactccctggcttcgagggtgacatctccacgggcggtggcaactccatccaggccattctgcactttacttacaggtgaccccccaggcggactccagctctcagtggccccatcccacccgtgtccccctcctgattctgtcctgatcccttcctgctgggccttaaagaagggccacctctcctgacctcccctcccctctgccagcctccacttctctccctctttcttttctctcaggaccctgtgtcgtggggagtattcaatcctgcatcgccttaaagcagccagtgagtgctgggggctgggggctcaagccctgggcccctgggagagggagattggggcgctgcaggcctgggggtgggggaaggaggctgtcactcctgtgagcctctgacgctacgcagaccatagctggcctttcactgcagggagaaggagagagaccagactctatgtaggaagagtttctggagtgagaggaggtgggacagggccctgtgcacacagagccacctctcacctcacttcccctcctgtcacgcagtggggacagcatggcgggactatatttccatctgcgggcttcgtacacacggagagctgggcgggcaccccgtctcggagctcatctacatccacagcaaggtgctcatcgcagatgaccggacagtcat

SEQ ID NO: 13359 - DNA, 736 bp, Homo sapiens
cgagactctgtcttaaaaaagaaaagaaatgaagcacatcgcattcaccattccctaggtcttgcgatcagtggaccgctggtcagcagggactctggagaactccatcctcaatgcctacctgcacaccatcagggagagccagcacttcctctacattgaggtctgactgggaggaggtgggggagagcatggaaggggtgtcccaggagagagacctggggaatgagtggagtcagtcattgagggctggtggagcagaagcagacgcctggagcctgggaccaaggctggaggccgaggacagggccaggggccaggctgctgatgtctgtctctgattcttgccccagaatcagttcttcattagctgctcagatgggcggacggttctgaacaaggtgggcgatgagattgtggacagaatcctgaaggcccacaaacaggggtggtgttaccgagtctacgtgcttttgcccttactccctggcttcgagggtgacatctccacgggcggtggcaactccatccaggccattctgcactttacttacaggaccctgtgtcgtggggagtattcaatcctgcatcgccttaaagcagccatggggacagcatggcgggactatatttccatctgcgggcttcgtacacacggagagctgggcgggcaccccgtctcggagctcatctacatccacagcaaggtgctcatcgcagatgaccggacagtcat

SEQ ID NO: 13360 - DNA, 1268 bp, Homo sapiens
ggagcagaagcagacgcctggagcctgggaccaaggctggaggccgaggacagggccaggggccaggctgctgatgtctgtctctgattcttgccccagaatcagttcttcattagctgctcagatgggcggacggttctgaacaaggtgggcgatgagattgtggacagaatcctgaaggcccacaagtaaggtggactgtcaggaaggtggggactgtgggtgtggtttgagcccggttgaagggggtggggtttgagggaccagtcgcacctctgactccaccccctccccagacaggggtggtgttaccgagtctacgtgcttttgcccttactccctggcttcgagggtgacatctccacgggcggtggcaactccatccaggccattctgcactttacttacaggtgaccccccaggcggactccagctctcagtggccccatcccacccgtgtccccctcctgattctgtcctgatcccttcctgctgggccttaaagaagggccacctctcctgacctcccctcccctctgccagcctccacttctctccctctttcttttctctcaggaccctgtgtcgtggggagtattcaatcctgcatcgccttaaagcagccagtgagtgctgggggctgggggctcaagccctgggcccctgggagagggagattggggcgctgcaggcctgggggtgggggaaggaggctgtcactcctgtgagcctctgacgctacgcagaccatagctggcctttcactgcagggagaaggagagagaccagactctatgtaggaagagtttctggagtgagaggaggtgggacagggccctgtgcacacagagccacctctcacctcacttcccctcctgtcacgcagtggggacagcatggcgggactatatttccatctgcgggcttcgtacacacggagagctgggcgggcaccccgtctcggagctcatctacatccacagcaaggtgctcatcgcagatgaccggacagtcatcattggtcagtgccggatctagtcctctggcagggagagggtgtggggacaggcgaagagatgagaggcaggatgacagagactgcagctgaggctcgtgtaggggtggagggtccaagaaggaatgttgcaggccagtgctttggtagaggggatggggtactggggagagtgccctgggcccaagcacacagtgtgccccgcatccaccccaggttctgcaaacatcaatgaccggagcttgctggggaa

SEQ ID NO: 13361 - DNA, 632 bp, Homo sapiens
ggagcagaagcagacgcctggagcctgggaccaaggctggaggccgaggacagggccaggggccaggctgctgatgtctgtctctgattcttgccccagaatcagttcttcattagctgctcagatgggcggacggttctgaacaaggtgggcgatgagattgtggacagaatcctgaaggcccacaagtaaggtggactgtcaggaaggtggggactgtgggtgtggtttgagcccggttgaagggggtggggtttgagggaccagtcgcacctctgactccaccccctccccagacaggggtggtgttaccgagtctacgtgcttttgcccttactccctggcttcgagggtgacatctccacgggcggtggcaactccatccaggccattctgcactttacttacaggaccctgtgtcgtggggagtattcaatcctgcatcgccttaaagcagccatggggacagcatggcgggactatatttccatctgcgggcttcgtacacacggagagctgggcgggcaccccgtctcggagctcatctacatccacagcaaggtgctcatcgcagatgaccggacagtcatcattggttctgcaaacatcaatgaccggagcttgctggggaa

SEQ ID NO: 13362 - DNA, 668 bp, Homo sapiens
tcaccaaggactgggtgcagctggaccggcctttcgaaggtgaagcctcccacccgccaaagccccagagagctgagagcagggtcagaagctggggctggtactgagagtgggatgagaggggtcaacggtggtacagccctccctctggcaggctctttctccctgccccaagtgtcccaaggagtccagccctgacatctcccctgactctcctgggaccccccagatttcattgacagggagacgacccctcggatgccatggcgggacgttggggtggtcgtccatggcctaccggcccgggaccttgcccggcacttcatccagcgctggaacttcaccaaggtgttcattccctccgataggggctggaggtagggagggagccagggcagattggcacctcctgctgactctgccatccctccacgtcagaccaccaaggccaagtacaagactcccacatacccctacctgcttcccaagtctaccagcacggccaatcagctccccttcacacttccaggagggcagtgcaccaccgtacaggtgaggccccccacttcagccagccctcccctttgtctccttcagcctaacaccccaacccactctccctggtgtgagagctgcccacactctcctttcctggggttaagaagcac

SEQ ID NO: 13363 - DNA, 578 bp, Homo sapiens
tcaccaaggactgggtgcagctggaccggcctttcgaaggtgaagcctcccacccgccaaagccccagagagctgagagcagggtcagaagctggggctggtactgagagtgggatgagaggggtcaacggtggtacagccctccctctggcaggctctttctccctgccccaagtgtcccaaggagtccagccctgacatctcccctgactctcctgggaccccccagatttcattgacagggagacgacccctcggatgccatggcgggacgttggggtggtcgtccatggcctaccggcccgggaccttgcccggcacttcatccagcgctggaacttcaccaagaccaccaaggccaagtacaagactcccacatacccctacctgcttcccaagtctaccagcacggccaatcagctccccttcacacttccaggagggcagtgcaccaccgtacaggtgaggccccccacttcagccagccctcccctttgtctccttcagcctaacaccccaacccactctccctggtgtgagagctgcccacactctcctttcctggggttaagaagcac

SEQ ID NO: 13364 - DNA, 16260 bp, Homo sapiens
ctccggtctgctctcttggctccggaacccccgcgggcgctggctccgtctgccagggtgagggggccgggaaggggcgcgcgggggtcccgggtctcggaaatcgggcggggacggaacgggctcgggctgcggggcctccagactcagtcgcacgctcagatttcgggatttctacccccggctgggatcgcgtaacttcctcattcccgcctggacccctgcccccggcccgcctggcctggcgtgagccccgtagccgcgcgctctccggaccacccagggccgcttccccgcgcagctgctgcgccgccccaggtcggagccttccgggcctggctgggtgttccccggggctctggttacgggacggggcggggggcggggggcgggactgggattgtggatgaaggactaaggtaggggatgggggctcgaaggggtcggtggggcgttgcaaactggtcaggcgtcatccgcgggcggtcaggaggccgtgggggaagaggaggatctggaagagatggaggacctgcgggagttaggatggggggcgggttctgcaggacagctcgcctccctgaggcttcccaatgttcctaggatgacggcgacccctgagagcctcttccccactggggacgaactggactccagccagctccagatggagtccgatgaggtggacaccctgaaggagggagaggacccaggtacacagggaagatggatggccctcagggaggagaggcgttcgggagccagggggctggggcctgttgtggtctacactcctcgactttctttcctcccagccgaccggatgcacccgtttctggccatctatgagcttcagtctctgaaagtgcaccccttggtgttcgcacctggggtccctgtcacagcccaggtggtgggcaccgaaagatataccagcggatccaaggtggccagactggccccagggagggggaaagggagggcggcccggaatggatccaaggtggctgggctggccccagggaaggggcaaaaggagggctggccagagtggggaggcggggacccacgcaggggacatccattcagttcctcatacccctaggtgggaacctgcactctgtattctgtccgcttgactcacggcgacttttcctggacaaccaagaagaaataccgtcattttcaggagctgcatcgggacctcctgagacacaaagtcttgatgagtctgctccctctggctcggtgagggcgaccggactgcttcctgtagagggcaggtgctccccaccctcctttctgtctgtctcaccccggggccacaacctttcctccctgcaactctggccactgtgctgcctcccctgaccccagttaccaggaaactttccctgctcagctttccctgtccatggttctgtgccagcatctcagctgggcgggatgcccaaaatgctcttggcagcctcacccttttctagtctccattcccagggtagggggcctccgttttgccagcctctaggccttttgtttgttttttgtttttgttttgtacaaggtctccctctgtcacccaggctagagtgcagtggtatgatcttggctcatggcaacctcctgggctcaagcagtcctcccgtctcagcctccagagtagctaggaccacagccaccacacccaactaatttttgtatattttgtagagatggggtgctgctgtgttgcccaggctggtcttaaattcctgagctcaagtgatccacctgctgcggcctccccaagtgctgggattccaggcgtgagccaccacgcctggccacctccaggcctcttcttttcctccgagccccatctccagtgttttcaggaaccagagcacccagcctcccagctcttacctgaccttcatccatcctttccacagatttgccgttgcctattctccagcccgagatgcaggcaacagagagatgccctctctaccccgggcaggtcctgagggctccaccagacatgcagccagcaaacaggtgggaccagatgccaggtcctccgggaaggcattggaggtgcaaatggctcggtcccatctgtctctctctctctctcatctccacttcagaaatacctggagaattacctcaaccgtctcttgaccatgtctttctatcgcaactaccatgccatggtaaggtccaggggccgattttagatgtggagcaggattatcagaccctcggggaggagggccaggggccccagggtctgaggggctgaaagccaggtgtctcctccgggcttttgttttcctctgcagacagagttcctggaagtcagtcagctgtcctttatcccggacttgggccgcaaaggactgtgagtgtctggcccccttcacccaggcatccgtagacatcactcttaatttctccctgcctgagattggggcaagcagtgcagggtgggctgggggtctggagtcctcatcccgcctctcttcctgattgtcccacagggaggggatgatccggaagcgctcaggtggccaccgtgttcctggcctcacctgctgtggccgagaccaagtttgttatcgctggtccaagaggtacgggctatggccaagcagctgggcagtgggtgggggtgaggaagaaaattttgagggcagagaggaacacacggagcccttctgctctaggtggctggtggtgaaggactccttcctgctgtacatgtgcctcgagacaggtgccatctcatttgttcagctctttgaccctggctttgaggtgcaagtggggaaaaggagcacggaggcacggcacggcgtgcggatcgatacctcccacaggtgaggcctccctggggtgagagacaccagctgagtggtgagcccacccacggccttgctgggagttgagaaagagagaccacaggagagaggaaggcttttccacctccctggatcgggacatagttttgaaccaggaactggtctagccagatgcttgggactgctcttagactgggcccagagaaaggggattagtagaagcctgggaagggaactgctgacataaacgaaattccatttgttcatttgttcattcaacaaacccgagtgcctggtacaatactggttgctgatgcaatactaggatccaactatgagtaaggtggatatggccgggcgcggtggctcacacctacaatcccagcactttgggaggccgaggcgggtggatcacctgaggtcaggagttcgagaccagcccagccaacatgctaaaaccttgtctctactaaaaatacaaaaattagccgggcgtggtggtgcgtgcctgtaatcccagctatttgggaggctgaggcaggagaatcgcttgaagctggggtgcagaggttgcagtgagcagagatcgcaccactgcactccagcctgggggacaagagctaaactctgtctcaaaaataaataaataaataaggcagatacatacacgccctatccctgtgcagttgtgattagggactaagggaggaagtgggaaaggggaggtctctaggcaagatcacaggtatggagggcgaggatttatggacatctcatcgttcccatccaggtccttgattctcaagtgcagcagctaccggcaggcacggtggtgggcccaagagatcactgagctggcacagggcccaggcagagacttcctacagctgcaccggcatgacagctacgccccaccccggcctgggaccttggcccggtggtgagacactgacatcccttctgagcttgtctgtggctttcttgaccccctgtgtaatctctgagtccttcatcctctcttttctcatctgaaccctcctgacctcaatgacccgccccgtgacttctttaatcttcctgacctttgacatctttaaccacattgatctctctgatttcgcgccgacctttctgacccccaaacttggtcatctcttctgacccttgacctctctaacctcctataaccttttaaacccctctctacaatactgaccctctctgttctccatgatcttctcaaatctctctgatttagtccttcatttaataaacattttcttttctttttttttttttttttttttgagagagagttttgttctgttgatctcggctcactgcaacctccgcctcccaggttcaagcgattcttctgcctcagcctcccgagtagccgggattacaggcgcccaccaccacacctggctaatttttgtatttttagtagagacgggggtttcaccatgttggccaggctcttctcgaactcctgacctcgggtgatccgcccgcctcggcctcccgaagtgctgggattacaggcgtgagccaccgtgcccagccttaataaacatttttctaagcacctagcagtgctggcagtaacacacagtcctctctgggttagggaagtaggtgatcaaatcgtgaaacaatgtgaacttgccgtactggtgataggtagaaggtgacacgcacagacaggaagtacctggcccagcagggatatcaggacaggtttccaggaggtggtgaccctcaggtagttttgctttaaatcagagactgacacaatattaattttgttggtttttgttggagacagtgtcttgctctgtcaccaggcgtgtagtgcagtagtgtgatcatggctcacggcaacttcaacctcccaggctcaaatcatcctcctgcctcagcctcccaagtagctgagactacagacacatgccaccacacccggctaattaaaaacatttttttttacaaaaaattttaaaaattagacgggtgtggtctcgaactcctgggctcaagggatcatcctgcctcggcctccccaaagtgctggattgcaggcatgagcgacagtgcctggcctatatacttttttttttttaaggcagagtttcgctcttgttgcccaggctagcgtgcagtggcacaatctcagctcactgcaacctcagcctcccaggttcaagggattctcctgcctcagcctcccaagtagctgggatcacaggtgcatgccaccacacccagctaatttttgttttggttttttttttttttttttgagatggagtctgtctctgtcaccaggctggagtgcagtggcaggatcccacctcactgcaacctctgactccccggttcaagtgattcttctgcctcagcctcctgagtagctaggattacaggcatatgccaccatgtccagctaatttttgtatttttagtagagccagggtttcaccatgttggccaggatggtctcgatctcctgacttcgtgatctgcccacctcggcctcccaaagtgctgggattacaggcttgagccactgcacctggctataaacttctaaaacagccaaaaccaatccacagtgatggaaatcagatcagcagttgcctgtggcagggtatggggaaatgattgcctatagtggggcacacgagggaacattccaggacgataaaaatgtcctatattttgataggactggtgattgcgtgggaacatacacttgctgatcctcatggaactatacaagataaagaaaatgcagaacagtccaggcacagaagacagaaatagctcagggtgtttgggaaccaccaggacatattgttgttactgagtgaggaggagcagtcagaggagaagctgggagtcagtggcacctgatctcacagggtcccatgtgctaatatcacaggcacacagggcagtcatggaaggaagttttgtttgttcgtttgttttgttttggtttggtttggtttttgagatggagtctggctctgtcgcccaagctggagtgcagtggcgcgataccagctcactgcagtctctgccccctgggttcaagcgattctcctgcctcggcctcctgagtagctgggattacaggcgtgcaccactatgctcagctgatttttgtatttttagtagagataggatttcaccatgttggccaggctggtcacgaactcctgaccttaagtgatccacccgcttcggcttcccaaagggctgggattacaggcatgagccaccttgcccagccttcctgcatattttcacatgtgcatgcacgtgttacttttgtttcaacataaatgagatcatgcaacctcttctgtgacttattttttcacttaatacctgtgtgagagattagacacttatattatttcccatttttcactcttacaaacaatgtgatgaacacaacatttgcctaggcattgtattagatgtattcctagacatgtaattaccatgtatatttaatgatattaaagggtatatgcatttaatattttgatactgctgaccagtcgctttggctcatgcctgtaatcccagcactttgggaggccgaggcgggtagatcattggggtcaggagttcaagaccaacctggccaacatggcaaaaacccgtctctactaaaaatacaaaaattagccaggcgtggtggcgggcgcctgtaatttcagttacttgggaggctgagacaggaaaattgcttgaacccaagaggcggaggttgcagtgagccaagatcatgccattgcactccagcctgggtgacagagcgggacaccatctccaaaaagctatatatatattttttgatactgccaaattgtctcctaaaagttatattcccatagtctatgagaatacccacttccccagcatattgaatattgatattgaatgttaccagtgatttgaattattaccaatctaatggattttttaaatgtaatttcattttaatttcgttgtttactagtgaaactgaacatttgccacgattggccattttaatttctctgtgaactgtcagttcttactctttgctcatttttcagttggctcatgtgactttttcttgtcgatttattggtgttctttatgtatgatgtattaatcctcctgttctttagttgattaggttattgtgtctttttgtaatttttatttgtatttagcgcatatgggcaaacactattttgatgtgtctgataccacttgtgttctctgatcatttctgatctttgaccttgctgtcacctctgacccacgactgtcctccggtcttcactctccagagctttctggcttctgactcccctgacctccttggcttggcctccccccaggtttgtgaatggggcaggttactttgctgctgtggcagatgccatccttcgagctcaagaggagattttcatcacagactggtggtgagtgggaaaaggccccaacaacatggggcaggatagagcctggggcagatcagcattaggaggagaaggggggtgcagctggtggtctggggcttcgtttgcccctaatccactgccctgaatcccaggttgagtcctgaggtttacctgaagcgtccggcccattcagatgactggagactggacattatgctcaagaggaaggcggtgaggagagtggtcaggccgcagggggagggggttgcctgtgggtggaggttgattagcagggctgcagtgtgggagaattaggcagtctgaggcttcaggggagggaaaagtgtccatcctggcccagcacctgtcagacatcacctccgccctctccctctgccctaaggagaactgacaacttcctcttcatgctccctccacctggcagagacttccctcccagtatacataatactttattgtgttatctgggggtatacatgtctatctctctcactggactagttaatatcactgttccactacaaggcacagtacctgccatggagggggcatgtgtggtgttgatggacaggaagaaggatgcatggatgatgcagggtggctgggcaggtggatggatagaggacagaaagggtgatggatggaaggatatgagttggaaaggtggagggctaggagggtaggcaggtagatggatgaatgatagacggtacataaagggatgagtaaatgcttgggaagatggatggatggatgatgaagggtgggtggatagatgtgtggatgggtgagtgggtgagcacacagatgacatttagtctaagtctgtggcaagcagcaaagcagggcatatgtggcagagcctctaggatctccagacaagctggagggacacacgtggaaaaggtttgggagtgtggaaaggggctactctgggagaggcactaggatctgattccccaactcaccaccaggaggagggtgtccgtgtgtctattctgctgtttaaagaagtggaattggccttgggcatcaacagtggctatagcaagagggcgctgatgctgctgcaccccaacataaaggtgactctcggcctcagagaccctcccacatgacagcccttctccccacactgtcccagcccccagcgctcccgctccctgatggtctcatctttccatctttcctctctccctcccagtacctcctgttttccttcacctaaacccaccctcatgaaccctccatgcctgctccaggtgatgcgtcacccagaccaagtgacgttgtgggcccatcatgagaagctcctggtggtggaccaagtggtagcattcctggggggactggaccttgcctatggccgctgggatgacctgcactaccgactgactgaccttggagactcctctgaatcagctgcctcccaggtaatccccctgaggccttcctgagcacccccaaactcagataagctcaatcaacaccatttcccagctccagccttaccccctcagtcattccaggccctgccaacctcagggttcctcagactttctgggactccaagaacccactttgaaagtgctgtaactggccgggagccatggcttatgcctgtaatcccagcactttgggaggccaaggcgggtggatcacctgaggtctggagttcgagaccagcctgaccgacatggtgaaaccctgtctctactaaaaatgcaaaaaattagctgggcatggtggcagttgcctgtcattgaagctactcgggaggctgaggcaggagaatcacttgaacccaggaggcggaggttgcagtgagccgagattgtgccattgtactccaccctgggcaacagagcgagactctgtctcaaaaaaaaaaaaaaaagtgctgtcacccacccagtcctttccccattttcactgaccatcaccccattcctctaaaagtgtcaaaggcaactggaggggagggctggggaatcagaccctctgtttcattcttcctctcggtctctctcactctttcagtgctcctctctttggccctggctctgtacagccccatgacttccccttgcccctggcttgggtgtgttccccctacagcctcccaccccgcgcccagactcaccagccaccccagacctctctcacaaccaattcttctggctgggcaaggactacagcaatcttatcaccaaggactgggtgcagctggaccggcctttcgaaggtgaagcctcccacccgccaaagccccagagagctgagagcagggtcagaagctggggctggtactgagagtgggatgagaggggtcaacggtggtacagccctccctctggcaggctctttctccctgccccaagtgtcccaaggagtccagccctgacatctcccctgactctcctgggaccccccagatttcattgacagggagacgacccctcggatgccatggcgggacgttggggtggtcgtccatggcctaccggcccgggaccttgcccggcacttcatccagcgctggaacttcaccaaggtgttcattccctccgataggggctggaggtagggagggagccagggcagattggcacctcctgctgactctgccatccctccacgtcagaccaccaaggccaagtacaagactcccacatacccctacctgcttcccaagtctaccagcacggccaatcagctccccttcacacttccaggagggcagtgcaccaccgtacaggtgaggccccccacttcagccagccctcccctttgtctccttcagcctaacaccccaacccactctccctggtgtgagagctgcccacactctcctttcctggggttaagaagcacatcacggccaggcacggtggctcacgcctataatcccagcactttggaaggccaaggcaggcggatcacaaggtccggagatcgagaccatcctggctaacatggtgaaaccccatctctactaaaaatacaaaaaattagccgggcgtggtggtgcgtacctgtagtcccagctactagggaggctaaggcaggagaatcgcttgaacccaggaggaggatgttgtagtgagctgagatcacgccactgcactccagcctgggcaacagagtgagactccatctcaaaaataaaataaaaggccaggcgcagtggcttacgcctgtaatcccagcactttgggaggccgaggcaggcggatcacgaggtccggagagcaagaccatcctggctaacaccatgaaaccctgtctctactaaaaatacaaaaaattagccgggagtggtggtgcgtacctgtagtcccagctacttaggaggctgaggcaggagaatggcgtgaacccaggaggaggagcttgcagtgagcggagatcatgccactgcactccagcctaggcaacagagcgagactctgtcttaaaaaagaaaagaaatgaagcacatcgcattcaccattccctaggtcttgcgatcagtggaccgctggtcagcagggactctggagaactccatcctcaatgcctacctgcacaccatcagggagagccagcacttcctctacattgaggtctgactgggaggaggtgggggagagcatggaaggggtgtcccaggagagagacctggggaatgagtggagtcagtcattgagggctggtggagcagaagcagacgcctggagcctgggaccaaggctggaggccgaggacagggccaggggccaggctgctgatgtctgtctctgattcttgccccagaatcagttcttcattagctgctcagatgggcggacggttctgaacaaggtgggcgatgagattgtggacagaatcctgaaggcccacaagtaaggtggactgtcaggaaggtggggactgtgggtgtggtttgagcccggttgaagggggtggggtttgagggaccagtcgcacctctgactccaccccctccccagacaggggtggtgttaccgagtctacgtgcttttgcccttactccctggcttcgagggtgacatctccacgggcggtggcaactccatccaggccattctgcactttacttacaggtgaccccccaggcggactccagctctcagtggccccatcccacccgtgtccccctcctgattctgtcctgatcccttcctgctgggccttaaagaagggccacctctcctgacctcccctcccctctgccagcctccacttctctccctctttcttttctctcaggaccctgtgtcgtggggagtattcaatcctgcatcgccttaaagcagccagtgagtgctgggggctgggggctcaagccctgggcccctgggagagggagattggggcgctgcaggcctgggggtgggggaaggaggctgtcactcctgtgagcctctgacgctacgcagaccatagctggcctttcactgcagggagaaggagagagaccagactctatgtaggaagagtttctggagtgagaggaggtgggacagggccctgtgcacacagagccacctctcacctcacttcccctcctgtcacgcagtggggacagcatggcgggactatatttccatctgcgggcttcgtacacacggagagctgggcgggcaccccgtctcggagctcatctacatccacagcaaggtgctcatcgcagatgaccggacagtcatcattggtcagtgccggatctagtcctctggcagggagagggtgtggggacaggcgaagagatgagaggcaggatgacagagactgcagctgaggctcgtgtaggggtggagggtccaagaaggaatgttgcaggccagtgctttggtagaggggatggggtactggggagagtgccctgggcccaagcacacagtgtgccccgcatccaccccaggttctgcaaacatcaatgaccggagcttgctggggaagcgggacagtgagctggccgtgctgatcgaggacacagagacggaaccatccctcatgaatggggcagagtatcaggcgggcaggtttgccttgagtctgcggaagcactgcttcgggtagagctggggcgggatgccacagggtgggagggagatgggggcgtctgccttttgagcaggacaagaggtagcaccgcataggtactcccggagccagaggtagaggcagtactagattctcaataggcaaggctgggcgcggcagctcacgcctctaatcccagcactttgggaggccaaggcgggtggattgcctgaggtcaggattttgagaccagcctggctaacatagtgaaacccgtctctactaaaaatacaaaaaatcagctgggtgtggtggcgggcgcctgtgatcccagctactaggactaatcagtttagagtatcagtaaagcaggaacaccaaaaaacaaaaagagaaaaaaatcttttttttttgagacggagttttgctcttgttgcccaggctggagtgcaatggcgagatctcagctcactgcaacctctgccctgggttcaagcgattctcctgcctcagcctcccgagtagctgggattacaggcatgcgccaccacgcccagctaattttgtatttttagtagagatggggtttcgccgtgttggtcaggctggtctcgaactcccgacctcaggtgatccacccacttcagcattccaaagtgctgggattacaggcgtgagccactgcacctggccacgaaaaagaaatcttttttgttgttgttgttgttgttgttgagacacggtttcactcttgtcgcccaggctggagtgcaatggcacgatcctggctcactgcaacctccgcctcctgggttcaagcaattcttctgcctcagcctccggagtagctgggattacaggcgcccaccaccacgcccagctaatttttgtatttttagtagagacagggtttcgctgtgttggccaggctgatcttgaactcctgacctcaggcttcggcctcccaaagtgctgggattacaggcatgaaccaccgcccctggccaaaaaaaaaaaaaaatcttttttttttttctttttttttgagagggagtctcactgtcgcccaggctggagtgcagtggcgcgatctcggctcactgcaggctccgccgcccagggttcatgccattctcctgcctcagcctcccgagtagctgggactacaggcacccgccacctcgcccggctaattttttgtatttttagtagagacggggtttcaccgtgttagccaggatggtctagatctcttgacctcgtgatctgcccgcctccgcctcccaaagtgctgggattacaggcatgagccaccacgcccggccaaaaaaaaaaaacttttgtgttttgtttgtttgtttgttttctttttgagacggagtcgctctgtcacccacgctggagtgcagtggcgcgatctcggctcactgcaagctccgcctcccgggttcataccattctcctgcctcagcctcccgagtagctgggattacaggcgcccgccaccatgcccagctaattttttgtatttttagtatagatggggtttcaccgtgttagccaggatggtctcgatctcctgacctcgtgatccgcccatctcagcctcccaaagtgctgggattacaggcatgagccaccgtgcccggccaaaaaaaaaatcttttaaaagtaatttttttcacaggttctgaggattggggaaagaacagaaaaagaagaaaatttaaaataaaaataattttttaaagcatcaaggtagtcatcaaagtcaagacaaatcagaactctgttggcttcttttacacttattttactattttatattgcatttattttgtttttgtttgtttgtttgttttgagatagggtcttgctctgtcacccagctagagttcagtggcgttaccacggctcactgcaacctcgacttcgccagctgaagtgatcctcccacttcagcctcccaagtagctgggactataggcacatgccaccgtgcctggctaatttttgtatttttttgtagagatggggttttgccatattgcccaggctggtcttgaattcctgagctcaagcaatccacctgcctcatcctcccaaagtgctgggaatacaggcgtgagccaccgcacccagccaattttgaattacctgagtagggacaatgtaacttttctggtactcaggttctctaaggatcttaatctggccctgctgggacccctttctcctatagtgtgattcttggagcaaatacccggccagacttggatctccgagaccccatctgtgatgacttcttccagttgtggcaagacatggctgagagcaacgccaatatctatgagcaggtgggaacttgggaggggtgggggagagtggcctggggaaatttgtggattatcctgctcagggtaggatggagagaagcgccaccatacagtcattattggaagggggatgagggcctggggacatttgctatcaagagatttagtggcccaggccgggtgcagtggctcatgcctgtaatcccagcactttgggaggccaaggcccggtggatcacctgaggtcaggagtttgagatcagcctcccaacatggcaaaaccccatctctactaaaaatacaaaaaaattagctaggtgtggctgggaggctgaggcaggagaatctcttgaactcaggagacagagatttcagtgagccgagatcacgccattgcactccagccacctgggcaacaagagcaaaactctgtctcaaaaaaaaaaagtacaaaagttagccgggcatggtggtgggcacctgtaatcccagctactcaggaggcagaggcaggagaatcacttgaacccgagaggtggagattgtagtgagccgagatcgcaccattgcactccagcctgggcaaaaagagtgaaactccgtctcaaaaaaaaaaagagagagagagttagtggcccagggtcaacggggggtatggagagatggtatgggggaaggggtctagcctagttggacttagattgttgggagagtctccccaagccttactggcgtccatgcccccgcccacagatcttccgctgcctgccatccaatgccacgcgttccctgcggactctccgggagtacgtggccgtggagcccttggccacggtcagtccccccttggctcggtctgagctcacccaggtccagggccacctggtccacttccccctcaagttcctagaggatgagtctttgctgcccccgctgggtagcaaggagggcatgatccccctagaagtgtggacatagttgaggcccccgtcagggagaggtcaccagctgctgtgccccaccacgtctggctccctgccccttaaccccaaggactgagggcagtgccctttgagatctggggaggcaggcattcctgaagggaactagaggtgttacagaggacccttacgtgagaaatagctgaaaagggcactcccaaccctgggctggggaggaggagagagtcccagagctcatcccccctgctgcccagtgcaaaccacttctccatgctgcaaaggagaagcacagctcctgccagggtgagcagggtcaagcctcttattccaggagaagggggctctgccccaggccctactacccattgttcccttcctcttcctgcccttgaaccccctccctgtcccagggccctcccagcccattgctgccaaggtggagggaaggataaagccacttctggcttcagcccccaccaggggaaggaaggagggcacattaactccctccaccagcctgctgacagacactaactttgtatccgttcaataagcatttcataaataaaggtgtagaaaa

SEQ ID NO: 13365 - DNA, 3391 bp, Homo sapiens
ctccggtctgctctcttggctccggaacccccgcgggcgctggctccgtctgccagggatgacggcgacccctgagagcctcttccccactggggacgaactggactccagccagctccagatggagtccgatgaggtggacaccctgaaggagggagaggacccagccgaccggatgcacccgtttctggccatctatgagcttcagtctctgaaagtgcaccccttggtgttcgcacctggggtccctgtcacagcccaggtggtgggcaccgaaagatataccagcggatccaaggtgggaacctgcactctgtattctgtccgcttgactcacggcgacttttcctggacaaccaagaagaaataccgtcattttcaggagctgcatcgggacctcctgagacacaaagtcttgatgagtctgctccctctggctcgatttgccgttgcctattctccagcccgagatgcaggcaacagagagatgccctctctaccccgggcaggtcctgagggctccaccagacatgcagccagcaaacagaaatacctggagaattacctcaaccgtctcttgaccatgtctttctatcgcaactaccatgccatgacagagttcctggaagtcagtcagctgtcctttatcccggacttgggccgcaaaggactggaggggatgatccggaagcgctcaggtggccaccgtgttcctggcctcacctgctgtggccgagaccaagtttgttatcgctggtccaagaggtggctggtggtgaaggactccttcctgctgtacatgtgcctcgagacaggtgccatctcatttgttcagctctttgaccctggctttgaggtgcaagtggggaaaaggagcacggaggcacggcacggcgtgcggatcgatacctcccacaggtccttgattctcaagtgcagcagctaccggcaggcacggtggtgggcccaagagatcactgagctggcacagggcccaggcagagacttcctacagctgcaccggcatgacagctacgccccaccccggcctgggaccttggcccggtggtttgtgaatggggcaggttactttgctgctgtggcagatgccatccttcgagctcaagaggagattttcatcacagactggtggttgagtcctgaggtttacctgaagcgtccggcccattcagatgactggagactggacattatgctcaagaggaaggcggaggagggtgtccgtgtgtctattctgctgtttaaagaagtggaattggccttgggcatcaacagtggctatagcaagagggcgctgatgctgctgcaccccaacataaaggtgatgcgtcacccagaccaagtgacgttgtgggcccatcatgagaagctcctggtggtggaccaagtggtagcattcctggggggactggaccttgcctatggccgctgggatgacctgcactaccgactgactgaccttggagactcctctgaatcagctgcctcccagcctcccaccccgcgcccagactcaccagccaccccagacctctctcacaaccaattcttctggctgggcaaggactacagcaatcttatcaccaaggactgggtgcagctggaccggcctttcgaagatttcattgacagggagacgacccctcggatgccatggcgggacgttggggtggtcgtccatggcctaccggcccgggaccttgcccggcacttcatccagcgctggaacttcaccaagaccaccaaggccaagtacaagactcccacatacccctacctgcttcccaagtctaccagcacggccaatcagctccccttcacacttccaggagggcagtgcaccaccgtacaggtcttgcgatcagtggaccgctggtcagcagggactctggagaactccatcctcaatgcctacctgcacaccatcagggagagccagcacttcctctacattgagaatcagttcttcattagctgctcagatgggcggacggttctgaacaaggtgggcgatgagattgtggacagaatcctgaaggcccacaaacaggggtggtgttaccgagtctacgtgcttttgcccttactccctggcttcgagggtgacatctccacgggcggtggcaactccatccaggccattctgcactttacttacaggaccctgtgtcgtggggagtattcaatcctgcatcgccttaaagcagccatggggacagcatggcgggactatatttccatctgcgggcttcgtacacacggagagctgggcgggcaccccgtctcggagctcatctacatccacagcaaggtgctcatcgcagatgaccggacagtcatcattggttctgcaaacatcaatgaccggagcttgctggggaagcgggacagtgagctggccgtgctgatcgaggacacagagacggaaccatccctcatgaatggggcagagtatcaggcgggcagtgtgattcttggagcaaatacccggccagacttggatctccgagaccccatctgtgatgacttcttccagttgtggcaagacatggctgagagcaacgccaatatctatgagcagatcttccgctgcctgccatccaatgccacgcgttccctgcggactctccgggagtacgtggccgtggagcccttggccacggtcagtccccccttggctcggtctgagctcacccaggtccagggccacctggtccacttccccctcaagttcctagaggatgagtctttgctgcccccgctgggtagcaaggagggcatgatccccctagaagtgtggacatagttgaggcccccgtcagggagaggtcaccagctgctgtgccccaccacgtctggctccctgccccttaaccccaaggactgagggcagtgccctttgagatctggggaggcaggcattcctgaagggaactagaggtgttacagaggacccttacgtgagaaatagctgaaaagggcactcccaaccctgggctggggaggaggagagagtcccagagctcatcccccctgctgcccagtgcaaaccacttctccatgctgcaaaggagaagcacagctcctgccagggtgagcagggtcaagcctcttattccaggagaagggggctctgccccaggccctactacccattgttcccttcctcttcctgcccttgaaccccctccctgtcccagggccctcccagcccattgctgccaaggtggagggaaggataaagccacttctggcttcagcccccaccaggggaaggaaggagggcacattaactccctccaccagcctgctgacagacactaactttgtatccgttcaataagcatttcataaataaaggtgtagaaaa

SEQ ID NO: 13366 - DNA, 1235 bp, Homo sapiens
ttggagactcctctgaatcagctgcctcccaggtaatccccctgaggccttcctgagcacccccaaactcagataagctcaatcaacaccatttcccagctccagccttaccccctcagtcattccaggccctgccaacctcagggttcctcagactttctgggactccaagaacccactttgaaagtgctgtaactggccgggagccatggcttatgcctgtaatcccagcactttgggaggccaaggcgggtggatcacctgaggtctggagttcgagaccagcctgaccgacatggtgaaaccctgtctctactaaaaatgcaaaaaattagctgggcatggtggcagttgcctgtcattgaagctactcgggaggctgaggcaggagaatcacttgaacccaggaggcggaggttgcagtgagccgagattgtgccattgtactccaccctgggcaacagagcgagactctgtctcaaaaaaaaaaaaaaaagtgctgtcacccacccagtcctttccccattttcactgaccatcaccccattcctctaaaagtgtcaaaggcaactggaggggagggctggggaatcagaccctctgtttcattcttcctctcggtctctctcactctttcagtgctcctctctttggccctggctctgtacagccccatgacttccccttgcccctggcttgggtgtgttccccctacagcctcccaccccgcgcccagactcaccagccaccccagacctctctcacaaccaattcttctggctgggcaaggactacagcaatcttatcaccaaggactgggtgcagctggaccggcctttcgaaggtgaagcctcccacccgccaaagccccagagagctgagagcagggtcagaagctggggctggtactgagagtgggatgagaggggtcaacggtggtacagccctccctctggcaggctctttctccctgccccaagtgtcccaaggagtccagccctgacatctcccctgactctcctgggaccccccagatttcattgacagggagacgacccctcggatgccatggcgggacgttggggtggtcgtccatggcctaccggcccgggaccttgcccggcacttcatccagcgctggaacttcaccaaggtgttcattccctccgataggggctggaggtagggagggagccagggcagattggcacctcctgctgactctgccatccctc

SEQ ID NO: 13367 - DNA, 360 bp, Homo sapiens
ttggagactcctctgaatcagctgcctcccagcctcccaccccgcgcccagactcaccagccaccccagacctctctcacaaccaattcttctggctgggcaaggactacagcaatcttatcaccaaggactgggtgcagctggaccggcctttcgaagatttcattgacagggagacgacccctcggatgccatggcgggacgttggggtggtcgtccatggcctaccggcccgggaccttgcccggcacttcatccagcgctggaacttcaccaaggtgttcattccctccgataggggctggaggtagggagggagccagggcagattggcacctcctgctgactctgccatccctc

SEQ ID NO: 13368 - DNA, 1927 bp, Homo sapiens
ggaacccccgcgggcgctggctccgtctgccagggtgagggggccgggaaggggcgcgcgggggtcccgggtctcggaaatcgggcggggacggaacgggctcgggctgcggggcctccagactcagtcgcacgctcagatttcgggatttctacccccggctgggatcgcgtaacttcctcattcccgcctggacccctgcccccggcccgcctggcctggcgtgagccccgtagccgcgcgctctccggaccacccagggccgcttccccgcgcagctgctgcgccgccccaggtcggagccttccgggcctggctgggtgttccccggggctctggttacgggacggggcggggggcggggggcgggactgggattgtggatgaaggactaaggtaggggatgggggctcgaaggggtcggtggggcgttgcaaactggtcaggcgtcatccgcgggcggtcaggaggccgtgggggaagaggaggatctggaagagatggaggacctgcgggagttaggatggggggcgggttctgcaggacagctcgcctccctgaggcttcccaatgttcctaggatgacggcgacccctgagagcctcttccccactggggacgaactggactccagccagctccagatggagtccgatgaggtggacaccctgaaggagggagaggacccaggtacacagggaagatggatggccctcagggaggagaggcgttcgggagccagggggctggggcctgttgtggtctacactcctcgactttctttcctcccagccgaccggatgcacccgtttctggccatctatgagcttcagtctctgaaagtgcaccccttggtgttcgcacctggggtccctgtcacagcccaggtggtgggcaccgaaagatataccagcggatccaaggtggccagactggccccagggagggggaaagggagggcggcccggaatggatccaaggtggctgggctggccccagggaaggggcaaaaggagggctggccagagtggggaggcggggacccacgcaggggacatccattcagttcctcatacccctaggtgggaacctgcactctgtattctgtccgcttgactcacggcgacttttcctggacaaccaagaagaaataccgtcattttcaggagctgcatcgggacctcctgagacacaaagtcttgatgagtctgctccctctggctcggtgagggcgaccggactgcttcctgtagagggcaggtgctccccaccctcctttctgtctgtctcaccccggggccacaacctttcctccctgcaactctggccactgtgctgcctcccctgaccccagttaccaggaaactttccctgctcagctttccctgtccatggttctgtgccagcatctcagctgggcgggatgcccaaaatgctcttggcagcctcacccttttctagtctccattcccagggtagggggcctccgttttgccagcctctaggccttttgtttgttttttgtttttgttttgtacaaggtctccctctgtcacccaggctagagtgcagtggtatgatcttggctcatggcaacctcctgggctcaagcagtcctcccgtctcagcctccagagtagctaggaccacagccaccacacccaactaatttttgtatattttgtagagatggggtgctgctgtgttgcccaggctggtcttaaattcctgagctcaagtgatccacctgctgcggcctccccaagtgctgggattccaggcgtgagccaccacgcctggccacctccaggcctcttcttttcctccgagccccatctccagtgttttcaggaaccagagcacccagcctcccagctcttacctgaccttcatccatcctttccacagatttgccgttgcctattct

SEQ ID NO: 13369 - DNA, 596 bp, Homo sapiens
ggaacccccgcgggcgctggctccgtctgccagggatgacggcgacccctgagagcctcttccccactggggacgaactggactccagccagctccagatggagtccgatgaggtggacaccctgaaggagggagaggacccagccgaccggatgcacccgtttctggccatctatgagcttcagtctctgaaagtgcaccccttggtgttcgcacctggggtccctgtcacagcccaggtggtgggcaccgaaagatataccagcggatccaaggtggccagactggccccagggagggggaaagggagggcggcccggaatggatccaaggtggctgggctggccccagggaaggggcaaaaggagggctggccagagtggggaggcggggacccacgcaggggacatccattcagttcctcatacccctaggtgggaacctgcactctgtattctgtccgcttgactcacggcgacttttcctggacaaccaagaagaaataccgtcattttcaggagctgcatcgggacctcctgagacacaaagtcttgatgagtctgctccctctggctcgatttgccgttgcctattct

SEQ ID NO: 13370 - DNA, 1720 bp, Homo sapiens
tcgatttattggtgttctttatgtatgatgtattaatcctcctgttctttagttgattaggttattgtgtctttttgtaatttttatttgtatttagcgcatatgggcaaacactattttgatgtgtctgataccacttgtgttctctgatcatttctgatctttgaccttgctgtcacctctgacccacgactgtcctccggtcttcactctccagagctttctggcttctgactcccctgacctccttggcttggcctccccccaggtttgtgaatggggcaggttactttgctgctgtggcagatgccatccttcgagctcaagaggagattttcatcacagactggtggtgagtgggaaaaggccccaacaacatggggcaggatagagcctggggcagatcagcattaggaggagaaggggggtgcagctggtggtctggggcttcgtttgcccctaatccactgccctgaatcccaggttgagtcctgaggtttacctgaagcgtccggcccattcagatgactggagactggacattatgctcaagaggaaggcggtgaggagagtggtcaggccgcagggggagggggttgcctgtgggtggaggttgattagcagggctgcagtgtgggagaattaggcagtctgaggcttcaggggagggaaaagtgtccatcctggcccagcacctgtcagacatcacctccgccctctccctctgccctaaggagaactgacaacttcctcttcatgctccctccacctggcagagacttccctcccagtatacataatactttattgtgttatctgggggtatacatgtctatctctctcactggactagttaatatcactgttccactacaaggcacagtacctgccatggagggggcatgtgtggtgttgatggacaggaagaaggatgcatggatgatgcagggtggctgggcaggtggatggatagaggacagaaagggtgatggatggaaggatatgagttggaaaggtggagggctaggagggtaggcaggtagatggatgaatgatagacggtacataaagggatgagtaaatgcttgggaagatggatggatggatgatgaagggtgggtggatagatgtgtggatgggtgagtgggtgagcacacagatgacatttagtctaagtctgtggcaagcagcaaagcagggcatatgtggcagagcctctaggatctccagacaagctggagggacacacgtggaaaaggtttgggagtgtggaaaggggctactctgggagaggcactaggatctgattccccaactcaccaccaggaggagggtgtccgtgtgtctattctgctgtttaaagaagtggaattggccttgggcatcaacagtggctatagcaagagggcgctgatgctgctgcaccccaacataaaggtgactctcggcctcagagaccctcccacatgacagcccttctccccacactgtcccagcccccagcgctcccgctccctgatggtctcatctttccatctttcctctctccctcccagtacctcctgttttccttcacctaaacccaccctcatgaaccctccatgcctgctccaggtgatgcgtcacccagaccaagtgacgttgtgggcccatcatgagaagctcctggtggtggaccaagtggtagcattcctggggggactggaccttgcctatggcc

SEQ ID NO: 13371 - DNA, 648 bp, Homo sapiens
tcgatttattggtgttctttatgtatgatgtattaatcctcctgttctttagttgattaggttattgtgtctttttgtaatttttatttgtatttagcgcatatgggcaaacactattttgatgtgtctgataccacttgtgttctctgatcatttctgatctttgaccttgctgtcacctctgacccacgactgtcctccggtcttcactctccagagctttctggcttctgactcccctgacctccttggcttggcctccccccaggtttgtgaatggggcaggttactttgctgctgtggcagatgccatccttcgagctcaagaggagattttcatcacagactggtggttgagtcctgaggtttacctgaagcgtccggcccattcagatgactggagactggacattatgctcaagaggaaggcggaggagggtgtccgtgtgtctattctgctgtttaaagaagtggaattggccttgggcatcaacagtggctatagcaagagggcgctgatgctgctgcaccccaacataaaggtgatgcgtcacccagaccaagtgacgttgtgggcccatcatgagaagctcctggtggtggaccaagtggtagcattcctggggggactggaccttgcctatggcc

SEQ ID NO: 13372 - DNA, 11203 bp, Homo sapiens
cttggctccggaacccccgcgggcgctggctccgtctgccagggtgagggggccgggaaggggcgcgcgggggtcccgggtctcggaaatcgggcggggacggaacgggctcgggctgcggggcctccagactcagtcgcacgctcagatttcgggatttctacccccggctgggatcgcgtaacttcctcattcccgcctggacccctgcccccggcccgcctggcctggcgtgagccccgtagccgcgcgctctccggaccacccagggccgcttccccgcgcagctgctgcgccgccccaggtcggagccttccgggcctggctgggtgttccccggggctctggttacgggacggggcggggggcggggggcgggactgggattgtggatgaaggactaaggtaggggatgggggctcgaaggggtcggtggggcgttgcaaactggtcaggcgtcatccgcgggcggtcaggaggccgtgggggaagaggaggatctggaagagatggaggacctgcgggagttaggatggggggcgggttctgcaggacagctcgcctccctgaggcttcccaatgttcctaggatgacggcgacccctgagagcctcttccccactggggacgaactggactccagccagctccagatggagtccgatgaggtggacaccctgaaggagggagaggacccaggtacacagggaagatggatggccctcagggaggagaggcgttcgggagccagggggctggggcctgttgtggtctacactcctcgactttctttcctcccagccgaccggatgcacccgtttctggccatctatgagcttcagtctctgaaagtgcaccccttggtgttcgcacctggggtccctgtcacagcccaggtggtgggcaccgaaagatataccagcggatccaaggtggccagactggccccagggagggggaaagggagggcggcccggaatggatccaaggtggctgggctggccccagggaaggggcaaaaggagggctggccagagtggggaggcggggacccacgcaggggacatccattcagttcctcatacccctaggtgggaacctgcactctgtattctgtccgcttgactcacggcgacttttcctggacaaccaagaagaaataccgtcattttcaggagctgcatcgggacctcctgagacacaaagtcttgatgagtctgctccctctggctcggtgagggcgaccggactgcttcctgtagagggcaggtgctccccaccctcctttctgtctgtctcaccccggggccacaacctttcctccctgcaactctggccactgtgctgcctcccctgaccccagttaccaggaaactttccctgctcagctttccctgtccatggttctgtgccagcatctcagctgggcgggatgcccaaaatgctcttggcagcctcacccttttctagtctccattcccagggtagggggcctccgttttgccagcctctaggccttttgtttgttttttgtttttgttttgtacaaggtctccctctgtcacccaggctagagtgcagtggtatgatcttggctcatggcaacctcctgggctcaagcagtcctcccgtctcagcctccagagtagctaggaccacagccaccacacccaactaatttttgtatattttgtagagatggggtgctgctgtgttgcccaggctggtcttaaattcctgagctcaagtgatccacctgctgcggcctccccaagtgctgggattccaggcgtgagccaccacgcctggccacctccaggcctcttcttttcctccgagccccatctccagtgttttcaggaaccagagcacccagcctcccagctcttacctgaccttcatccatcctttccacagatttgccgttgcctattctccagcccgagatgcaggcaacagagagatgccctctctaccccgggcaggtcctgagggctccaccagacatgcagccagcaaacaggtgggaccagatgccaggtcctccgggaaggcattggaggtgcaaatggctcggtcccatctgtctctctctctctctcatctccacttcagaaatacctggagaattacctcaaccgtctcttgaccatgtctttctatcgcaactaccatgccatggtaaggtccaggggccgattttagatgtggagcaggattatcagaccctcggggaggagggccaggggccccagggtctgaggggctgaaagccaggtgtctcctccgggcttttgttttcctctgcagacagagttcctggaagtcagtcagctgtcctttatcccggacttgggccgcaaaggactgtgagtgtctggcccccttcacccaggcatccgtagacatcactcttaatttctccctgcctgagattggggcaagcagtgcagggtgggctgggggtctggagtcctcatcccgcctctcttcctgattgtcccacagggaggggatgatccggaagcgctcaggtggccaccgtgttcctggcctcacctgctgtggccgagaccaagtttgttatcgctggtccaagaggtacgggctatggccaagcagctgggcagtgggtgggggtgaggaagaaaattttgagggcagagaggaacacacggagcccttctgctctaggtggctggtggtgaaggactccttcctgctgtacatgtgcctcgagacaggtgccatctcatttgttcagctctttgaccctggctttgaggtgcaagtggggaaaaggagcacggaggcacggcacggcgtgcggatcgatacctcccacaggtgaggcctccctggggtgagagacaccagctgagtggtgagcccacccacggccttgctgggagttgagaaagagagaccacaggagagaggaaggcttttccacctccctggatcgggacatagttttgaaccaggaactggtctagccagatgcttgggactgctcttagactgggcccagagaaaggggattagtagaagcctgggaagggaactgctgacataaacgaaattccatttgttcatttgttcattcaacaaacccgagtgcctggtacaatactggttgctgatgcaatactaggatccaactatgagtaaggtggatatggccgggcgcggtggctcacacctacaatcccagcactttgggaggccgaggcgggtggatcacctgaggtcaggagttcgagaccagcccagccaacatgctaaaaccttgtctctactaaaaatacaaaaattagccgggcgtggtggtgcgtgcctgtaatcccagctatttgggaggctgaggcaggagaatcgcttgaagctggggtgcagaggttgcagtgagcagagatcgcaccactgcactccagcctgggggacaagagctaaactctgtctcaaaaataaataaataaataaggcagatacatacacgccctatccctgtgcagttgtgattagggactaagggaggaagtgggaaaggggaggtctctaggcaagatcacaggtatggagggcgaggatttatggacatctcatcgttcccatccaggtccttgattctcaagtgcagcagctaccggcaggcacggtggtgggcccaagagatcactgagctggcacagggcccaggcagagacttcctacagctgcaccggcatgacagctacgccccaccccggcctgggaccttggcccggtggtgagacactgacatcccttctgagcttgtctgtggctttcttgaccccctgtgtaatctctgagtccttcatcctctcttttctcatctgaaccctcctgacctcaatgacccgccccgtgacttctttaatcttcctgacctttgacatctttaaccacattgatctctctgatttcgcgccgacctttctgacccccaaacttggtcatctcttctgacccttgacctctctaacctcctataaccttttaaacccctctctacaatactgaccctctctgttctccatgatcttctcaaatctctctgatttagtccttcatttaataaacattttcttttctttttttttttttttttttttgagagagagttttgttctgttgatctcggctcactgcaacctccgcctcccaggttcaagcgattcttctgcctcagcctcccgagtagccgggattacaggcgcccaccaccacacctggctaatttttgtatttttagtagagacgggggtttcaccatgttggccaggctcttctcgaactcctgacctcgggtgatccgcccgcctcggcctcccgaagtgctgggattacaggcgtgagccaccgtgcccagccttaataaacatttttctaagcacctagcagtgctggcagtaacacacagtcctctctgggttagggaagtaggtgatcaaatcgtgaaacaatgtgaacttgccgtactggtgataggtagaaggtgacacgcacagacaggaagtacctggcccagcagggatatcaggacaggtttccaggaggtggtgaccctcaggtagttttgctttaaatcagagactgacacaatattaattttgttggtttttgttggagacagtgtcttgctctgtcaccaggcgtgtagtgcagtagtgtgatcatggctcacggcaacttcaacctcccaggctcaaatcatcctcctgcctcagcctcccaagtagctgagactacagacacatgccaccacacccggctaattaaaaacatttttttttacaaaaaattttaaaaattagacgggtgtggtctcgaactcctgggctcaagggatcatcctgcctcggcctccccaaagtgctggattgcaggcatgagcgacagtgcctggcctatatacttttttttttttaaggcagagtttcgctcttgttgcccaggctagcgtgcagtggcacaatctcagctcactgcaacctcagcctcccaggttcaagggattctcctgcctcagcctcccaagtagctgggatcacaggtgcatgccaccacacccagctaatttttgttttggttttttttttttttttttgagatggagtctgtctctgtcaccaggctggagtgcagtggcaggatcccacctcactgcaacctctgactccccggttcaagtgattcttctgcctcagcctcctgagtagctaggattacaggcatatgccaccatgtccagctaatttttgtatttttagtagagccagggtttcaccatgttggccaggatggtctcgatctcctgacttcgtgatctgcccacctcggcctcccaaagtgctgggattacaggcttgagccactgcacctggctataaacttctaaaacagccaaaaccaatccacagtgatggaaatcagatcagcagttgcctgtggcagggtatggggaaatgattgcctatagtggggcacacgagggaacattccaggacgataaaaatgtcctatattttgataggactggtgattgcgtgggaacatacacttgctgatcctcatggaactatacaagataaagaaaatgcagaacagtccaggcacagaagacagaaatagctcagggtgtttgggaaccaccaggacatattgttgttactgagtgaggaggagcagtcagaggagaagctgggagtcagtggcacctgatctcacagggtcccatgtgctaatatcacaggcacacagggcagtcatggaaggaagttttgtttgttcgtttgttttgttttggtttggtttggtttttgagatggagtctggctctgtcgcccaagctggagtgcagtggcgcgataccagctcactgcagtctctgccccctgggttcaagcgattctcctgcctcggcctcctgagtagctgggattacaggcgtgcaccactatgctcagctgatttttgtatttttagtagagataggatttcaccatgttggccaggctggtcacgaactcctgaccttaagtgatccacccgcttcggcttcccaaagggctgggattacaggcatgagccaccttgcccagccttcctgcatattttcacatgtgcatgcacgtgttacttttgtttcaacataaatgagatcatgcaacctcttctgtgacttattttttcacttaatacctgtgtgagagattagacacttatattatttcccatttttcactcttacaaacaatgtgatgaacacaacatttgcctaggcattgtattagatgtattcctagacatgtaattaccatgtatatttaatgatattaaagggtatatgcatttaatattttgatactgctgaccagtcgctttggctcatgcctgtaatcccagcactttgggaggccgaggcgggtagatcattggggtcaggagttcaagaccaacctggccaacatggcaaaaacccgtctctactaaaaatacaaaaattagccaggcgtggtggcgggcgcctgtaatttcagttacttgggaggctgagacaggaaaattgcttgaacccaagaggcggaggttgcagtgagccaagatcatgccattgcactccagcctgggtgacagagcgggacaccatctccaaaaagctatatatatattttttgatactgccaaattgtctcctaaaagttatattcccatagtctatgagaatacccacttccccagcatattgaatattgatattgaatgttaccagtgatttgaattattaccaatctaatggattttttaaatgtaatttcattttaatttcgttgtttactagtgaaactgaacatttgccacgattggccattttaatttctctgtgaactgtcagttcttactctttgctcatttttcagttggctcatgtgactttttcttgtcgatttattggtgttctttatgtatgatgtattaatcctcctgttctttagttgattaggttattgtgtctttttgtaatttttatttgtatttagcgcatatgggcaaacactattttgatgtgtctgataccacttgtgttctctgatcatttctgatctttgaccttgctgtcacctctgacccacgactgtcctccggtcttcactctccagagctttctggcttctgactcccctgacctccttggcttggcctccccccaggtttgtgaatggggcaggttactttgctgctgtggcagatgccatccttcgagctcaagaggagattttcatcacagactggtggtgagtgggaaaaggccccaacaacatggggcaggatagagcctggggcagatcagcattaggaggagaaggggggtgcagctggtggtctggggcttcgtttgcccctaatccactgccctgaatcccaggttgagtcctgaggtttacctgaagcgtccggcccattcagatgactggagactggacattatgctcaagaggaaggcggtgaggagagtggtcaggccgcagggggagggggttgcctgtgggtggaggttgattagcagggctgcagtgtgggagaattaggcagtctgaggcttcaggggagggaaaagtgtccatcctggcccagcacctgtcagacatcacctccgccctctccctctgccctaaggagaactgacaacttcctcttcatgctccctccacctggcagagacttccctcccagtatacataatactttattgtgttatctgggggtatacatgtctatctctctcactggactagttaatatcactgttccactacaaggcacagtacctgccatggagggggcatgtgtggtgttgatggacaggaagaaggatgcatggatgatgcagggtggctgggcaggtggatggatagaggacagaaagggtgatggatggaaggatatgagttggaaaggtggagggctaggagggtaggcaggtagatggatgaatgatagacggtacataaagggatgagtaaatgcttgggaagatggatggatggatgatgaagggtgggtggatagatgtgtggatgggtgagtgggtgagcacacagatgacatttagtctaagtctgtggcaagcagcaaagcagggcatatgtggcagagcctctaggatctccagacaagctggagggacacacgtggaaaaggtttgggagtgtggaaaggggctactctgggagaggcactaggatctgattccccaactcaccaccaggaggagggtgtccgtgtgtctattctgctgtttaaagaagtggaattggccttgggcatcaacagtggctatagcaagagggcgctgatgctgctgcaccccaacataaaggtgactctcggcctcagagaccctcccacatgacagcccttctccccacactgtcccagcccccagcgctcccgctccctgatggtctcatctttccatctttcctctctccctcccagtacctcctgttttccttcacctaaacccaccctcatgaaccctccatgcctgctccaggtgatgcgtcacccagaccaagtgacgttgtgggcccatcatgagaagctcctggtggtggaccaagtggtagcattcctggggggactggaccttgcctatggccgctgggatgacctgcactaccgactgactgaccttggagactcctctgaatcagctgcctcccaggtaatccccctgaggccttcctgagcacccccaaactcagataagctcaatcaacaccatttcccagctccagccttaccccctcagtcattccaggccctgccaacctcagggttcctcagactttctgggactccaagaacccactttgaaagtgctgtaactggccgggagccatggcttatgcctgtaatcccagcactttgggaggccaaggcgggtggatcacctgaggtctggagttcgagaccagcctgaccgacatggtgaaaccctgtctctactaaaaatgcaaaaaattagctgggcatggtggcagttgcctgtcattgaagctactcgggaggctgaggcaggagaatcacttgaacccaggaggcggaggttgcagtgagccgagattgtgccattgtactccaccctgggcaacagagcgagactctgtctcaaaaaaaaaaaaaaaagtgctgtcacccacccagtcctttccccattttcactgaccatcaccccattcctctaaaagtgtcaaaggcaactggaggggagggctggggaatcagaccctctgtttcattcttcctctcggtctctctcactctttcagtgctcctctctttggccctggctctgtacagccccatgacttccccttgcccctggcttgggtgtgttccccctacagcctcccaccccgcgcccagactcaccagccaccccagacctctctcacaaccaattcttctggctgggcaaggactacagcaatcttatcaccaaggactgggtgcagctggaccggcctttcgaaggtgaagcctcccacccgccaaagccccagagagctgagagcagggtcagaagctggggctggtactgagagtgggatgagaggggtcaacggtggtacagccctccctctggcaggctctttctccctgccccaagtgtcccaaggagtccagccctgacatctcccctgactctcctgggaccccccagatttcattgacagggagacgacccctcggatgccatggcgggacgttggggtggtcgtccatggcctaccggcccgggaccttgcccggcacttcatccagcgctggaacttcaccaaggtgttcattccctccgataggggctggaggtagggagggagccagggcagattggcacctcctgctgactctgccatccctccacgtcagaccaccaaggccaagtacaagactcccacatacccctacctgcttcccaagtctaccagcacggccaatcagctccccttcacacttccaggagggcagtgcaccaccgtacaggtgaggccccccacttcagccagccctcccctttgtctccttcagcctaacaccccaacccactctccctggtgtgagagctgcccacactctcctttcctggggttaagaagcacatcacggccaggcacggtggctcacgcctataatcccagcactttggaaggccaaggcaggcggatcacaaggtccggagatcgagaccatcctggctaacatggtgaaaccccatctctactaaaaatacaaaaaattagccgggcgtggtggtgcgtacctgtagtcccagctactagggaggctaaggcaggagaatcgcttgaacccaggaggaggatgttgtagtgagctgagatcacgccactgcactccagcctgggcaacagagtgagactccatctcaaaaataaaataaaaggccaggcgcagtggcttacgcctgtaatcccagcactttgggaggccgaggcaggcggatcacgaggtccggagagcaagaccatcctggctaacaccatgaaaccctgtctctactaaaaatacaaaaaattagccgggagtggtggtgcgtacctgtagtcccagctacttaggaggctgaggcaggagaatggcgtgaacccaggaggaggagcttgcagtgagcggagatcatgccactgcactccagcctaggcaacagagcgagactctgtcttaaaaaagaaaagaaatgaagcacatcgcattcaccattccctaggtcttgcgatcagtggaccgctggtcagcagggactctggagaactccatcctcaatgcctacctgcacaccatcagggagagccagcacttcctctacattgaggtctgactgggaggaggtgggggagagcatggaaggggtgtcccaggagagagacctggggaatgagtggagtcagtcattgagggctggtggagcagaagcagacgcctggagcctgggaccaaggctggaggccgaggacagggccaggggccaggctgctgatgtctgtctctgattcttgccccagaatcagttcttcattagctgctcagatgggcggacggttctgaacaaggtgggcgatgagattgtggacagaatcctgaaggcccacaa

SEQ ID NO: 13373 - DNA, 2278 bp, Homo sapiens
cttggctccggaacccccgcgggcgctggctccgtctgccagggatgacggcgacccctgagagcctcttccccactggggacgaactggactccagccagctccagatggagtccgatgaggtggacaccctgaaggagggagaggacccagccgaccggatgcacccgtttctggccatctatgagcttcagtctctgaaagtgcaccccttggtgttcgcacctggggtccctgtcacagcccaggtggtgggcaccgaaagatataccagcggatccaaggtgggaacctgcactctgtattctgtccgcttgactcacggcgacttttcctggacaaccaagaagaaataccgtcattttcaggagctgcatcgggacctcctgagacacaaagtcttgatgagtctgctccctctggctcggtgagggcgaccggactgcttcctgtagagggcagatttgccgttgcctattctccagcccgagatgcaggcaacagagagatgccctctctaccccgggcaggtcctgagggctccaccagacatgcagccagcaaacagaaatacctggagaattacctcaaccgtctcttgaccatgtctttctatcgcaactaccatgccatgacagagttcctggaagtcagtcagctgtcctttatcccggacttgggccgcaaaggactggaggggatgatccggaagcgctcaggtggccaccgtgttcctggcctcacctgctgtggccgagaccaagtttgttatcgctggtccaagaggtggctggtggtgaaggactccttcctgctgtacatgtgcctcgagacaggtgccatctcatttgttcagctctttgaccctggctttgaggtgcaagtggggaaaaggagcacggaggcacggcacggcgtgcggatcgatacctcccacaggtccttgattctcaagtgcagcagctaccggcaggcacggtggtgggcccaagagatcactgagctggcacagggcccaggcagagacttcctacagctgcaccggcatgacagctacgccccaccccggcctgggaccttggcccggtggtttgtgaatggggcaggttactttgctgctgtggcagatgccatccttcgagctcaagaggagattttcatcacagactggtggttgagtcctgaggtttacctgaagcgtccggcccattcagatgactggagactggacattatgctcaagaggaaggcggaggagggtgtccgtgtgtctattctgctgtttaaagaagtggaattggccttgggcatcaacagtggctatagcaagagggcgctgatgctgctgcaccccaacataaaggtgatgcgtcacccagaccaagtgacgttgtgggcccatcatgagaagctcctggtggtggaccaagtggtagcattcctggggggactggaccttgcctatggccgctgggatgacctgcactaccgactgactgaccttggagactcctctgaatcagctgcctcccagcctcccaccccgcgcccagactcaccagccaccccagacctctctcacaaccaattcttctggctgggcaaggactacagcaatcttatcaccaaggactgggtgcagctggaccggcctttcgaagatttcattgacagggagacgacccctcggatgccatggcgggacgttggggtggtcgtccatggcctaccggcccgggaccttgcccggcacttcatccagcgctggaacttcaccaagaccaccaaggccaagtacaagactcccacatacccctacctgcttcccaagtctaccagcacggccaatcagctccccttcacacttccaggagggcagtgcaccaccgtacaggtcttgcgatcagtggaccgctggtcagcagggactctggagaactccatcctcaatgcctacctgcacaccatcagggagagccagcacttcctctacattgaggtctgactgggaggaggtgggggagagcatggaaggggtgtcccaggagagagacctggggaatgagtggagtcagtcattgagggctggtggagcagaagcagacgcctggagcctgggaccaaggctggaggccgaggacagggccaggggccaggctgctgatgtctgtctctgattcttgccccagaatcagttcttcattagctgctcagatgggcggacggttctgaacaaggtgggcgatgagattgtggacagaatcctgaaggcccacaa

SEQ ID NO: 13374 - DNA, 1764 bp, Homo sapiens
actgggattgtggatgaaggactaaggtaggggatgggggctcgaaggggtcggtggggcgttgcaaactggtcaggcgtcatccgcgggcggtcaggaggccgtgggggaagaggaggatctggaagagatggaggacctgcgggagttaggatggggggcgggttctgcaggacagctcgcctccctgaggcttcccaatgttcctaggatgacggcgacccctgagagcctcttccccactggggacgaactggactccagccagctccagatggagtccgatgaggtggacaccctgaaggagggagaggacccaggtacacagggaagatggatggccctcagggaggagaggcgttcgggagccagggggctggggcctgttgtggtctacactcctcgactttctttcctcccagccgaccggatgcacccgtttctggccatctatgagcttcagtctctgaaagtgcaccccttggtgttcgcacctggggtccctgtcacagcccaggtggtgggcaccgaaagatataccagcggatccaaggtggccagactggccccagggagggggaaagggagggcggcccggaatggatccaaggtggctgggctggccccagggaaggggcaaaaggagggctggccagagtggggaggcggggacccacgcaggggacatccattcagttcctcatacccctaggtgggaacctgcactctgtattctgtccgcttgactcacggcgacttttcctggacaaccaagaagaaataccgtcattttcaggagctgcatcgggacctcctgagacacaaagtcttgatgagtctgctccctctggctcggtgagggcgaccggactgcttcctgtagagggcaggtgctccccaccctcctttctgtctgtctcaccccggggccacaacctttcctccctgcaactctggccactgtgctgcctcccctgaccccagttaccaggaaactttccctgctcagctttccctgtccatggttctgtgccagcatctcagctgggcgggatgcccaaaatgctcttggcagcctcacccttttctagtctccattcccagggtagggggcctccgttttgccagcctctaggccttttgtttgttttttgtttttgttttgtacaaggtctccctctgtcacccaggctagagtgcagtggtatgatcttggctcatggcaacctcctgggctcaagcagtcctcccgtctcagcctccagagtagctaggaccacagccaccacacccaactaatttttgtatattttgtagagatggggtgctgctgtgttgcccaggctggtcttaaattcctgagctcaagtgatccacctgctgcggcctccccaagtgctgggattccaggcgtgagccaccacgcctggccacctccaggcctcttcttttcctccgagccccatctccagtgttttcaggaaccagagcacccagcctcccagctcttacctgaccttcatccatcctttccacagatttgccgttgcctattctccagcccgagatgcaggcaacagagagatgccctctctaccccgggcaggtcctgagggctccaccagacatgcagccagcaaacaggtgggaccagatgccaggtcctccgggaaggcattggaggtgcaaatggctcggtcccatctgtctctctctctctctcatctccacttcagaaatacctggagaattacctcaaccgtc

SEQ ID NO: 13375 - DNA, 544 bp, Homo sapiens
actgggattgtggatgaaggactaaggatgacggcgacccctgagagcctcttccccactggggacgaactggactccagccagctccagatggagtccgatgaggtggacaccctgaaggagggagaggacccagccgaccggatgcacccgtttctggccatctatgagcttcagtctctgaaagtgcaccccttggtgttcgcacctggggtccctgtcacagcccaggtggtgggcaccgaaagatataccagcggatccaaggtgggaacctgcactctgtattctgtccgcttgactcacggcgacttttcctggacaaccaagaagaaataccgtcattttcaggagctgcatcgggacctcctgagacacaaagtcttgatgagtctgctccctctggctcgatttgccgttgcctattctccagcccgagatgcaggcaacagagagatgccctctctaccccgggcaggtcctgagggctccaccagacatgcagccagcaaacagaaatacctggagaattacctcaaccgtc

SEQ ID NO: 13376 - DNA, 4748 bp, Homo sapiens
tgattctcaagtgcagcagctaccggcaggcacggtggtgggcccaagagatcactgagctggcacagggcccaggcagagacttcctacagctgcaccggcatgacagctacgccccaccccggcctgggaccttggcccggtggtgagacactgacatcccttctgagcttgtctgtggctttcttgaccccctgtgtaatctctgagtccttcatcctctcttttctcatctgaaccctcctgacctcaatgacccgccccgtgacttctttaatcttcctgacctttgacatctttaaccacattgatctctctgatttcgcgccgacctttctgacccccaaacttggtcatctcttctgacccttgacctctctaacctcctataaccttttaaacccctctctacaatactgaccctctctgttctccatgatcttctcaaatctctctgatttagtccttcatttaataaacattttcttttctttttttttttttttttttttgagagagagttttgttctgttgatctcggctcactgcaacctccgcctcccaggttcaagcgattcttctgcctcagcctcccgagtagccgggattacaggcgcccaccaccacacctggctaatttttgtatttttagtagagacgggggtttcaccatgttggccaggctcttctcgaactcctgacctcgggtgatccgcccgcctcggcctcccgaagtgctgggattacaggcgtgagccaccgtgcccagccttaataaacatttttctaagcacctagcagtgctggcagtaacacacagtcctctctgggttagggaagtaggtgatcaaatcgtgaaacaatgtgaacttgccgtactggtgataggtagaaggtgacacgcacagacaggaagtacctggcccagcagggatatcaggacaggtttccaggaggtggtgaccctcaggtagttttgctttaaatcagagactgacacaatattaattttgttggtttttgttggagacagtgtcttgctctgtcaccaggcgtgtagtgcagtagtgtgatcatggctcacggcaacttcaacctcccaggctcaaatcatcctcctgcctcagcctcccaagtagctgagactacagacacatgccaccacacccggctaattaaaaacatttttttttacaaaaaattttaaaaattagacgggtgtggtctcgaactcctgggctcaagggatcatcctgcctcggcctccccaaagtgctggattgcaggcatgagcgacagtgcctggcctatatacttttttttttttaaggcagagtttcgctcttgttgcccaggctagcgtgcagtggcacaatctcagctcactgcaacctcagcctcccaggttcaagggattctcctgcctcagcctcccaagtagctgggatcacaggtgcatgccaccacacccagctaatttttgttttggttttttttttttttttttgagatggagtctgtctctgtcaccaggctggagtgcagtggcaggatcccacctcactgcaacctctgactccccggttcaagtgattcttctgcctcagcctcctgagtagctaggattacaggcatatgccaccatgtccagctaatttttgtatttttagtagagccagggtttcaccatgttggccaggatggtctcgatctcctgacttcgtgatctgcccacctcggcctcccaaagtgctgggattacaggcttgagccactgcacctggctataaacttctaaaacagccaaaaccaatccacagtgatggaaatcagatcagcagttgcctgtggcagggtatggggaaatgattgcctatagtggggcacacgagggaacattccaggacgataaaaatgtcctatattttgataggactggtgattgcgtgggaacatacacttgctgatcctcatggaactatacaagataaagaaaatgcagaacagtccaggcacagaagacagaaatagctcagggtgtttgggaaccaccaggacatattgttgttactgagtgaggaggagcagtcagaggagaagctgggagtcagtggcacctgatctcacagggtcccatgtgctaatatcacaggcacacagggcagtcatggaaggaagttttgtttgttcgtttgttttgttttggtttggtttggtttttgagatggagtctggctctgtcgcccaagctggagtgcagtggcgcgataccagctcactgcagtctctgccccctgggttcaagcgattctcctgcctcggcctcctgagtagctgggattacaggcgtgcaccactatgctcagctgatttttgtatttttagtagagataggatttcaccatgttggccaggctggtcacgaactcctgaccttaagtgatccacccgcttcggcttcccaaagggctgggattacaggcatgagccaccttgcccagccttcctgcatattttcacatgtgcatgcacgtgttacttttgtttcaacataaatgagatcatgcaacctcttctgtgacttattttttcacttaatacctgtgtgagagattagacacttatattatttcccatttttcactcttacaaacaatgtgatgaacacaacatttgcctaggcattgtattagatgtattcctagacatgtaattaccatgtatatttaatgatattaaagggtatatgcatttaatattttgatactgctgaccagtcgctttggctcatgcctgtaatcccagcactttgggaggccgaggcgggtagatcattggggtcaggagttcaagaccaacctggccaacatggcaaaaacccgtctctactaaaaatacaaaaattagccaggcgtggtggcgggcgcctgtaatttcagttacttgggaggctgagacaggaaaattgcttgaacccaagaggcggaggttgcagtgagccaagatcatgccattgcactccagcctgggtgacagagcgggacaccatctccaaaaagctatatatatattttttgatactgccaaattgtctcctaaaagttatattcccatagtctatgagaatacccacttccccagcatattgaatattgatattgaatgttaccagtgatttgaattattaccaatctaatggattttttaaatgtaatttcattttaatttcgttgtttactagtgaaactgaacatttgccacgattggccattttaatttctctgtgaactgtcagttcttactctttgctcatttttcagttggctcatgtgactttttcttgtcgatttattggtgttctttatgtatgatgtattaatcctcctgttctttagttgattaggttattgtgtctttttgtaatttttatttgtatttagcgcatatgggcaaacactattttgatgtgtctgataccacttgtgttctctgatcatttctgatctttgaccttgctgtcacctctgacccacgactgtcctccggtcttcactctccagagctttctggcttctgactcccctgacctccttggcttggcctccccccaggtttgtgaatggggcaggttactttgctgctgtggcagatgccatccttcgagctcaagaggagattttcatcacagactggtggtgagtgggaaaaggccccaacaacatggggcaggatagagcctggggcagatcagcattaggaggagaaggggggtgcagctggtggtctggggcttcgtttgcccctaatccactgccctgaatcccaggttgagtcctgaggtttacctgaagcgtccggcccattcagatgactggagactggacattatgctcaagaggaaggcggtgaggagagtggtcaggccgcagggggagggggttgcctgtgggtggaggttgattagcagggctgcagtgtgggagaattaggcagtctgaggcttcaggggagggaaaagtgtccatcctggcccagcacctgtcagacatcacctccgccctctccctctgccctaaggagaactgacaacttcctcttcatgctccctccacctggcagagacttccctcccagtatacataatactttattgtgttatctgggggtatacatgtctatctctctcactggactagttaatatcactgttccactacaaggcacagtacctgccatggagggggcatgtgtggtgttgatggacaggaagaaggatgcatggatgatgcagggtggctgggcaggtggatggatagaggacagaaagggtgatggatggaaggatatgagttggaaaggtggagggctaggagggtaggcaggtagatggatgaatgatagacggtacataaagggatgagtaaatgcttgggaagatggatggatggatgatgaagggtgggtggatagatgtgtggatgggtgagtgggtgagcacacagatgacatttagtctaagtctgtggcaagcagcaaagcagggcatatgtggcagagcctctaggatctccagacaagctggagggacacacgtggaaaaggtttgggagtgtggaaaggggctactctgggagaggcactaggatctgattccccaactcaccaccaggaggagggtgtccgtgtgtctattctgctgtttaaagaagtggaattggccttgggcatcaacagtggctatagcaaga

SEQ ID NO: 13377 - DNA, 438 bp, Homo sapiens
tgattctcaagtgcagcagctaccggcaggcacggtggtgggcccaagagatcactgagctggcacagggcccaggcagagacttcctacagctgcaccggcatgacagctacgccccaccccggcctgggaccttggcccggtgagctttctggcttctgactcccctgacctccttggcttggcctccccccaggtttgtgaatggggcaggttactttgctgctgtggcagatgccatccttcgagctcaagaggagattttcatcacagactggtggttgagtcctgaggtttacctgaagcgtccggcccattcagatgactggagactggacattatgctcaagaggaaggcggaggagggtgtccgtgtgtctattctgctgtttaaagaagtggaattggccttgggcatcaacagtggctatagcaaga

SEQ ID NO: 13378 - DNA, 1156 bp, Homo sapiens
ctgcctcatcctcccaaagtgctgggaatacaggcgtgagccaccgcacccagccaattttgaattacctgagtagggacaatgtaacttttctggtactcaggttctctaaggatcttaatctggccctgctgggacccctttctcctatagtgtgattcttggagcaaatacccggccagacttggatctccgagaccccatctgtgatgacttcttccagttgtggcaagacatggctgagagcaacgccaatatctatgagcaggtgggaacttgggaggggtgggggagagtggcctggggaaatttgtggattatcctgctcagggtaggatggagagaagcgccaccatacagtcattattggaagggggatgagggcctggggacatttgctatcaagagatttagtggcccaggccgggtgcagtggctcatgcctgtaatcccagcactttgggaggccaaggcccggtggatcacctgaggtcaggagtttgagatcagcctcccaacatggcaaaaccccatctctactaaaaatacaaaaaaattagctaggtgtggctgggaggctgaggcaggagaatctcttgaactcaggagacagagatttcagtgagccgagatcacgccattgcactccagccacctgggcaacaagagcaaaactctgtctcaaaaaaaaaaagtacaaaagttagccgggcatggtggtgggcacctgtaatcccagctactcaggaggcagaggcaggagaatcacttgaacccgagaggtggagattgtagtgagccgagatcgcaccattgcactccagcctgggcaaaaagagtgaaactccgtctcaaaaaaaaaaagagagagagagttagtggcccagggtcaacggggggtatggagagatggtatgggggaaggggtctagcctagttggacttagattgttgggagagtctccccaagccttactggcgtccatgcccccgcccacagatcttccgctgcctgccatccaatgccacgcgttccctgcggactctccgggagtacgtggccgtggagcccttggccacggtcagtccccccttggctcggtctgagctcacccaggtccagggccacctggtccacttccccctcaagttccta

SEQ ID NO: 13379 - DNA, 424 bp, Homo sapiens
ctgcctcatcctcccaaagtgctgggaatacaggcgtgagccaccgcacccagccaattttgaattacctgagtagggacaatgtaacttttctggtactcaggttctctaaggatcttaatctggccctgctgggacccctttctcctatagtgtgattcttggagcaaatacccggccagacttggatctccgagaccccatctgtgatgacttcttccagttgtggcaagacatggctgagagcaacgccaatatctatgagcagatcttccgctgcctgccatccaatgccacgcgttccctgcggactctccgggagtacgtggccgtggagcccttggccacggtcagtccccccttggctcggtctgagctcacccaggtccagggccacctggtccacttccccctcaagttccta

SEQ ID NO: 13380 - DNA, 1047 bp, Homo sapiens
tgcctatggccgctgggatgacctgcactaccgactgactgaccttggagactcctctgaatcagctgcctcccaggtaatccccctgaggccttcctgagcacccccaaactcagataagctcaatcaacaccatttcccagctccagccttaccccctcagtcattccaggccctgccaacctcagggttcctcagactttctgggactccaagaacccactttgaaagtgctgtaactggccgggagccatggcttatgcctgtaatcccagcactttgggaggccaaggcgggtggatcacctgaggtctggagttcgagaccagcctgaccgacatggtgaaaccctgtctctactaaaaatgcaaaaaattagctgggcatggtggcagttgcctgtcattgaagctactcgggaggctgaggcaggagaatcacttgaacccaggaggcggaggttgcagtgagccgagattgtgccattgtactccaccctgggcaacagagcgagactctgtctcaaaaaaaaaaaaaaaagtgctgtcacccacccagtcctttccccattttcactgaccatcaccccattcctctaaaagtgtcaaaggcaactggaggggagggctggggaatcagaccctctgtttcattcttcctctcggtctctctcactctttcagtgctcctctctttggccctggctctgtacagccccatgacttccccttgcccctggcttgggtgtgttccccctacagcctcccaccccgcgcccagactcaccagccaccccagacctctctcacaaccaattcttctggctgggcaaggactacagcaatcttatcaccaaggactgggtgcagctggaccggcctttcgaaggtgaagcctcccacccgccaaagccccagagagctgagagcagggtcagaagctggggctggtactgagagtgggatgagaggggtcaacggtggtacagccctccctctggcaggctctttctccctgccccaagtgtcccaaggagtccagccctga

SEQ ID NO: 13381 - DNA, 362 bp, Homo sapiens
tgcctatggccgctgggatgacctgcactaccgactgactgaccttggagactcctctgaatcagctgcctcccagcctcccaccccgcgcccagactcaccagccaccccagacctctctcacaaccaattcttctggctgggcaaggactacagcaatcttatcaccaaggactgggtgcagctggaccggcctttcgaaggtgaagcctcccacccgccaaagccccagagagctgagagcagggtcagaagctggggctggtactgagagtgggatgagaggggtcaacggtggtacagccctccctctggcaggctctttctccctgccccaagtgtcccaaggagtccagccctga

SEQ ID NO: 13382 - DNA, 4842 bp, Homo sapiens
gcactttacttacaggtgaccccccaggcggactccagctctcagtggccccatcccacccgtgtccccctcctgattctgtcctgatcccttcctgctgggccttaaagaagggccacctctcctgacctcccctcccctctgccagcctccacttctctccctctttcttttctctcaggaccctgtgtcgtggggagtattcaatcctgcatcgccttaaagcagccagtgagtgctgggggctgggggctcaagccctgggcccctgggagagggagattggggcgctgcaggcctgggggtgggggaaggaggctgtcactcctgtgagcctctgacgctacgcagaccatagctggcctttcactgcagggagaaggagagagaccagactctatgtaggaagagtttctggagtgagaggaggtgggacagggccctgtgcacacagagccacctctcacctcacttcccctcctgtcacgcagtggggacagcatggcgggactatatttccatctgcgggcttcgtacacacggagagctgggcgggcaccccgtctcggagctcatctacatccacagcaaggtgctcatcgcagatgaccggacagtcatcattggtcagtgccggatctagtcctctggcagggagagggtgtggggacaggcgaagagatgagaggcaggatgacagagactgcagctgaggctcgtgtaggggtggagggtccaagaaggaatgttgcaggccagtgctttggtagaggggatggggtactggggagagtgccctgggcccaagcacacagtgtgccccgcatccaccccaggttctgcaaacatcaatgaccggagcttgctggggaagcgggacagtgagctggccgtgctgatcgaggacacagagacggaaccatccctcatgaatggggcagagtatcaggcgggcaggtttgccttgagtctgcggaagcactgcttcgggtagagctggggcgggatgccacagggtgggagggagatgggggcgtctgccttttgagcaggacaagaggtagcaccgcataggtactcccggagccagaggtagaggcagtactagattctcaataggcaaggctgggcgcggcagctcacgcctctaatcccagcactttgggaggccaaggcgggtggattgcctgaggtcaggattttgagaccagcctggctaacatagtgaaacccgtctctactaaaaatacaaaaaatcagctgggtgtggtggcgggcgcctgtgatcccagctactaggactaatcagtttagagtatcagtaaagcaggaacaccaaaaaacaaaaagagaaaaaaatcttttttttttgagacggagttttgctcttgttgcccaggctggagtgcaatggcgagatctcagctcactgcaacctctgccctgggttcaagcgattctcctgcctcagcctcccgagtagctgggattacaggcatgcgccaccacgcccagctaattttgtatttttagtagagatggggtttcgccgtgttggtcaggctggtctcgaactcccgacctcaggtgatccacccacttcagcattccaaagtgctgggattacaggcgtgagccactgcacctggccacgaaaaagaaatcttttttgttgttgttgttgttgttgttgagacacggtttcactcttgtcgcccaggctggagtgcaatggcacgatcctggctcactgcaacctccgcctcctgggttcaagcaattcttctgcctcagcctccggagtagctgggattacaggcgcccaccaccacgcccagctaatttttgtatttttagtagagacagggtttcgctgtgttggccaggctgatcttgaactcctgacctcaggcttcggcctcccaaagtgctgggattacaggcatgaaccaccgcccctggccaaaaaaaaaaaaaaatcttttttttttttctttttttttgagagggagtctcactgtcgcccaggctggagtgcagtggcgcgatctcggctcactgcaggctccgccgcccagggttcatgccattctcctgcctcagcctcccgagtagctgggactacaggcacccgccacctcgcccggctaattttttgtatttttagtagagacggggtttcaccgtgttagccaggatggtctagatctcttgacctcgtgatctgcccgcctccgcctcccaaagtgctgggattacaggcatgagccaccacgcccggccaaaaaaaaaaaacttttgtgttttgtttgtttgtttgttttctttttgagacggagtcgctctgtcacccacgctggagtgcagtggcgcgatctcggctcactgcaagctccgcctcccgggttcataccattctcctgcctcagcctcccgagtagctgggattacaggcgcccgccaccatgcccagctaattttttgtatttttagtatagatggggtttcaccgtgttagccaggatggtctcgatctcctgacctcgtgatccgcccatctcagcctcccaaagtgctgggattacaggcatgagccaccgtgcccggccaaaaaaaaaatcttttaaaagtaatttttttcacaggttctgaggattggggaaagaacagaaaaagaagaaaatttaaaataaaaataattttttaaagcatcaaggtagtcatcaaagtcaagacaaatcagaactctgttggcttcttttacacttattttactattttatattgcatttattttgtttttgtttgtttgtttgttttgagatagggtcttgctctgtcacccagctagagttcagtggcgttaccacggctcactgcaacctcgacttcgccagctgaagtgatcctcccacttcagcctcccaagtagctgggactataggcacatgccaccgtgcctggctaatttttgtatttttttgtagagatggggttttgccatattgcccaggctggtcttgaattcctgagctcaagcaatccacctgcctcatcctcccaaagtgctgggaatacaggcgtgagccaccgcacccagccaattttgaattacctgagtagggacaatgtaacttttctggtactcaggttctctaaggatcttaatctggccctgctgggacccctttctcctatagtgtgattcttggagcaaatacccggccagacttggatctccgagaccccatctgtgatgacttcttccagttgtggcaagacatggctgagagcaacgccaatatctatgagcaggtgggaacttgggaggggtgggggagagtggcctggggaaatttgtggattatcctgctcagggtaggatggagagaagcgccaccatacagtcattattggaagggggatgagggcctggggacatttgctatcaagagatttagtggcccaggccgggtgcagtggctcatgcctgtaatcccagcactttgggaggccaaggcccggtggatcacctgaggtcaggagtttgagatcagcctcccaacatggcaaaaccccatctctactaaaaatacaaaaaaattagctaggtgtggctgggaggctgaggcaggagaatctcttgaactcaggagacagagatttcagtgagccgagatcacgccattgcactccagccacctgggcaacaagagcaaaactctgtctcaaaaaaaaaaagtacaaaagttagccgggcatggtggtgggcacctgtaatcccagctactcaggaggcagaggcaggagaatcacttgaacccgagaggtggagattgtagtgagccgagatcgcaccattgcactccagcctgggcaaaaagagtgaaactccgtctcaaaaaaaaaaagagagagagagttagtggcccagggtcaacggggggtatggagagatggtatgggggaaggggtctagcctagttggacttagattgttgggagagtctccccaagccttactggcgtccatgcccccgcccacagatcttccgctgcctgccatccaatgccacgcgttccctgcggactctccgggagtacgtggccgtggagcccttggccacggtcagtccccccttggctcggtctgagctcacccaggtccagggccacctggtccacttccccctcaagttcctagaggatgagtctttgctgcccccgctgggtagcaaggagggcatgatccccctagaagtgtggacatagttgaggcccccgtcagggagaggtcaccagctgctgtgccccaccacgtctggctccctgccccttaaccccaaggactgagggcagtgccctttgagatctggggaggcaggcattcctgaagggaactagaggtgttacagaggacccttacgtgagaaatagctgaaaagggcactcccaaccctgggctggggaggaggagagagtcccagagctcatcccccctgctgcccagtgcaaaccacttctccatgctgcaaaggagaagcacagctcctgccagggtgagcagggtcaagcctcttattccaggagaagggggctctgccccaggccctactacccattgttcccttcctcttcctgcccttgaaccccctccctgtcccagggccctcccagcccattgctgccaaggtggagggaaggataaagccacttctggcttcagcccccaccaggggaaggaaggagggcacattaactccctccaccagcctgctgacagacactaactttgtatccgttcaataagcatttcataaataaaggtgtagaaaaggttca

SEQ ID NO: 13383 - DNA, 726 bp, Homo sapiens
gcactttacttacaggaccctgtgtcgtggggagtattcaatcctgcatcgccttaaagcagccatggggacagcatggcgggactatatttccatctgcgggcttcgtacacacggagagctgggcgggcaccccgtctcggagctcatctacatccacagcaaggtgctcatcgcagatgaccggacagtcatcattggttctgcaaacatcaatgaccggagcttgctggggaagcgggacagtgagctggccgtgctgatcgaggacacagagacggaaccatccctcatgaatggggcagagtatcaggcgggcaggtttgccttgagtctgcggaagcactgcttcggtgtgattcttggagcaaatacccggccagacttggatctccgagaccccatctgtgatgacttcttccagttgtggcaagacatggctgagagcaacgccaatatctatgagcagatcttccgctgcctgccatccaatgccacgcgttccctgcggactctccgggagtacgtggccgtggagcccttggccacgggccctcccagcccattgctgccaaggtggagggaaggataaagccacttctggcttcagcccccaccaggggaaggaaggagggcacattaactccctccaccagcctgctgacagacactaactttgtatccgttcaataagcatttcataaataaaggtgtagaaaaggttca

SEQ ID NO: 13384 - DNA, 2370 bp, Homo sapiens
accaccaaggccaagtacaagactcccacatacccctacctgcttcccaagtctaccagcacggccaatcagctccccttcacacttccaggagggcagtgcaccaccgtacaggtgaggccccccacttcagccagccctcccctttgtctccttcagcctaacaccccaacccactctccctggtgtgagagctgcccacactctcctttcctggggttaagaagcacatcacggccaggcacggtggctcacgcctataatcccagcactttggaaggccaaggcaggcggatcacaaggtccggagatcgagaccatcctggctaacatggtgaaaccccatctctactaaaaatacaaaaaattagccgggcgtggtggtgcgtacctgtagtcccagctactagggaggctaaggcaggagaatcgcttgaacccaggaggaggatgttgtagtgagctgagatcacgccactgcactccagcctgggcaacagagtgagactccatctcaaaaataaaataaaaggccaggcgcagtggcttacgcctgtaatcccagcactttgggaggccgaggcaggcggatcacgaggtccggagagcaagaccatcctggctaacaccatgaaaccctgtctctactaaaaatacaaaaaattagccgggagtggtggtgcgtacctgtagtcccagctacttaggaggctgaggcaggagaatggcgtgaacccaggaggaggagcttgcagtgagcggagatcatgccactgcactccagcctaggcaacagagcgagactctgtcttaaaaaagaaaagaaatgaagcacatcgcattcaccattccctaggtcttgcgatcagtggaccgctggtcagcagggactctggagaactccatcctcaatgcctacctgcacaccatcagggagagccagcacttcctctacattgaggtctgactgggaggaggtgggggagagcatggaaggggtgtcccaggagagagacctggggaatgagtggagtcagtcattgagggctggtggagcagaagcagacgcctggagcctgggaccaaggctggaggccgaggacagggccaggggccaggctgctgatgtctgtctctgattcttgccccagaatcagttcttcattagctgctcagatgggcggacggttctgaacaaggtgggcgatgagattgtggacagaatcctgaaggcccacaagtaaggtggactgtcaggaaggtggggactgtgggtgtggtttgagcccggttgaagggggtggggtttgagggaccagtcgcacctctgactccaccccctccccagacaggggtggtgttaccgagtctacgtgcttttgcccttactccctggcttcgagggtgacatctccacgggcggtggcaactccatccaggccattctgcactttacttacaggtgaccccccaggcggactccagctctcagtggccccatcccacccgtgtccccctcctgattctgtcctgatcccttcctgctgggccttaaagaagggccacctctcctgacctcccctcccctctgccagcctccacttctctccctctttcttttctctcaggaccctgtgtcgtggggagtattcaatcctgcatcgccttaaagcagccagtgagtgctgggggctgggggctcaagccctgggcccctgggagagggagattggggcgctgcaggcctgggggtgggggaaggaggctgtcactcctgtgagcctctgacgctacgcagaccatagctggcctttcactgcagggagaaggagagagaccagactctatgtaggaagagtttctggagtgagaggaggtgggacagggccctgtgcacacagagccacctctcacctcacttcccctcctgtcacgcagtggggacagcatggcgggactatatttccatctgcgggcttcgtacacacggagagctgggcgggcaccccgtctcggagctcatctacatccacagcaaggtgctcatcgcagatgaccggacagtcatcattggtcagtgccggatctagtcctctggcagggagagggtgtggggacaggcgaagagatgagaggcaggatgacagagactgcagctgaggctcgtgtaggggtggagggtccaagaaggaatgttgcaggccagtgctttggtagaggggatggggtactggggagagtgccctgggcccaagcacacagtgtgccccgcatccaccccaggttctgcaaacatcaatgaccggagcttgctggggaagcgggacagtgagctggccgtgctgatcgaggacacagagacggaaccat

SEQ ID NO: 13385 - DNA, 589 bp, Homo sapiens
accaccaaggccaagtacaagactcccacatacccctacctgcttcccaagtctaccagcacggccaatcagctccccttcacacttccaggagggcagtgcaccaccgtacagaatcagttcttcattagctgctcagatgggcggacggttctgaacaaggtgggcgatgagattgtggacagaatcctgaaggcccacaaacaggggtggtgttaccgagtctacgtgcttttgcccttactccctggcttcgagggtgacatctccacgggcggtggcaactccatccaggccattctgcactttacttacaggaccctgtgtcgtggggagtattcaatcctgcatcgccttaaagcagccatggggacagcatggcgggactatatttccatctgcgggcttcgtacacacggagagctgggcgggcaccccgtctcggagctcatctacatccacagcaaggtgctcatcgcagatgaccggacagtcatcattggttctgcaaacatcaatgaccggagcttgctggggaagcgggacagtgagctggccgtgctgatcgaggacacagagacggaaccat

SEQ ID NO: 13386 - DNA, 24489 bp, Homo sapiens
agtttgcgctgagtcgactgagcccgtcccgcggctcccgtccccctctccccgcgcgccccatgaggctttggcagtctcggcccgagccttagagccttagacaccggggaggagaccctggtcctgttcctaggtgagtcgcggggaagtgggagctgcgctccggacggggggtgggactaggcgccaggacccccctaaaccgatggacagaacccggattcgagattcccacgtagtgccaggcctgtgggtgggtacagggtcctcaccagctgtatctccatttacgtgagggtggaatgggttcaagctcccgcccccatcacagtgtctctagggtgggtcggctcggagatagggccgtgaggagtctatgggaccctggccccggtatggggggtattggcggggcagggggatcctggaggggcccgggcgcgcggcgtggctgggaggctcagccgatcctccccatctggccagtcccggagtcggtcccaggcggaaaagccctctcgaggccggcagggggcgccagaggctgcgcctcgggcagtctgagcagacccaggcacccacttaggggtgggggatgcgggagacccgtgaatccggggaggccctggcctgccttggtggaagtctgggaaatggaggccaagaggtcccctgcagattccttagtaactcctcaagttgagggagctcgggggtattttaccattctcctgccctttagccggggtccgggcacacactaggacctggcagccatccccagatactgaattctatgccctcttggcacaggtgggcaaattgaggcccagtaggggaagggtgggggaacgtaggctccagaccaggtcttctgaagcccaggcaggtgccctctttcccccgctccctaccaaggaggcttctaagttgcaccggggaagggcttgctagtccaggtgctccgaagacacacgctggggtctggggctgggaactgcagaggctgggcaggaggggatgttcacagactgcagcccctccctctttctctagcactgggtcccagccttgggcatactagccaggaccgctccctggggaggaaggggccttcctggcttccagggcccgtgcggtgggcttagcctggggagaggttttctgtgtccctgccatctgcccggcacagggcagggccttaggtcaggctctgactccaggtgagcctcagaacccaaggggtgatgggtgaggcctgggcctaggggaaaggagggtgggtaggccgggtggagcgtagagagccgcctggcaaagccaccccgccctggctggcctgcccatgcatgcagtctccacccctggatttctaaggtgttgggtggggccttgggactagcaggctcccaggggagcttagccttggtgggaattcctggcaaggacatccctccagccagagagctcggactcctggttccaggcccgtctgctgtcggcagagcctggagctggccccagacctgcgtcctttcctggacagggaagtccctctcccacccagaccaggctggggccccagctcgttgtggggcagggatgcctgggggatccctggtttcccatctgcttttctggggctgggggaggtgatactgagggagaacagccgggtgcgggggtcctgccttggagactccattattcatcagcctccgcatctggtttctgggtatcagtttcaacaagccggccctgactcacaagcctggagctggggctgggctggggaggggctccctccccagggagttgggggccaggacttcttgggcctgcccctgagctgtttcagctccctgctgtggagaggaggtgggaatgcaggagcctgcccaggcccaccccactgccctggtacaggggctgggggctcctttctgctctgcactcttgcccctaaggaacagtcccccacccttgctgagtacccaggcagcagcctcactcagggatggccagggcccaggcactcaggtgacctctggtgatccgccctgacccagccctggtggtctccacttgatgcaacctggttaccccacaccggtgggctccccacaagctggctttgggatctgccgtgtcttcaggaaggcaatctccagggccctgttgcccaaaccaacattcagctgtcttcaggccccacgcctgccctgtgcctgaggcacccatttccctacgtagcagcagctggtgactttggggcaagtcagttgacacaggccttagtttctctatctgttaaatggggattgtaacagtatctcctcctaagagtctttgagaagagcgaatgggattcactgcctggaactcccacgatggggtggcacatggaatgctcagtgaaatgcagttatctgcctacaggacagtatgggggtggaggtctggggcaagaccacccgatttgaagtaggaactcacctgcccagggccagcaggcccaaggtcatggatactaggaggaggaagagaccttcggtctggcagtggggaaggctctgttgactgtcggccacaggaagggatatcctggccgagccctttcctgtccccatgtccttctgtggcatgaaggcccttctgccttcatctgttcactgatctcatccccaccaagcgcacctactgtgcaccaggactgttctaagtgccgaggacacagtgagatgcagacggccaaggcgctggcttctggagaggacagtctggtagggaagaatgatgataaaaaagtgaacaaagaaatgaattacaggtagtaataaacactaagaaggaaataatttaacttaaaggaattgagagtgggagggtaagggtggtttattttaagatgagggaaaaggacgtcttagaggtaacatttaagttggggcccggtgtcagctgtttcaagatagggtgcgtggaattccagacagaaaatacagaggagaaggccctgagcttggcgagctgtagggagagaaggaagaccggcaggtggaccctgtgcggaccagctgggagggaggcgggagcccggccatggtgggatttcactataagcaagatgggaagttttagttttcaaaactctgcctgttggccgggtgtggtggctcatgcctgtaatctcagcactttgggaggccaaggtgggggtggatcacttgagatcaggagttagtgaccagcctggtcaacatggcgaaaccccatctctactaaaatacaaaaagtagctgggtgtagtggcgggcgcctgtaatcccagctactggggaggctgaggcagaagaatcacttgaacctgggaggtggaggtcgtagtgagctgggatcatgccactgcactccaacgtgagtgacagagcaagattccgtctcaaaaacaaacaaacaaaaaacaaaaacacaactctgcctgtggtgtagacagtgggtgacctgggctttgggagtggagacagccctggaagtctcccagcctctaataaaacgctgctgccctcccaaagccatctcacggaccctggcccccttcccaccctctttccccatggaaccaggtggaggaggagcaattaggggtgggtgggctgatgacagacagcatggccacctcacccccatgggttctgaggagtgtcccaaggaggccatcccagaatcccagagccacagtctgagtttcagtcttgcctgtagacttttgtctctttatgtcactttatcccccacgccgtgaatggggctaatggtgcctgccctgccttcctgggaatcagtgtaaaagcgctttgacagccgtgtagtggtgactccagcaccagagtctgggcgtttgcgtcctctcaggctttgctgagtgccccctggcggtggggacctggcctagaactgcagggacctgggctgctgtgccatgtgggtcgccagggtttcctgatgcctccacctcacccagctcctgggggctgccaaggatagcctctcagagcagcccgccttctgcccacggccctttccagaggccaccggcctttggctctcggcctctgccgtacctgggcagtgagcagtcggtgtgagggggtgtccctggggctcaggctctcgggcaggggtctccaggttgatgggaggggctgagatgagagctggttgtgaggttggggtgggtgtgtgactggggctcaaagctggtgttggagcagagaggggtgtccctggggctagatggagagccggaccaaggaccctgaggggagtgtgccccatcctggcctcccccttctggtgcctgtattctaagagctcccttgctgggagtaagaaggggtcccctgggctgaggctccgaggcgggggtgggggtctccaggaggaagggaggagggaaggtacccttctggctgggagggaccgtgcgtgttggcgctgagggtgaggtggggaccacagcagagtgggcacccccagggctgggcggggatcgagtcacccaggggaggggctccacagtctccaaggtgggggggggtgtcaccagcgccccctgcctccagcattcaaggagctccccaggagaaagagcaagttctgaggagccctctgagcccggcattggtgttgaggagggagtcagagaagagaggggcccggggccgcgcagaggcgcagaggtgggggtaccccgggccaggcagaggtgggaaggtgggggtcccggggactgggcggaggcggggctgtgggggtcccccggccgggcagaggtaggggtgtggagtccccgggtctgggcagaggcggggaggcggggggtcgcccgggcaggcggaggcgggggtgtaggggttcccgggcggggaggcggggatccccggggctgggtggcgagggcccgggcgggagggaggtgtccgccttcctggggggctgggggctgttccgggcccggccctccccggggtccccgcgctcggcgggggcgggcgcggccgcacaatggcaggaagcggggctccgcgctttgtccggcgggcggcgcagaccgcggcttcctccggccgccatggggacaggacccggtgtctccggacgcctagcagcctccaggccgggcccggggctgcccctccgggactcggagccctcctgggccgggggtcgtgcccgcgacggtgatagccaggtacggggccgggacggggcgggaacggggctgggtgcccagttctcgcctgcagccgcccagtcctgtgcgggaggccagggagggggtgcccgtgactatgggccccgcggcccccaggggaaggatgcggcccatggcggccgagccccctacctgggcagctgcaccctggtgacggggacctcggactccggggtgtgtccccgccggctgagatgtccccgccaattcttggcgctttgtgtctggggccagctccggacacacctgtgggtcccgggccctatgctgggccgcccctctcctttccttcctctgccctggccctgcccacagcctcctcctaccccagaggcctctgtttctccttgtgcctctggccccagcccttgtgtgagggtggacgcctggttctctgtccccatcctcacatgcgtgtattccccaaagggcccccctctgttattttggctgcctggcgttagagggggtgggagctggctgttcccatgggtgggctctctcctcccttgggttgagacctgggaacattcccccccggaccctggtgtccctcctgcaggacagaggcaggacatggtgggcaggcaggcaggtgagggaggggcagttgggtctgagagaaggggctggagtctggcttcaagaaggggccattccgccctagtgctgggggagtcctgcctctggagggagctggggagactctggggtttgggggtgggacgtgaggcagaacggggagcagaaactgcaccagggagctctgcccaccccagcttctcagttgggctcatggttctcccggggggcttccagaacttcatcgtcaaccagatctgctcgacgaagtcggaaaccacctggttcagatcctggggctgagcctcactgtgcccccagtgcccctgagcctggggactgctgagaggagggaagcagatgaggtcagccgggcctgggcaccagcccctggcagcagctggaggagtcgagcagcctcagtgatggtagtggccacccagaccatcacagcagggaaactgatctcgaggctttcaagggatccagggtggggtgcgtcatagggctcagtccgtatttgttgaatactgactcttccgtaaggagcgaatcagggtatcaaatctgctgtctgtatattggattgatttaaaaacaagatggtggcacagagtcagacttggactggaagggtcccagagaccctcccagaactcctccgacctagcacggctccttccttgtcaccccctacctgcggtgagaccagggcttgggtcatgggcaggtctgccgccccagctggcactaggaaatctcaggaggcctggaagggattggagctgggagcctctgccatgctggctgggttcacagagggccagagggctgcggagcccgcagacggggggctcccaggaagaggggacaaggtggggcagggcccttccccagatcattctcatgaggagacacctgaagcttgggctcccagaagctgcaaagcctgatgtttctctcagcagtgcgctgtggattcagggtgagggtgtgggtagagccctggctgaggacagcttagtggtctctgtagtttttaaatttttttctgagacggggtctcactgtgtcgcccaggctggagtgcagcaatgtgatcatggctcactgcagcctcaacctcctgggctccagcaatcttcccacctcagcctcccaagtagctgggactacaagagagcgccaccacacccggctaattttgtttgttttttgtagaggcaggatctcactgtgtggcccgggctggagtttttgcactttgttttacgatagattaagacagaaaccagaaagagctgcaggggttgagggatcaatcccatcaccctcacttcaagccccacaagcacagttgaagatcactcctgaagggtgtagaagtgggggcacctggtgctcaaggctgccttcaggaatctgggtcatcctgtccccagccacctgcctggggcccagctccatgcagatcagcccctccctgagcacgtgggcctgcttggagtgccacctgccgactgccagtcctgtgccctgttccctttcctgtcagatggagacacggagggacacaagaaccaacagggcttgcatcaaactgagatagatttcctcctgtccccgtaatcccggctgacctgaggccagcctctcgctcctaagacacccatgagagggcgtgaatgtgggttaaaatctgggatccagtctgggtgccgtggctcacgcctgtaatcccagcacttggtgaggccgatgtgggtggatcacctgagggcaggtgttcaagaccagcctgaccaacaaggtgaaaccccgtctctactcaaaatccaaaaattacctgggtgtggtggcgtgtgcttgtagtcccagttacttgggaggctgaaacaggagaattgtctgaacccaggaggcggaggttgcagtgagccaagatcatgccactgctctccagcctgggcaacagagcgagactctatcgcaaaaaacataaataaatacataaataaataaataataatctgggatccagagccccacacacagtggcttcaagtcctagatccactggctgtgtgaccttagacaagtcatttcacctctctgagttttactttcctcttgtgtgaaacagggacaataacagcccttatcttatgggatgagatacacatgtaatgcccccagtgtggctccagacacatgacgaccacattaaaaacacactcagattcttcccggcctcctcctccctcctgtcactttctctgctatcctcaccacgcctatctcggaaatctctcatcgggctttcaccagccagaaactcttcagcgcctctctcctgccttaattcataaatgaaacaaggatttatggagcagctgggaccggaggtcaggcgctgaatcagacagagtaacatttctgtccttgcgaatgtgaccaggtgtggaggcagcagggtggaatatgtgacctgtcaggtgctggaaagtgctgaggacaggaaaggagcgtggagggcgaatgaggaggatgagaaggtgacttggggggaagctagcaggaggggagggaaggcagggagccatgcatttcaatatctggggaaaagcatctcagtccagggactggcagatgtcacagctcagaggtgggagctgccctgagggagtgtgtcccggaacgaccaggaggccagtgggtgaggggagtgagccaggatggaagagcaggacaggaggtccctgaatggggtggccttaaccctaaaaaaaaaaaaagtcaatgtcataaaagactgaaaaccctaaccttaacccttttggcttttttttttttttaagataatgtcttccctgtagcccaggctggagtgcagtggcgcaatctcagctcactgcaacctctgcctcctgagttcaaacaattctcctgcctcagcctcctgagtagctgggactacaggcgtgtgccaccatgcccggctaagtttttgtgtttttagtagagacggggtttcaccatgttagccaggatggtcttgatctcctgaccttgtgatccgcctgcctcagcctcccaaagtgctggggattacaggcatgagccaccgcgcctggcctttttatttacttatatatttatttatttatttatttatttatttatttatttattttgagacggagttttgccccaggctggagtgcgatggcacaatctcggctcactgcaacctctgcctcccgtattcaagcgattctcctgcttcagcctcccgcgtagctgggattacaggcatgcgccaccatgcccagctaattttgtatttttagtagagacagggtttcttccatgttggtcaggctggtctcgaactcccaacctcaggtgacccgcccgcctcggcctcccaaagtgctgggattacaggcatagccactgctcctggccccttttggcttttattcagagtgagatgggaacccttggagggttttgagtagatacagtgggactcctctttgaacagggcccactctagctgcacatggacaacatattgtgggggatgggggtagcagtgaggccagttttgaggccattgttgtcatctagctaaaaggtggctgggcagtggcacgcttatgagctgtggctgggttgaggccacagatactaaaggtggagccagcgggattttcgggctgaccagatgggggcataacagagaatgtcaagagtgaccccaagctgatatggtggctcacacctgtaatcccagcactaattccagcactttgggaggctgaggcgggcggatcagttgagcccaggagttcgagaccaggctgtgcaacatggcgaaatcctatctctactaaaaattagctgggtatggtggtacatgcctgtagtcccagctacttgggacggtgaggcaggagaatcacttgaacccaggaggtagaggttgcagtgagccgagattgcggcactgcactccagattgggtgacagagtgagaccctgtctcaaaaaaaaaaaggaaatcccccaccttgcagccatcagaagaatcaaataattgatttaggttaaaatcatctatgtatgctaaagctcttaggaccgcaagctcacatcaccatgcctggctaatttttttttttttggagacaaagtctcgctctgtcactcaggctggagtgcagtggtgtgatctcggctcactgcaacctctgcccccggttcaagcaattctcctgcctcagcctcctgagtagctgggactacaggcgtacgctgccacgactggctaatttttttgtattttagtagagacggggtttcaccgtgttgcccaggctgctatcgaactcctgagctcaggcaatccacccgcctcggcctcccaaagtgctaggattacaggcatgagccaccgtgcctggcaattttttatatttttagtagagatggggttttgtcatgttggccaggctggtcttgaactcctgacctcaactgattgagtgagattactggggaacaagacatctcaaagtgccatgccacagattacttattaattataggggaaaaagggactctacaaggtacagaggtccccagaggatccagcattacaggcaaatagcaagaacacacagctctgtggtgtccccgcctgaacgctcagtttgaaactttctgaggaccaccagggagatccacattgaggagctctgtgcgaggctgctggctcgaagacttccaaaatgtcaaggtcagccaggcacagtggctcatgcctataatcccagctctttgggaggtcaaggcgggcagattgcttgagcccaggagttcaagactagcctgggcaacatagtgagatctgtcactactaaaaataaaaaagttagttgggcgtagtggcatgcacctagtattcccagctactaaggaggctaaggcaggaggattacttgagtccgggaggttgaggttgcagtgagctgatcatgccatactactccagcctgggctacagagcgagaccctgtcttgaagaaaaaaaaaaagtcaatgtaataaaagaccacaaaaaacaaggctgggcacggtggctcacgcgtgtaatcccagcactttgggaggccgaggtgggcggatcacgaggtcaggagatcgagaccatcctggctaacacggtgaaaccccatctctaccaaaaatacaaaaaattagccgggcgtggtggcgggcgcctgtagtcccagctactcaggaggctgaggcaggagaatggtgtgaaccgaggaggcggagcttgcagtgagtcgagatcgcgccactgcactccagcctgggcgacagagcgagactccgtctcaaaaaaaaaaaaaaaaaaaaaaggataaacagacataaccaaatgccacgtgtgaaacttgattagttcctatatgaggaagtatatctgtaagaacgttatttagacacttgggaaaatgtcaatatagactatatatcaaggttcagtttcccaagtgcgacaattctatggggttttgtaggaaaactgtctttgttcttaggcagcagcatgatttctgccccaggggaggggggtgccgagaagagaatgggagagaagcagatgtggtagatatcaacttggggagtccagagggcatgtggatgtcatgtgctattcttataatttttggtaggtttgaaatattttaaaacaagtctgggcgcggtggctcacgcctgtaatcccagcactttgggaggccgaggcaggcggatcacctgagaccaggagttcaataccaacctggccaacatggtgaaactccgtctctactaaaaatacaaaaattagtcgggcgtggtggattgtgcctgtaatctcagctacttgggaggctgaggcaggagaatcacttgaacccgggaggcggaggatgcagtgagctgagatcgtgccattgcactccagcctgggcaacagagcgagaccccttctcagaaaaatttaaaaaaataaaaagaaaagaaatattttaaaacaaaacttgggaaaaataaagagagtgggaggagagaactaggaagtcgtgaatactgatacctgtttacagagtttagctgtgaagggaaagaaagaaagtcagccgtagctggagggtgaggtgaggcctctgtaaaatggagaaataaggctgggcgtggcagctcatgcctgtaatgccagcattttgggagaccaaggtgggcggatcacttgaggccaggagtttgagaccagcctgggcaacatggtgaaaccccgtctctacaaaaaatacaaacactcgcctatggtggtgtgtgcttctagtccaagctactcgggaggctgaggctcgaggatcacgtgagtctgggaggtcaaggctgcagtgagccatgattgtgccactgcactccctgtctcaaagaaagaaagaaaaaaaaagatggagaagccgggcgcggtggctcacgcctgtaatcccagcactttgggaggcccaggcgggctgttcacgaggtcaggaattcgagaccagtctggccaacacagtgaaaccctgtctctactaaaaatacaaaaaaaaaattagctgggcatggtggtgtgcgcctgtaatcccagctactggggaggctgaggcaggagaattgcgtgaaaccaggaggcggaggttgcagtgagccgagatcaagccattgcactccagtctgggtgacagaatgagactctgtctcagaaaaagaaaaaaaagaaaaagatggagaaataaccacgtgttggtgtggcagtgggggaaatgatccagcagaggggaaacttgatgatgtgggagaggggggactgctggggggcgtctcctcaccctggatcgagagatggagggcagttcattctaagtccctgcagcgctgggccggggtcgagggatgtggtggatctcgtggacctcctgaaggcttctgtccccaccccaggtatgtcaccacgccgactgccagcagctgcaccgccgggggcccctcaacctctgcgaggcctgtgacagcaagttccacagcaccatgcattatgatgggcatgtccgcttcgaccttcccccacaaggtgagcacaggcgggagccgcagctcggcccccagagctcctgtgtcagtgtttcagtaactgtcggaaacgtgctagggcgtcataaggacaagtcgactgtaaataatgaaacccgagtatgttacggttccttttgttccaaatgttttttagcaagagagaaagtccatgagcgtgccccttccagaggcaggcctttctctatctggtgctgtgctctcactggttctcacctcccccagctgcttttgcccctggcctgtggcccacacagagaaggcccctttctttctagttctgcctatcctcagggcaggggacttctggacaagtcctgcaagccaggctgtgggcctagcagaggcagtgtggagtgggggtggccaggtcaggaggcacttggagcaggaaataagaaattcctcttgctgagcagggacccagctcaggcccaccatcaactgcctatggaggagtggctcgcaggcacccaggcctggtgagaaatgccaacccccgagtcctttcccagctgatcagaggaacaaaaggattcttctggttgggcacggtggctcatgtctggaatacaaaaaatacaaaaattagccaggtgtggtggcacacacttgtggtcccagctgctcggaggctgaggtggaaggatcgcttgaaccccgacaatggaggctccagtgagccctgatcgtgccactgcactccagcctgagcgacagagcaagaccctgtcttaaaaaacaataaacaaacaaaagactctctcccactgccagggccccttgggaattcaggtgtggtcacagcatgggggaggggaggcctggaagaaagagccatggactttggtcccttcctgtaataacctcagaggcaaggcttccttatccttattttatagaagggtaaactgaggccacaggtgagtttgtttttggggtggagcttcaccatgggtgtcatcccagggcctttgtgtccttttgggtctgtggggatagacagcaatgactaaggccaggcaaggtggctcacacctgtaatcccagccctttgggaggctgaggtgggtggatcacttcaggtcaggagtttgagaacagcctggccaacatgttgaaaccctgtcattactaaaaatacaaaaaaatgagccgggtgtggtggcacacgcctgcaatcccagctactcaagaggctgaagcatgagaattgcttgaacccaggaggtggaggttgcagtgagccgagatcatgccactgcactccagcctgggtgacagagtgagaccctatctcaaaacaaaaacaaaaaacaatgactgagcccctctcctcacagaactgaagggcccttgctacctttaatctgggggttccagggtaacaggctgtggtccctctggaggcagccatgctgcaggctaaggaggggcgggggaggcacaaccctctcctgctttctcccaaggctctgtgctggcccggaacgtgtccacccggtcatgcccgccgcgcaccagccccgcagtggacttggaggaggaggaggaggagagctctgtggatggcaaagggtaggtgagggatgagtgggcagagagatacctggagggccccacggctgggtctcagatcagacattcaggaccagatgctctggcgccttcctcaagtaaggctgatgggcagacctcttcccacgcctgtggctgtcctgactccgggaagaggccacccagcctgggccagcctccagggtgcttgggatcctagcccacaccagaccaggtaccgttcgatgtgactcccgtgttggccaccagagggcgcacagccctatgcgggcctggccgggttgaatccacgcgggttacctgtcacctggggtgagccaagggcggggaggccacaggcccactcgccgcccacgctggcgagggccacccacacctccagcctctgccctcctcgcttccctgcagggaccggaagagcacaggcctgaaactctccaagaagaaagcaaggaggagacacacggatgtgaggagccccccagagccggcagatgcgggttccctacagcctgcgcccttccccgagcctgggccttcctccgggatgggggtggggaggtctgcatcccagggtgcagaggtctgggagatcgctggggttccctttcttgctggggttcccatccgagaccggagggtggggagggtggggaggagggttgggaaggagggtgggaaggagggtggggaggagggttgggaaggagggtgggaaggagggtggggaggagggcgggaatgagggcggtgaggagaagctcacagcccccacccccaccatcctcccaggacccaagcaaggaatgcttcactctgaaatttgacctgaatgtggacattgagacagagatcgtcccagccatgaagaagaagtcactggggtagggcttgatggggctcagggtggaagtgggactgggagtaggggtggccccatgttgcaggctccgggtctctgcaggtgtgacgtgtgtgtctgtgtggtggcccgtgagcgagcgcatccctgcgtgggcagacccgtgctggtgtgcacgccagtgtgagggagtgcggtggggtctgtgtacttgtgcattttaatcatgtatgcaggagccaggcctgcgtgtgggcaggcgtgtgacaggtctgccgtggtatgcagatgcgcctgtgtgagcacctctgcgggcaggtgtctgtggacctgcgtgtgatcccatgcgggcttcccttttccgttgggaaggtgggggcagctggggctgtgggtggggcgggggctcgtgggggcggggcccaagctgaagcgactggccgcctggttctaacacacatgcctcctgtcctgggggcagggaggtgctgctgcctgtatttgaaaggaagggcattgcgctgggcaaagtggacatctacctggaccagtccaacacacccctgtccctcaccttcgaggcctacaggttcgggggacactaccttcgtgtcaaaggtgagaagcagcctgggccaaatggggccgctgggactggcggagcctcctggagatgggcgcccttcccaggctcaggttcccattggtcgtgggcctgagcagcctcattaccatacaggtgtctctgctggatgctgctgggggaggggagggtgctggcagggcggggctgtcgggggagggcaggcaggccttggtgtggatcctccggggagagaggaccggggaccccctcctccaccagaccagggtactgaggatctctcgtggcccccacatgcagccccagccaagcctggagatgagggcaaggtggagcagggcatgaaggactccaagtccctgagtttgccgattctgcggccagctgggaccgggccccccgccctggagcgtgtggacgcccagagccgccgggagagcctggacatcttggtgaggaggagggggtgtgtcaggggagggggtgggaaggggcccaggctgggcccacagcccctcctcagaggcagtcaccctgggtctctcactgccccatcttggggttttaattgtcccttctggaaaatggggttggctgggagagtaggggaccctctctctctggatctagccatagcccaaggtgagggcttgtatctgagactcttctagtgccaggggtcagggaacctgtgtgtgcatgtgtgtgtgagagcacttgtacctggggctacagaccacccagagctgtgttccagagtgcatctgagtgtgtaactctgtgcttcatgcttgaagctgggggactgggggatgatagtctgggcgtatctgtgtctggaccttccagtctccagatatgtctgggtcccaggagaggggacaccccagggtagagatgcagagaccctcctccatcccaggctggcctgaggccctggaaacccgccctggggtggggccatgggggctggcagggggtcccggccctgaccacccttccctgaccaggcccctggccgccgccgcaagaacatgtcggagttcctgggggaggcgagcatccccgggcaggagccccccacgccctccagctgctctctgcccagcggcagcagtggcagcaccaacactggcgacagctggaagaaccgggcggccagtcgcttcagcggctttttcagctccggccccagcaccagcgcctttggccgggtatgtggccccatctgcccagggtcaggcagctggctggccatgacccctgaccctgaccagggtatctttccaggaggtagacaagatggagcagctggagggcaagctgcacacctacagcctcttcgggctgcccaggctgccccgggggctgcgcttcgaccatgactcctgggaggaggagtacgatgaagacgaggatgaggacaatgcctgcctgaggctggaggacagctggcgggagctcattgatgggcatgaggtgagtgcgggccacagtgctgctccctccttgtcccgaaaggaggacagccctcgggaggacccagtgatcagatgttccatgggacgccccaaagaggccactgttaccattagcccactttggagacactgaggctagatgaaaatggtgtgctgcttggctgttttaatggcagaggagggcccagatcttgggtgtcttaactgtgattactcatgtggtgtcaagggtgaccctgctcctcttgggacctccatgtccccattgggaaaatgagagttgcatgcaggttgcttatcctccccggccaccctaaggtgctccaggcctcgtgaatgacccatcctgccctccctctagaagctgacccggcggcagtgccaccagcaggaggcggtgtgggagctgctgcacacggaggcctcctacatcaggaaactgcgggtgatcatcaacgtgagtaggggctgcgctggtccccgtggccaccctgcccccctctttctgacagccctcagctgagtctgagcctttgcagaaggagcaggtgcctggcaatgaggtgggggcaggaaagtcagacaagggctgcgcccagggaggaggtgcctcctagaggaacctgggagggggcttcgggcaggtttgtcaggttcagctgaattagcacaggtgaggcctcattctttcactttcgttcagtggctgtttcccaacacttgctgtgtgctgggtgcccagcaggccacgccctggacgggacagagtgagctggcagtgtagggatttcggctcagggaggggagcacctaccctgggcttggagcttcctggagggaggaagcaccctcagaggtgaaatctggaggctaagccagggcagaggtggagaagggaattccaggcatggcttcaaagccagtctcccccgagcttccctccaggagggaccagggcagtgtgacctcgggagggctatgaggactgggtctttcctcagggtctggactacccaggtgcgaaggccaaagggtacagccttcttatccgtggctgctgtggggcctcctggaacggggaaggggaaggagtggcaggggagcctgaggctgggtggggccctagggctgagacagcctcccgaccccagtcacaccatcccctgatcccacagctgttcctgtgctgcctcctgaacctgcaagagtcagggctgctgtgtgaggtgcgctgggattcgggggcggcggcgggtgaggtaccaggaaggagggcgggacctggacctggggcggggctaacctggcggaggggcgtggccaaccgcacctcccgccgcgcccaggtggaggcggagcgcctgttcagcaacatcccggagatcgcgcagctgcaccgcaggctgtgggctagcgtgatggcgccggtgctggagaaggcgcggcgcacgcgagcgctgctacagcccggggacttcctcaaaggcttcaagatggtacgggcggggccgggcgcaggcgggggcactgaggcagggctggggcgccgaaaagcctccacggcccgatccggtctgcccagcatccccaacctcccccaggcccgtaaccgcacttgaccccttgtggccaagggtgaggaattacgaggcggtcgcccgggtttgagcctccacctgaccatctacccctgatccctggccacgggtggtcactttggctgaggctcagtttcctcatcaggaaacagggatcataagcttgctgcccccttggggtggtcgcccaagtgcagtaaggaagcgcttgcgcagcgcctggcgcgggccggcccgcagggagcgcgcggtaaccggcgccgtggttgttctgccccgggccagttcggctcgctcttcaagccctacatccgctactgcatggaggaggagggctgcatggagtacatgcgcggcctgctgcgcgacaacgacctcttccgggcctacatcacggtgagggcgcgcgtgccgtgggcgggggcgcaggaggacgggaccctggacggggccgggtggggcggggcctgccctgagcccgcccccactcccccaccgcagtgggcggagaagcacccacagtgccagaggctgaagctgagcgacatgctggccaaaccccaccagcggctcaccaagtacccgctgctgctcaagtcggtgctgaggaagaccgaggagccgcgcgccaaggaggccgtcgtcgccatggtaaccctgatggccagcgggagccgtcccccctgcgcggctctctgctccgtcatgaccctggacctgaagctccctcacctgcccctagatcggctccgtggagcgcttcatccaccacgtgaacgcgtgcatgcggcagcggcaggagcggcagcggctggcggccgtggtgagccgcatcgacgcctacgaggtggtggaaagcagcagcgacgaagtggacaaggtgggcgtgtgtgtctgcgggggttgccggctgggagagaggaaggcccagctggcaggcaggggctgtgctgggcatctcactgaggatgcctagctgagatgggagtcagtctctggcctcccctacgttcacgccatccgtccccagctcctgaaggaatttctgcacctggacttgacagcgcccatccctggcgcctccccggaggagacgcggcagctgctgctggaggggagcctgaggatgaaggaggggaaggacagcaaggtgattccagggccaccccacccctgtgccctgcccttcctagggacctcctgggccccagtcactggttctcagctctgcagtcccttcggtggttactcaagaaccagtgaccttgtcatagtgaatgacagttctctgcctgccattcacaaatccagcagtagggtcctagcccttgaaggcaccagttgtgcccatttgttggtgccacatgggttcctggtgggagggcagccatattccacaagtgggccaggaaccccagagccttgctactgtgccatggccccttcaggcatggggcaggctgagagcttgcacacggtgacttcaaagtcaccagtcttctttttaatgtaaacttgtattgagataagtcatcaacgtacatctcagtgaaagagaatcatcttcctcttcattttaattttacttgaaggttcatggtgggaggagtgtttgacaaaaaccgagtgctcccaggggaggctggtgccacagtccctggccctgaccctgctggcctctctggccaccccccctcctgccactgcagatggatgtgtactgcttcctcttcacggatctgctgttggtgaccaaagcagtgaagaaggcagagaggaccagggtcatcaggccacccctgctcgtggacaagattgtgtgccgggagctacgggaccctggtaaggagccctggtcccctgttcctggtcaggggctgtgatgggtgggggccatcgtctctgctgacactgacttgggccttccctaaccagggtccttcctccttatctacctgaatgagtttcacagtgctgtaggggcctacacgttccaggccagtggccaggccttgtgccgtggctgggtggacaccatttacaatgcccaggtgagtgcagagtagtgagtgggtgggcaaggcagattagggagatgctggtcacaacccattctgtcccatgtaccccaaccttgcctgcagaaccagctgcaacagctgcgtgcacaggagcccccaggcagtcagcagcccctgcagagcctggaagaggaggaggatgagcaggaggaggaagaggaggaggaggaggaggaggaggaaggcgaggacagtggcacttcagctgccagctcccctaccatcatgcggaaaagcagcggcagccccgactctcagcactggtacgtctgctcatgaccacccagcaggtcaaaccaggacaagtactctagcccaggactcctgaaggcccagccacgctcccttcctcccaatggcctcttgtcatgaacactgtgggagcggggctctgtctcccccagagtccgggtggggagggcagacacctttccatgtgctgccagccctgatccattcgtggtagctgcctggggtgctgtgctgaggatccttagggcagatccagccttggcagggaagagtgctgggctcgctactgaggtctgttgtgggcactggagctggaagatctgccacacctgccacatgctgccatctctgagcctccagccccaggagggcagagggtataaaccaccgtgcattgcccagcctggggctgcctcaggccatctaggtttcatggcctgggctgactctgctcctggccccacagtgcctcagatggctccacggagaccctggccatggttgtggtagagcctggggacacgctgtcctcccccgagttcgacagcggtcctttcagctcccagtctgatgagacctctctcagcaccactgcctcatctgccacgcccaccagtgagctgctgcccctgggtccggtggacggccgctcctgctccatggactctgcctacggcaccctctccccaacctccttacaagactttgtggccccaggcccaatggcagagctagtgcctcgggccccagagtccccacgagttccttcccctccaccctcgccccgtctccgccgccgcacccctgtccagctgttgagctgcccgccccacctgctcaagtctaagtccgaggccagcctcctccagctgctggcaggggctggcacccatgggacaccctctgcccccagccgcagcctgtcagagctctgcctggctgttccagccccaggtattaggactcagggctcccctcaggaagctgggcccagctgggattgccgaggggcccctagccctggcagcggtcctgggctagtcggctgcctggccggggaacctgcaggctcccacaggaagaggtgtggagacctgccctcgggggcctctcccagggtccagcctgagcccccaccaggggtctctgcccagcacaggaagctgaccctggcccagctctaccgaatcaggaccaccctgctgcttaactccacgctcactgcctcgtgagtggcctggactggggtagggcaggtggctcagggcactggcatgggggcccactcatgcctgggagcatcgcatttggggagggtcatggcggagggagcctgaaccctgcccagtgtctgggcgcagggggctgtggtgggcagcagtgaaggggcctgaggagtgccgtggggaagagagggtgaccagagccactctgaatggcgtcagccaaagaaggactctgtcccctccccaccctgtagggaggtctgagcagagggaggcccccaagagtgccattgaccaagagacagcagacagcctgcctcctggggcgtgccggcacctgcttcagctactgcctcctgtatgcatgagccggatgctgggcaggatccctgcctacgcccgggcccgatttgcgctttgccggactggatggagtggaggaggcccaggccacagtaccaccccacctgcccaggcagcccctcgtcacctactccccgaagttaccagctcagctcgagtcttcagggctgggctcctaggctgcccatcctacttctaccctcactggcctccagtgggattcactcctgccctgcccccaccttcccagtcccacaggccacccctggcttgggctgggttctgtgaagttacgtatttattgagcttttggttcttttataaagacttgtctagactccactgggaagagtcctttgctttggggcccagtgactcggggcacttgagttcagggcggcctccttgtgttcctgtgctcctccacttgccacggatgggccacggatggagcttgccatgggaagcactgggaagtaatggggtgtggggtgccaccagaccaacacccccagacttccccaccttcagccaccatcagagcctctccccaggtgccccccggggattcagggctgaatctgcccagttcccacactcaggccagccctcttgggaaggtgggtcctccatgggggtcccttcaggaactttttttttttttttaatacagagtctcactctgtcacctaggttggagtgcagtggtgtgatgtcggctcactgcaacctctgcctcccgggttcaaacgattctcctgccccagccactctagtagctggaactgcaggtgtgcaccaccacgccgggctagtttttgtattttaagtagagacggcatttcaccatattggtcaggctggtctcgaactcctgaccccaagtgttccgcccgcctctgcctcccatagtgctagaattacaggcctgagctactgcgcttggccccttgcggtacttttggcccaacctcctccatggctggggacgcggaggccgagagagaagtcacttgccctggctctaccttgaagtggttctcagggttggggcgagagtcggggtggggaccgagatgcagctctatcctgtgcccctggtcgcagcaggcagcccagcgcttcgcgtgttctacttggcctgtccgctgccgcctaatgagctcaggtctaggccgagcagagggggcacctggtcggactcggttgggctcgggcggccccgcctccccccgcccgccaggcgggcccttctcgacggcgcggggcgggccctgcgggcgcggggctgaaggcggaaccacgacgggcagagagcacggagccgggaagcccctgggcgcccgtcggagggctatggagcagcggccgc

SEQ ID NO: 13387 - DNA, 4715 bp, Homo sapiens
agtttgcgctgagtcgactgagcccgtcccgcggctcccgtccccctctccccgcgcgccccatgaggctttggcagtctcggcccgagccttagagccttagacaccggggaggagaccctggtcctgttcctaggtatgtcaccacgccgactgccagcagctgcaccgccgggggcccctcaacctctgcgaggcctgtgacagcaagttccacagcaccatgcattatgatgggcatgtccgcttcgaccttcccccacaaggctctgtgctggcccggaacgtgtccacccggtcatgcccgccgcgcaccagccccgcagtggacttggaggaggaggaggaggagagctctgtggatggcaaaggggaccggaagagcacaggcctgaaactctccaagaagaaagcaaggaggagacacacggatgacccaagcaaggaatgcttcactctgaaatttgacctgaatgtggacattgagacagagatcgtcccagccatgaagaagaagtcactgggggaggtgctgctgcctgtatttgaaaggaagggcattgcgctgggcaaagtggacatctacctggaccagtccaacacacccctgtccctcaccttcgaggcctacaggttcgggggacactaccttcgtgtcaaagccccagccaagcctggagatgagggcaaggtggagcagggcatgaaggactccaagtccctgagtttgccgattctgcggccagctgggaccgggccccccgccctggagcgtgtggacgcccagagccgccgggagagcctggacatcttggcccctggccgccgccgcaagaacatgtcggagttcctgggggaggcgagcatccccgggcaggagccccccacgccctccagctgctctctgcccagcggcagcagtggcagcaccaacactggcgacagctggaagaaccgggcggccagtcgcttcagcggctttttcagctccggccccagcaccagcgcctttggccgggaggtagacaagatggagcagctggagggcaagctgcacacctacagcctcttcgggctgcccaggctgccccgggggctgcgcttcgaccatgactcctgggaggaggagtacgatgaagacgaggatgaggacaatgcctgcctgaggctggaggacagctggcgggagctcattgatgggcatgagaagctgacccggcggcagtgccaccagcaggaggcggtgtgggagctgctgcacacggaggcctcctacatcaggaaactgcgggtgatcatcaacctgttcctgtgctgcctcctgaacctgcaagagtcagggctgctgtgtgaggtggaggcggagcgcctgttcagcaacatcccggagatcgcgcagctgcaccgcaggctgtgggctagcgtgatggcgccggtgctggagaaggcgcggcgcacgcgagcgctgctacagcccggggacttcctcaaaggcttcaagatgttcggctcgctcttcaagccctacatccgctactgcatggaggaggagggctgcatggagtacatgcgcggcctgctgcgcgacaacgacctcttccgggcctacatcacgtgggcggagaagcacccacagtgccagaggctgaagctgagcgacatgctggccaaaccccaccagcggctcaccaagtacccgctgctgctcaagtcggtgctgaggaagaccgaggagccgcgcgccaaggaggccgtcgtcgccatgatcggctccgtggagcgcttcatccaccacgtgaacgcgtgcatgcggcagcggcaggagcggcagcggctggcggccgtggtgagccgcatcgacgcctacgaggtggtggaaagcagcagcgacgaagtggacaagctcctgaaggaatttctgcacctggacttgacagcgcccatccctggcgcctccccggaggagacgcggcagctgctgctggaggggagcctgaggatgaaggaggggaaggacagcaagatggatgtgtactgcttcctcttcacggatctgctgttggtgaccaaagcagtgaagaaggcagagaggaccagggtcatcaggccacccctgctcgtggacaagattgtgtgccgggagctacgggaccctgggtccttcctccttatctacctgaatgagtttcacagtgctgtaggggcctacacgttccaggccagtggccaggccttgtgccgtggctgggtggacaccatttacaatgcccagaaccagctgcaacagctgcgtgcacaggagcccccaggcagtcagcagcccctgcagagcctggaagaggaggaggatgagcaggaggaggaagaggaggaggaggaggaggaggaggaaggcgaggacagtggcacttcagctgccagctcccctaccatcatgcggaaaagcagcggcagccccgactctcagcactgtgcctcagatggctccacggagaccctggccatggttgtggtagagcctggggacacgctgtcctcccccgagttcgacagcggtcctttcagctcccagtctgatgagacctctctcagcaccactgcctcatctgccacgcccaccagtgagctgctgcccctgggtccggtggacggccgctcctgctccatggactctgcctacggcaccctctccccaacctccttacaagactttgtggccccaggcccaatggcagagctagtgcctcgggccccagagtccccacgagttccttcccctccaccctcgccccgtctccgccgccgcacccctgtccagctgttgagctgcccgccccacctgctcaagtctaagtccgaggccagcctcctccagctgctggcaggggctggcacccatgggacaccctctgcccccagccgcagcctgtcagagctctgcctggctgttccagccccaggtattaggactcagggctcccctcaggaagctgggcccagctgggattgccgaggggcccctagccctggcagcggtcctgggctagtcggctgcctggccggggaacctgcaggctcccacaggaagaggtgtggagacctgccctcgggggcctctcccagggtccagcctgagcccccaccaggggtctctgcccagcacaggaagctgaccctggcccagctctaccgaatcaggaccaccctgctgcttaactccacgctcactgcctcggaggtctgagcagagggaggcccccaagagtgccattgaccaagagacagcagacagcctgcctcctggggcgtgccggcacctgcttcagctactgcctcctgtatgcatgagccggatgctgggcaggatccctgcctacgcccgggcccgatttgcgctttgccggactggatggagtggaggaggcccaggccacagtaccaccccacctgcccaggcagcccctcgtcacctactccccgaagttaccagctcagctcgagtcttcagggctgggctcctaggctgcccatcctacttctaccctcactggcctccagtgggattcactcctgccctgcccccaccttcccagtcccacaggccacccctggcttgggctgggttctgtgaagttacgtatttattgagcttttggttcttttataaagacttgtctagactccactgggaagagtcctttgctttggggcccagtgactcggggcacttgagttcagggcggcctccttgtgttcctgtgctcctccacttgccacggatgggccacggatggagcttgccatgggaagcactgggaagtaatggggtgtggggtgccaccagaccaacacccccagacttccccaccttcagccaccatcagagcctctccccaggtgccccccggggattcagggctgaatctgcccagttcccacactcaggccagccctcttgggaaggtgggtcctccatgggggtcccttcaggaactttttttttttttttaatacagagtctcactctgtcacctaggttggagtgcagtggtgtgatgtcggctcactgcaacctctgcctcccgggttcaaacgattctcctgccccagccactctagtagctggaactgcaggtgtgcaccaccacgccgggctagtttttgtattttaagtagagacggcatttcaccatattggtcaggctggtctcgaactcctgaccccaagtgttccgcccgcctctgcctcccatagtgctagaattacaggcctgagctactgcgcttggccccttgcggtacttttggcccaacctcctccatggctggggacgcggaggccgagagagaagtcacttgccctggctctaccttgaagtggttctcagggttggggcgagagtcggggtggggaccgagatgcagctctatcctgtgcccctggtcgcagcaggcagcccagcgcttcgcgtgttctacttggcctgtccgctgccgcctaatgagctcaggtctaggccgagcagagggggcacctggtcggactcggttgggctcgggcggccccgcctccccccgcccgccaggcgggcccttctcgacggcgcggggcgggccctgcgggcgcggggctgaaggcggaaccacgacgggcagagagcacggagccgggaagcccctgggcgcccgtcggagggctatggagcagcggccgc

SEQ ID NO: 13388 - DNA, 23449 bp, Homo sapiens
gagtcgactgagcccgtcccgcggctcccgtccccctctccccgcgcgccccatgaggctttggcagtctcggcccgagccttagagccttagacaccggggaggagaccctggtcctgttcctaggtgagtcgcggggaagtgggagctgcgctccggacggggggtgggactaggcgccaggacccccctaaaccgatggacagaacccggattcgagattcccacgtagtgccaggcctgtgggtgggtacagggtcctcaccagctgtatctccatttacgtgagggtggaatgggttcaagctcccgcccccatcacagtgtctctagggtgggtcggctcggagatagggccgtgaggagtctatgggaccctggccccggtatggggggtattggcggggcagggggatcctggaggggcccgggcgcgcggcgtggctgggaggctcagccgatcctccccatctggccagtcccggagtcggtcccaggcggaaaagccctctcgaggccggcagggggcgccagaggctgcgcctcgggcagtctgagcagacccaggcacccacttaggggtgggggatgcgggagacccgtgaatccggggaggccctggcctgccttggtggaagtctgggaaatggaggccaagaggtcccctgcagattccttagtaactcctcaagttgagggagctcgggggtattttaccattctcctgccctttagccggggtccgggcacacactaggacctggcagccatccccagatactgaattctatgccctcttggcacaggtgggcaaattgaggcccagtaggggaagggtgggggaacgtaggctccagaccaggtcttctgaagcccaggcaggtgccctctttcccccgctccctaccaaggaggcttctaagttgcaccggggaagggcttgctagtccaggtgctccgaagacacacgctggggtctggggctgggaactgcagaggctgggcaggaggggatgttcacagactgcagcccctccctctttctctagcactgggtcccagccttgggcatactagccaggaccgctccctggggaggaaggggccttcctggcttccagggcccgtgcggtgggcttagcctggggagaggttttctgtgtccctgccatctgcccggcacagggcagggccttaggtcaggctctgactccaggtgagcctcagaacccaaggggtgatgggtgaggcctgggcctaggggaaaggagggtgggtaggccgggtggagcgtagagagccgcctggcaaagccaccccgccctggctggcctgcccatgcatgcagtctccacccctggatttctaaggtgttgggtggggccttgggactagcaggctcccaggggagcttagccttggtgggaattcctggcaaggacatccctccagccagagagctcggactcctggttccaggcccgtctgctgtcggcagagcctggagctggccccagacctgcgtcctttcctggacagggaagtccctctcccacccagaccaggctggggccccagctcgttgtggggcagggatgcctgggggatccctggtttcccatctgcttttctggggctgggggaggtgatactgagggagaacagccgggtgcgggggtcctgccttggagactccattattcatcagcctccgcatctggtttctgggtatcagtttcaacaagccggccctgactcacaagcctggagctggggctgggctggggaggggctccctccccagggagttgggggccaggacttcttgggcctgcccctgagctgtttcagctccctgctgtggagaggaggtgggaatgcaggagcctgcccaggcccaccccactgccctggtacaggggctgggggctcctttctgctctgcactcttgcccctaaggaacagtcccccacccttgctgagtacccaggcagcagcctcactcagggatggccagggcccaggcactcaggtgacctctggtgatccgccctgacccagccctggtggtctccacttgatgcaacctggttaccccacaccggtgggctccccacaagctggctttgggatctgccgtgtcttcaggaaggcaatctccagggccctgttgcccaaaccaacattcagctgtcttcaggccccacgcctgccctgtgcctgaggcacccatttccctacgtagcagcagctggtgactttggggcaagtcagttgacacaggccttagtttctctatctgttaaatggggattgtaacagtatctcctcctaagagtctttgagaagagcgaatgggattcactgcctggaactcccacgatggggtggcacatggaatgctcagtgaaatgcagttatctgcctacaggacagtatgggggtggaggtctggggcaagaccacccgatttgaagtaggaactcacctgcccagggccagcaggcccaaggtcatggatactaggaggaggaagagaccttcggtctggcagtggggaaggctctgttgactgtcggccacaggaagggatatcctggccgagccctttcctgtccccatgtccttctgtggcatgaaggcccttctgccttcatctgttcactgatctcatccccaccaagcgcacctactgtgcaccaggactgttctaagtgccgaggacacagtgagatgcagacggccaaggcgctggcttctggagaggacagtctggtagggaagaatgatgataaaaaagtgaacaaagaaatgaattacaggtagtaataaacactaagaaggaaataatttaacttaaaggaattgagagtgggagggtaagggtggtttattttaagatgagggaaaaggacgtcttagaggtaacatttaagttggggcccggtgtcagctgtttcaagatagggtgcgtggaattccagacagaaaatacagaggagaaggccctgagcttggcgagctgtagggagagaaggaagaccggcaggtggaccctgtgcggaccagctgggagggaggcgggagcccggccatggtgggatttcactataagcaagatgggaagttttagttttcaaaactctgcctgttggccgggtgtggtggctcatgcctgtaatctcagcactttgggaggccaaggtgggggtggatcacttgagatcaggagttagtgaccagcctggtcaacatggcgaaaccccatctctactaaaatacaaaaagtagctgggtgtagtggcgggcgcctgtaatcccagctactggggaggctgaggcagaagaatcacttgaacctgggaggtggaggtcgtagtgagctgggatcatgccactgcactccaacgtgagtgacagagcaagattccgtctcaaaaacaaacaaacaaaaaacaaaaacacaactctgcctgtggtgtagacagtgggtgacctgggctttgggagtggagacagccctggaagtctcccagcctctaataaaacgctgctgccctcccaaagccatctcacggaccctggcccccttcccaccctctttccccatggaaccaggtggaggaggagcaattaggggtgggtgggctgatgacagacagcatggccacctcacccccatgggttctgaggagtgtcccaaggaggccatcccagaatcccagagccacagtctgagtttcagtcttgcctgtagacttttgtctctttatgtcactttatcccccacgccgtgaatggggctaatggtgcctgccctgccttcctgggaatcagtgtaaaagcgctttgacagccgtgtagtggtgactccagcaccagagtctgggcgtttgcgtcctctcaggctttgctgagtgccccctggcggtggggacctggcctagaactgcagggacctgggctgctgtgccatgtgggtcgccagggtttcctgatgcctccacctcacccagctcctgggggctgccaaggatagcctctcagagcagcccgccttctgcccacggccctttccagaggccaccggcctttggctctcggcctctgccgtacctgggcagtgagcagtcggtgtgagggggtgtccctggggctcaggctctcgggcaggggtctccaggttgatgggaggggctgagatgagagctggttgtgaggttggggtgggtgtgtgactggggctcaaagctggtgttggagcagagaggggtgtccctggggctagatggagagccggaccaaggaccctgaggggagtgtgccccatcctggcctcccccttctggtgcctgtattctaagagctcccttgctgggagtaagaaggggtcccctgggctgaggctccgaggcgggggtgggggtctccaggaggaagggaggagggaaggtacccttctggctgggagggaccgtgcgtgttggcgctgagggtgaggtggggaccacagcagagtgggcacccccagggctgggcggggatcgagtcacccaggggaggggctccacagtctccaaggtgggggggggtgtcaccagcgccccctgcctccagcattcaaggagctccccaggagaaagagcaagttctgaggagccctctgagcccggcattggtgttgaggagggagtcagagaagagaggggcccggggccgcgcagaggcgcagaggtgggggtaccccgggccaggcagaggtgggaaggtgggggtcccggggactgggcggaggcggggctgtgggggtcccccggccgggcagaggtaggggtgtggagtccccgggtctgggcagaggcggggaggcggggggtcgcccgggcaggcggaggcgggggtgtaggggttcccgggcggggaggcggggatccccggggctgggtggcgagggcccgggcgggagggaggtgtccgccttcctggggggctgggggctgttccgggcccggccctccccggggtccccgcgctcggcgggggcgggcgcggccgcacaatggcaggaagcggggctccgcgctttgtccggcgggcggcgcagaccgcggcttcctccggccgccatggggacaggacccggtgtctccggacgcctagcagcctccaggccgggcccggggctgcccctccgggactcggagccctcctgggccgggggtcgtgcccgcgacggtgatagccaggtacggggccgggacggggcgggaacggggctgggtgcccagttctcgcctgcagccgcccagtcctgtgcgggaggccagggagggggtgcccgtgactatgggccccgcggcccccaggggaaggatgcggcccatggcggccgagccccctacctgggcagctgcaccctggtgacggggacctcggactccggggtgtgtccccgccggctgagatgtccccgccaattcttggcgctttgtgtctggggccagctccggacacacctgtgggtcccgggccctatgctgggccgcccctctcctttccttcctctgccctggccctgcccacagcctcctcctaccccagaggcctctgtttctccttgtgcctctggccccagcccttgtgtgagggtggacgcctggttctctgtccccatcctcacatgcgtgtattccccaaagggcccccctctgttattttggctgcctggcgttagagggggtgggagctggctgttcccatgggtgggctctctcctcccttgggttgagacctgggaacattcccccccggaccctggtgtccctcctgcaggacagaggcaggacatggtgggcaggcaggcaggtgagggaggggcagttgggtctgagagaaggggctggagtctggcttcaagaaggggccattccgccctagtgctgggggagtcctgcctctggagggagctggggagactctggggtttgggggtgggacgtgaggcagaacggggagcagaaactgcaccagggagctctgcccaccccagcttctcagttgggctcatggttctcccggggggcttccagaacttcatcgtcaaccagatctgctcgacgaagtcggaaaccacctggttcagatcctggggctgagcctcactgtgcccccagtgcccctgagcctggggactgctgagaggagggaagcagatgaggtcagccgggcctgggcaccagcccctggcagcagctggaggagtcgagcagcctcagtgatggtagtggccacccagaccatcacagcagggaaactgatctcgaggctttcaagggatccagggtggggtgcgtcatagggctcagtccgtatttgttgaatactgactcttccgtaaggagcgaatcagggtatcaaatctgctgtctgtatattggattgatttaaaaacaagatggtggcacagagtcagacttggactggaagggtcccagagaccctcccagaactcctccgacctagcacggctccttccttgtcaccccctacctgcggtgagaccagggcttgggtcatgggcaggtctgccgccccagctggcactaggaaatctcaggaggcctggaagggattggagctgggagcctctgccatgctggctgggttcacagagggccagagggctgcggagcccgcagacggggggctcccaggaagaggggacaaggtggggcagggcccttccccagatcattctcatgaggagacacctgaagcttgggctcccagaagctgcaaagcctgatgtttctctcagcagtgcgctgtggattcagggtgagggtgtgggtagagccctggctgaggacagcttagtggtctctgtagtttttaaatttttttctgagacggggtctcactgtgtcgcccaggctggagtgcagcaatgtgatcatggctcactgcagcctcaacctcctgggctccagcaatcttcccacctcagcctcccaagtagctgggactacaagagagcgccaccacacccggctaattttgtttgttttttgtagaggcaggatctcactgtgtggcccgggctggagtttttgcactttgttttacgatagattaagacagaaaccagaaagagctgcaggggttgagggatcaatcccatcaccctcacttcaagccccacaagcacagttgaagatcactcctgaagggtgtagaagtgggggcacctggtgctcaaggctgccttcaggaatctgggtcatcctgtccccagccacctgcctggggcccagctccatgcagatcagcccctccctgagcacgtgggcctgcttggagtgccacctgccgactgccagtcctgtgccctgttccctttcctgtcagatggagacacggagggacacaagaaccaacagggcttgcatcaaactgagatagatttcctcctgtccccgtaatcccggctgacctgaggccagcctctcgctcctaagacacccatgagagggcgtgaatgtgggttaaaatctgggatccagtctgggtgccgtggctcacgcctgtaatcccagcacttggtgaggccgatgtgggtggatcacctgagggcaggtgttcaagaccagcctgaccaacaaggtgaaaccccgtctctactcaaaatccaaaaattacctgggtgtggtggcgtgtgcttgtagtcccagttacttgggaggctgaaacaggagaattgtctgaacccaggaggcggaggttgcagtgagccaagatcatgccactgctctccagcctgggcaacagagcgagactctatcgcaaaaaacataaataaatacataaataaataaataataatctgggatccagagccccacacacagtggcttcaagtcctagatccactggctgtgtgaccttagacaagtcatttcacctctctgagttttactttcctcttgtgtgaaacagggacaataacagcccttatcttatgggatgagatacacatgtaatgcccccagtgtggctccagacacatgacgaccacattaaaaacacactcagattcttcccggcctcctcctccctcctgtcactttctctgctatcctcaccacgcctatctcggaaatctctcatcgggctttcaccagccagaaactcttcagcgcctctctcctgccttaattcataaatgaaacaaggatttatggagcagctgggaccggaggtcaggcgctgaatcagacagagtaacatttctgtccttgcgaatgtgaccaggtgtggaggcagcagggtggaatatgtgacctgtcaggtgctggaaagtgctgaggacaggaaaggagcgtggagggcgaatgaggaggatgagaaggtgacttggggggaagctagcaggaggggagggaaggcagggagccatgcatttcaatatctggggaaaagcatctcagtccagggactggcagatgtcacagctcagaggtgggagctgccctgagggagtgtgtcccggaacgaccaggaggccagtgggtgaggggagtgagccaggatggaagagcaggacaggaggtccctgaatggggtggccttaaccctaaaaaaaaaaaaagtcaatgtcataaaagactgaaaaccctaaccttaacccttttggcttttttttttttttaagataatgtcttccctgtagcccaggctggagtgcagtggcgcaatctcagctcactgcaacctctgcctcctgagttcaaacaattctcctgcctcagcctcctgagtagctgggactacaggcgtgtgccaccatgcccggctaagtttttgtgtttttagtagagacggggtttcaccatgttagccaggatggtcttgatctcctgaccttgtgatccgcctgcctcagcctcccaaagtgctggggattacaggcatgagccaccgcgcctggcctttttatttacttatatatttatttatttatttatttatttatttatttatttattttgagacggagttttgccccaggctggagtgcgatggcacaatctcggctcactgcaacctctgcctcccgtattcaagcgattctcctgcttcagcctcccgcgtagctgggattacaggcatgcgccaccatgcccagctaattttgtatttttagtagagacagggtttcttccatgttggtcaggctggtctcgaactcccaacctcaggtgacccgcccgcctcggcctcccaaagtgctgggattacaggcatagccactgctcctggccccttttggcttttattcagagtgagatgggaacccttggagggttttgagtagatacagtgggactcctctttgaacagggcccactctagctgcacatggacaacatattgtgggggatgggggtagcagtgaggccagttttgaggccattgttgtcatctagctaaaaggtggctgggcagtggcacgcttatgagctgtggctgggttgaggccacagatactaaaggtggagccagcgggattttcgggctgaccagatgggggcataacagagaatgtcaagagtgaccccaagctgatatggtggctcacacctgtaatcccagcactaattccagcactttgggaggctgaggcgggcggatcagttgagcccaggagttcgagaccaggctgtgcaacatggcgaaatcctatctctactaaaaattagctgggtatggtggtacatgcctgtagtcccagctacttgggacggtgaggcaggagaatcacttgaacccaggaggtagaggttgcagtgagccgagattgcggcactgcactccagattgggtgacagagtgagaccctgtctcaaaaaaaaaaaggaaatcccccaccttgcagccatcagaagaatcaaataattgatttaggttaaaatcatctatgtatgctaaagctcttaggaccgcaagctcacatcaccatgcctggctaatttttttttttttggagacaaagtctcgctctgtcactcaggctggagtgcagtggtgtgatctcggctcactgcaacctctgcccccggttcaagcaattctcctgcctcagcctcctgagtagctgggactacaggcgtacgctgccacgactggctaatttttttgtattttagtagagacggggtttcaccgtgttgcccaggctgctatcgaactcctgagctcaggcaatccacccgcctcggcctcccaaagtgctaggattacaggcatgagccaccgtgcctggcaattttttatatttttagtagagatggggttttgtcatgttggccaggctggtcttgaactcctgacctcaactgattgagtgagattactggggaacaagacatctcaaagtgccatgccacagattacttattaattataggggaaaaagggactctacaaggtacagaggtccccagaggatccagcattacaggcaaatagcaagaacacacagctctgtggtgtccccgcctgaacgctcagtttgaaactttctgaggaccaccagggagatccacattgaggagctctgtgcgaggctgctggctcgaagacttccaaaatgtcaaggtcagccaggcacagtggctcatgcctataatcccagctctttgggaggtcaaggcgggcagattgcttgagcccaggagttcaagactagcctgggcaacatagtgagatctgtcactactaaaaataaaaaagttagttgggcgtagtggcatgcacctagtattcccagctactaaggaggctaaggcaggaggattacttgagtccgggaggttgaggttgcagtgagctgatcatgccatactactccagcctgggctacagagcgagaccctgtcttgaagaaaaaaaaaaagtcaatgtaataaaagaccacaaaaaacaaggctgggcacggtggctcacgcgtgtaatcccagcactttgggaggccgaggtgggcggatcacgaggtcaggagatcgagaccatcctggctaacacggtgaaaccccatctctaccaaaaatacaaaaaattagccgggcgtggtggcgggcgcctgtagtcccagctactcaggaggctgaggcaggagaatggtgtgaaccgaggaggcggagcttgcagtgagtcgagatcgcgccactgcactccagcctgggcgacagagcgagactccgtctcaaaaaaaaaaaaaaaaaaaaaaggataaacagacataaccaaatgccacgtgtgaaacttgattagttcctatatgaggaagtatatctgtaagaacgttatttagacacttgggaaaatgtcaatatagactatatatcaaggttcagtttcccaagtgcgacaattctatggggttttgtaggaaaactgtctttgttcttaggcagcagcatgatttctgccccaggggaggggggtgccgagaagagaatgggagagaagcagatgtggtagatatcaacttggggagtccagagggcatgtggatgtcatgtgctattcttataatttttggtaggtttgaaatattttaaaacaagtctgggcgcggtggctcacgcctgtaatcccagcactttgggaggccgaggcaggcggatcacctgagaccaggagttcaataccaacctggccaacatggtgaaactccgtctctactaaaaatacaaaaattagtcgggcgtggtggattgtgcctgtaatctcagctacttgggaggctgaggcaggagaatcacttgaacccgggaggcggaggatgcagtgagctgagatcgtgccattgcactccagcctgggcaacagagcgagaccccttctcagaaaaatttaaaaaaataaaaagaaaagaaatattttaaaacaaaacttgggaaaaataaagagagtgggaggagagaactaggaagtcgtgaatactgatacctgtttacagagtttagctgtgaagggaaagaaagaaagtcagccgtagctggagggtgaggtgaggcctctgtaaaatggagaaataaggctgggcgtggcagctcatgcctgtaatgccagcattttgggagaccaaggtgggcggatcacttgaggccaggagtttgagaccagcctgggcaacatggtgaaaccccgtctctacaaaaaatacaaacactcgcctatggtggtgtgtgcttctagtccaagctactcgggaggctgaggctcgaggatcacgtgagtctgggaggtcaaggctgcagtgagccatgattgtgccactgcactccctgtctcaaagaaagaaagaaaaaaaaagatggagaagccgggcgcggtggctcacgcctgtaatcccagcactttgggaggcccaggcgggctgttcacgaggtcaggaattcgagaccagtctggccaacacagtgaaaccctgtctctactaaaaatacaaaaaaaaaattagctgggcatggtggtgtgcgcctgtaatcccagctactggggaggctgaggcaggagaattgcgtgaaaccaggaggcggaggttgcagtgagccgagatcaagccattgcactccagtctgggtgacagaatgagactctgtctcagaaaaagaaaaaaaagaaaaagatggagaaataaccacgtgttggtgtggcagtgggggaaatgatccagcagaggggaaacttgatgatgtgggagaggggggactgctggggggcgtctcctcaccctggatcgagagatggagggcagttcattctaagtccctgcagcgctgggccggggtcgagggatgtggtggatctcgtggacctcctgaaggcttctgtccccaccccaggtatgtcaccacgccgactgccagcagctgcaccgccgggggcccctcaacctctgcgaggcctgtgacagcaagttccacagcaccatgcattatgatgggcatgtccgcttcgaccttcccccacaaggtgagcacaggcgggagccgcagctcggcccccagagctcctgtgtcagtgtttcagtaactgtcggaaacgtgctagggcgtcataaggacaagtcgactgtaaataatgaaacccgagtatgttacggttccttttgttccaaatgttttttagcaagagagaaagtccatgagcgtgccccttccagaggcaggcctttctctatctggtgctgtgctctcactggttctcacctcccccagctgcttttgcccctggcctgtggcccacacagagaaggcccctttctttctagttctgcctatcctcagggcaggggacttctggacaagtcctgcaagccaggctgtgggcctagcagaggcagtgtggagtgggggtggccaggtcaggaggcacttggagcaggaaataagaaattcctcttgctgagcagggacccagctcaggcccaccatcaactgcctatggaggagtggctcgcaggcacccaggcctggtgagaaatgccaacccccgagtcctttcccagctgatcagaggaacaaaaggattcttctggttgggcacggtggctcatgtctggaatacaaaaaatacaaaaattagccaggtgtggtggcacacacttgtggtcccagctgctcggaggctgaggtggaaggatcgcttgaaccccgacaatggaggctccagtgagccctgatcgtgccactgcactccagcctgagcgacagagcaagaccctgtcttaaaaaacaataaacaaacaaaagactctctcccactgccagggccccttgggaattcaggtgtggtcacagcatgggggaggggaggcctggaagaaagagccatggactttggtcccttcctgtaataacctcagaggcaaggcttccttatccttattttatagaagggtaaactgaggccacaggtgagtttgtttttggggtggagcttcaccatgggtgtcatcccagggcctttgtgtccttttgggtctgtggggatagacagcaatgactaaggccaggcaaggtggctcacacctgtaatcccagccctttgggaggctgaggtgggtggatcacttcaggtcaggagtttgagaacagcctggccaacatgttgaaaccctgtcattactaaaaatacaaaaaaatgagccgggtgtggtggcacacgcctgcaatcccagctactcaagaggctgaagcatgagaattgcttgaacccaggaggtggaggttgcagtgagccgagatcatgccactgcactccagcctgggtgacagagtgagaccctatctcaaaacaaaaacaaaaaacaatgactgagcccctctcctcacagaactgaagggcccttgctacctttaatctgggggttccagggtaacaggctgtggtccctctggaggcagccatgctgcaggctaaggaggggcgggggaggcacaaccctctcctgctttctcccaaggctctgtgctggcccggaacgtgtccacccggtcatgcccgccgcgcaccagccccgcagtggacttggaggaggaggaggaggagagctctgtggatggcaaagggtaggtgagggatgagtgggcagagagatacctggagggccccacggctgggtctcagatcagacattcaggaccagatgctctggcgccttcctcaagtaaggctgatgggcagacctcttcccacgcctgtggctgtcctgactccgggaagaggccacccagcctgggccagcctccagggtgcttgggatcctagcccacaccagaccaggtaccgttcgatgtgactcccgtgttggccaccagagggcgcacagccctatgcgggcctggccgggttgaatccacgcgggttacctgtcacctggggtgagccaagggcggggaggccacaggcccactcgccgcccacgctggcgagggccacccacacctccagcctctgccctcctcgcttccctgcagggaccggaagagcacaggcctgaaactctccaagaagaaagcaaggaggagacacacggatgtgaggagccccccagagccggcagatgcgggttccctacagcctgcgcccttccccgagcctgggccttcctccgggatgggggtggggaggtctgcatcccagggtgcagaggtctgggagatcgctggggttccctttcttgctggggttcccatccgagaccggagggtggggagggtggggaggagggttgggaaggagggtgggaaggagggtggggaggagggttgggaaggagggtgggaaggagggtggggaggagggcgggaatgagggcggtgaggagaagctcacagcccccacccccaccatcctcccaggacccaagcaaggaatgcttcactctgaaatttgacctgaatgtggacattgagacagagatcgtcccagccatgaagaagaagtcactggggtagggcttgatggggctcagggtggaagtgggactgggagtaggggtggccccatgttgcaggctccgggtctctgcaggtgtgacgtgtgtgtctgtgtggtggcccgtgagcgagcgcatccctgcgtgggcagacccgtgctggtgtgcacgccagtgtgagggagtgcggtggggtctgtgtacttgtgcattttaatcatgtatgcaggagccaggcctgcgtgtgggcaggcgtgtgacaggtctgccgtggtatgcagatgcgcctgtgtgagcacctctgcgggcaggtgtctgtggacctgcgtgtgatcccatgcgggcttcccttttccgttgggaaggtgggggcagctggggctgtgggtggggcgggggctcgtgggggcggggcccaagctgaagcgactggccgcctggttctaacacacatgcctcctgtcctgggggcagggaggtgctgctgcctgtatttgaaaggaagggcattgcgctgggcaaagtggacatctacctggaccagtccaacacacccctgtccctcaccttcgaggcctacaggttcgggggacactaccttcgtgtcaaaggtgagaagcagcctgggccaaatggggccgctgggactggcggagcctcctggagatgggcgcccttcccaggctcaggttcccattggtcgtgggcctgagcagcctcattaccatacaggtgtctctgctggatgctgctgggggaggggagggtgctggcagggcggggctgtcgggggagggcaggcaggccttggtgtggatcctccggggagagaggaccggggaccccctcctccaccagaccagggtactgaggatctctcgtggcccccacatgcagccccagccaagcctggagatgagggcaaggtggagcagggcatgaaggactccaagtccctgagtttgccgattctgcggccagctgggaccgggccccccgccctggagcgtgtggacgcccagagccgccgggagagcctggacatcttggtgaggaggagggggtgtgtcaggggagggggtgggaaggggcccaggctgggcccacagcccctcctcagaggcagtcaccctgggtctctcactgccccatcttggggttttaattgtcccttctggaaaatggggttggctgggagagtaggggaccctctctctctggatctagccatagcccaaggtgagggcttgtatctgagactcttctagtgccaggggtcagggaacctgtgtgtgcatgtgtgtgtgagagcacttgtacctggggctacagaccacccagagctgtgttccagagtgcatctgagtgtgtaactctgtgcttcatgcttgaagctgggggactgggggatgatagtctgggcgtatctgtgtctggaccttccagtctccagatatgtctgggtcccaggagaggggacaccccagggtagagatgcagagaccctcctccatcccaggctggcctgaggccctggaaacccgccctggggtggggccatgggggctggcagggggtcccggccctgaccacccttccctgaccaggcccctggccgccgccgcaagaacatgtcggagttcctgggggaggcgagcatccccgggcaggagccccccacgccctccagctgctctctgcccagcggcagcagtggcagcaccaacactggcgacagctggaagaaccgggcggccagtcgcttcagcggctttttcagctccggccccagcaccagcgcctttggccgggtatgtggccccatctgcccagggtcaggcagctggctggccatgacccctgaccctgaccagggtatctttccaggaggtagacaagatggagcagctggagggcaagctgcacacctacagcctcttcgggctgcccaggctgccccgggggctgcgcttcgaccatgactcctgggaggaggagtacgatgaagacgaggatgaggacaatgcctgcctgaggctggaggacagctggcgggagctcattgatgggcatgaggtgagtgcgggccacagtgctgctccctccttgtcccgaaaggaggacagccctcgggaggacccagtgatcagatgttccatgggacgccccaaagaggccactgttaccattagcccactttggagacactgaggctagatgaaaatggtgtgctgcttggctgttttaatggcagaggagggcccagatcttgggtgtcttaactgtgattactcatgtggtgtcaagggtgaccctgctcctcttgggacctccatgtccccattgggaaaatgagagttgcatgcaggttgcttatcctccccggccaccctaaggtgctccaggcctcgtgaatgacccatcctgccctccctctagaagctgacccggcggcagtgccaccagcaggaggcggtgtgggagctgctgcacacggaggcctcctacatcaggaaactgcgggtgatcatcaacgtgagtaggggctgcgctggtccccgtggccaccctgcccccctctttctgacagccctcagctgagtctgagcctttgcagaaggagcaggtgcctggcaatgaggtgggggcaggaaagtcagacaagggctgcgcccagggaggaggtgcctcctagaggaacctgggagggggcttcgggcaggtttgtcaggttcagctgaattagcacaggtgaggcctcattctttcactttcgttcagtggctgtttcccaacacttgctgtgtgctgggtgcccagcaggccacgccctggacgggacagagtgagctggcagtgtagggatttcggctcagggaggggagcacctaccctgggcttggagcttcctggagggaggaagcaccctcagaggtgaaatctggaggctaagccagggcagaggtggagaagggaattccaggcatggcttcaaagccagtctcccccgagcttccctccaggagggaccagggcagtgtgacctcgggagggctatgaggactgggtctttcctcagggtctggactacccaggtgcgaaggccaaagggtacagccttcttatccgtggctgctgtggggcctcctggaacggggaaggggaaggagtggcaggggagcctgaggctgggtggggccctagggctgagacagcctcccgaccccagtcacaccatcccctgatcccacagctgttcctgtgctgcctcctgaacctgcaagagtcagggctgctgtgtgaggtgcgctgggattcgggggcggcggcgggtgaggtaccaggaaggagggcgggacctggacctggggcggggctaacctggcggaggggcgtggccaaccgcacctcccgccgcgcccaggtggaggcggagcgcctgttcagcaacatcccggagatcgcgcagctgcaccgcaggctgtgggctagcgtgatggcgccggtgctggagaaggcgcggcgcacgcgagcgctgctacagcccggggacttcctcaaaggcttcaagatggtacgggcggggccgggcgcaggcgggggcactgaggcagggctggggcgccgaaaagcctccacggcccgatccggtctgcccagcatccccaacctcccccaggcccgtaaccgcacttgaccccttgtggccaagggtgaggaattacgaggcggtcgcccgggtttgagcctccacctgaccatctacccctgatccctggccacgggtggtcactttggctgaggctcagtttcctcatcaggaaacagggatcataagcttgctgcccccttggggtggtcgcccaagtgcagtaaggaagcgcttgcgcagcgcctggcgcgggccggcccgcagggagcgcgcggtaaccggcgccgtggttgttctgccccgggccagttcggctcgctcttcaagccctacatccgctactgcatggaggaggagggctgcatggagtacatgcgcggcctgctgcgcgacaacgacctcttccgggcctacatcacggtgagggcgcgcgtgccgtgggcgggggcgcaggaggacgggaccctggacggggccgggtggggcggggcctgccctgagcccgcccccactcccccaccgcagtgggcggagaagcacccacagtgccagaggctgaagctgagcgacatgctggccaaaccccaccagcggctcaccaagtacccgctgctgctcaagtcggtgctgaggaagaccgaggagccgcgcgccaaggaggccgtcgtcgccatggtaaccctgatggccagcgggagccgtcccccctgcgcggctctctgctccgtcatgaccctggacctgaagctccctcacctgcccctagatcggctccgtggagcgcttcatccaccacgtgaacgcgtgcatgcggcagcggcaggagcggcagcggctggcggccgtggtgagccgcatcgacgcctacgaggtggtggaaagcagcagcgacgaagtggacaaggtgggcgtgtgtgtctgcgggggttgccggctgggagagaggaaggcccagctggcaggcaggggctgtgctgggcatctcactgaggatgcctagctgagatgggagtcagtctctggcctcccctacgttcacgccatccgtccccagctcctgaaggaatttctgcacctggacttgacagcgcccatccctggcgcctccccggaggagacgcggcagctgctgctggaggggagcctgaggatgaaggaggggaaggacagcaaggtgattccagggccaccccacccctgtgccctgcccttcctagggacctcctgggccccagtcactggttctcagctctgcagtcccttcggtggttactcaagaaccagtgaccttgtcatagtgaatgacagttctctgcctgccattcacaaatccagcagtagggtcctagcccttgaaggcaccagttgtgcccatttgttggtgccacatgggttcctggtgggagggcagccatattccacaagtgggccaggaaccccagagccttgctactgtgccatggccccttcaggcatggggcaggctgagagcttgcacacggtgacttcaaagtcaccagtcttctttttaatgtaaacttgtattgagataagtcatcaacgtacatctcagtgaaagagaatcatcttcctcttcattttaattttacttgaaggttcatggtgggaggagtgtttgacaaaaaccgagtgctcccaggggaggctggtgccacagtccctggccctgaccctgctggcctctctggccaccccccctcctgccactgcagatggatgtgtactgcttcctcttcacggatctgctgttggtgaccaaagcagtgaagaaggcagagaggaccagggtcatcaggccacccctgctcgtggacaagattgtgtgccgggagctacgggaccctggtaaggagccctggtcccctgttcctggtcaggggctgtgatgggtgggggccatcgtctctgctgacactgacttgggccttccctaaccagggtccttcctccttatctacctgaatgagtttcacagtgctgtaggggcctacacgttccaggccagtggccaggccttgtgccgtggctgggtggacaccatttacaatgcccaggtgagtgcagagtagtgagtgggtgggcaaggcagattagggagatgctggtcacaacccattctgtcccatgtaccccaaccttgcctgcagaaccagctgcaacagctgcgtgcacaggagcccccaggcagtcagcagcccctgcagagcctggaagaggaggaggatgagcaggaggaggaagaggaggaggaggaggaggaggaggaaggcgaggacagtggcacttcagctgccagctcccctaccatcatgcggaaaagcagcggcagccccgactctcagcactggtacgtctgctcatgaccacccagcaggtcaaaccaggacaagtactctagcccaggactcctgaaggcccagccacgctcccttcctcccaatggcctcttgtcatgaacactgtgggagcggggctctgtctcccccagagtccgggtggggagggcagacacctttccatgtgctgccagccctgatccattcgtggtagctgcctggggtgctgtgctgaggatccttagggcagatccagccttggcagggaagagtgctgggctcgctactgaggtctgttgtgggcactggagctggaagatctgccacacctgccacatgctgccatctctgagcctccagccccaggagggcagagggtataaaccaccgtgcattgcccagcctggggctgcctcaggccatctaggtttcatggcctgggctgactctgctcctggccccacagtgcctcagatggctccacggagaccctggccatggttgtggtagagcctggggacacgctgtcctcccccgagttcgacagcggtcctttcagctcccagtctgatgagacctctctcagcaccactgcctcatctgccacgcccaccagtgagctgctgcccctgggtccggtggacggccgctcctgctccatggactctgcctacggcaccctctccccaacctccttacaagactttgtggccccaggcccaatggcagagctagtgcctcgggccccagagtccccacgagttccttcccctccaccctcgccccgtctccgccgccgcacccctgtccagctgttgagctgcccgccccacctgctcaagtctaagtccgaggccagcctcctccagctgctggcaggggctggcacccatgggacaccctctgcccccagccgcagcctgtcagagctctgcctggctgttccagccccaggtattaggactcagggctcccctcaggaagctgggcccagctgggattgccgaggggcccctagccctggcagcggtcctgggctagtcggctgcctggccggggaacctgcaggctcccacaggaagaggtgtggagacctgccctcgggggcctctcccagggtccagcctgagcccccaccaggggtctctgcccagcacaggaagctgaccctggcccagctctaccgaatcaggaccaccctgctgcttaactccacgctcactgcctcgtgagtggcctggactggggtagggcaggtggctcagggcactggcatgggggcccactcatgcctgggagcatcgcatttggggagggtcatggcggagggagcctgaaccctgcccagtgtctgggcgcagggggctgtggtgggcagcagtgaaggggcctgaggagtgccgtggggaagagagggtgaccagagccactctgaatggcgtcagccaaagaaggactctgtcccctccccaccctgtagggaggtctgagcagagggaggcccccaagagtgccattgaccaagagacagcagacagcctgcctcctggggcgtgccggcacctgcttcagctactgcctcctgtatgcatgagccggatgctgggcaggatccctgcctacgcccgggcccgatttgcgctttgccggactggatggagtggaggaggcccaggccacagtaccaccccacctgcccaggcagcccctcgtcacctactccccgaagttaccagctcagctcgagtcttcagggctgggctcctaggctgcccatcctacttctaccctcactggcctccagtgggattcactcctgccctgcccccaccttcccagtcccacaggccacccctggcttgggctgggttctgtgaagttacgtatttattgagcttttggttcttttataaagacttgtctagactcca

SEQ ID NO: 13389 - DNA, 3475 bp, Homo sapiens
gagtcgactgagcccgtcccgcggctcccgtccccctctccccgcgcgccccatgaggctttggcagtctcggcccgagccttagagccttagacaccggggaggagaccctggtcctgttcctaggtatgtcaccacgccgactgccagcagctgcaccgccgggggcccctcaacctctgcgaggcctgtgacagcaagttccacagcaccatgcattatgatgggcatgtccgcttcgaccttcccccacaaggctctgtgctggcccggaacgtgtccacccggtcatgcccgccgcgcaccagccccgcagtggacttggaggaggaggaggaggagagctctgtggatggcaaaggggaccggaagagcacaggcctgaaactctccaagaagaaagcaaggaggagacacacggatgacccaagcaaggaatgcttcactctgaaatttgacctgaatgtggacattgagacagagatcgtcccagccatgaagaagaagtcactgggggaggtgctgctgcctgtatttgaaaggaagggcattgcgctgggcaaagtggacatctacctggaccagtccaacacacccctgtccctcaccttcgaggcctacaggttcgggggacactaccttcgtgtcaaagccccagccaagcctggagatgagggcaaggtggagcagggcatgaaggactccaagtccctgagtttgccgattctgcggccagctgggaccgggccccccgccctggagcgtgtggacgcccagagccgccgggagagcctggacatcttggcccctggccgccgccgcaagaacatgtcggagttcctgggggaggcgagcatccccgggcaggagccccccacgccctccagctgctctctgcccagcggcagcagtggcagcaccaacactggcgacagctggaagaaccgggcggccagtcgcttcagcggctttttcagctccggccccagcaccagcgcctttggccgggaggtagacaagatggagcagctggagggcaagctgcacacctacagcctcttcgggctgcccaggctgccccgggggctgcgcttcgaccatgactcctgggaggaggagtacgatgaagacgaggatgaggacaatgcctgcctgaggctggaggacagctggcgggagctcattgatgggcatgagaagctgacccggcggcagtgccaccagcaggaggcggtgtgggagctgctgcacacggaggcctcctacatcaggaaactgcgggtgatcatcaacctgttcctgtgctgcctcctgaacctgcaagagtcagggctgctgtgtgaggtggaggcggagcgcctgttcagcaacatcccggagatcgcgcagctgcaccgcaggctgtgggctagcgtgatggcgccggtgctggagaaggcgcggcgcacgcgagcgctgctacagcccggggacttcctcaaaggcttcaagatgttcggctcgctcttcaagccctacatccgctactgcatggaggaggagggctgcatggagtacatgcgcggcctgctgcgcgacaacgacctcttccgggcctacatcacgtgggcggagaagcacccacagtgccagaggctgaagctgagcgacatgctggccaaaccccaccagcggctcaccaagtacccgctgctgctcaagtcggtgctgaggaagaccgaggagccgcgcgccaaggaggccgtcgtcgccatgatcggctccgtggagcgcttcatccaccacgtgaacgcgtgcatgcggcagcggcaggagcggcagcggctggcggccgtggtgagccgcatcgacgcctacgaggtggtggaaagcagcagcgacgaagtggacaagctcctgaaggaatttctgcacctggacttgacagcgcccatccctggcgcctccccggaggagacgcggcagctgctgctggaggggagcctgaggatgaaggaggggaaggacagcaagatggatgtgtactgcttcctcttcacggatctgctgttggtgaccaaagcagtgaagaaggcagagaggaccagggtcatcaggccacccctgctcgtggacaagattgtgtgccgggagctacgggaccctgggtccttcctccttatctacctgaatgagtttcacagtgctgtaggggcctacacgttccaggccagtggccaggccttgtgccgtggctgggtggacaccatttacaatgcccagaaccagctgcaacagctgcgtgcacaggagcccccaggcagtcagcagcccctgcagagcctggaagaggaggaggatgagcaggaggaggaagaggaggaggaggaggaggaggaggaaggcgaggacagtggcacttcagctgccagctcccctaccatcatgcggaaaagcagcggcagccccgactctcagcactgtgcctcagatggctccacggagaccctggccatggttgtggtagagcctggggacacgctgtcctcccccgagttcgacagcggtcctttcagctcccagtctgatgagacctctctcagcaccactgcctcatctgccacgcccaccagtgagctgctgcccctgggtccggtggacggccgctcctgctccatggactctgcctacggcaccctctccccaacctccttacaagactttgtggccccaggcccaatggcagagctagtgcctcgggccccagagtccccacgagttccttcccctccaccctcgccccgtctccgccgccgcacccctgtccagctgttgagctgcccgccccacctgctcaagtctaagtccgaggccagcctcctccagctgctggcaggggctggcacccatgggacaccctctgcccccagccgcagcctgtcagagctctgcctggctgttccagccccagcacaggaagctgaccctggcccagctctaccgaatcaggaccaccctgctgcttaactccacgctcactgcctcggaggtctgagcagagggaggcccccaagagtgccattgaccaagagacagcagacagcctgcctcctggggcgtgccggcacctgcttcagctactgcctcctgtatgcatgagccggatgctgggcaggatccctgcctacgcccgggcccgatttgcgctttgccggactggatggagtggaggaggcccaggccacagtaccaccccacctgcccaggcagcccctcgtcacctactccccgaagttaccagctcagctcgagtcttcagggctgggctcctaggctgcccatcctacttctaccctcactggcctccagtgggattcactcctgccctgcccccaccttcccagtcccacaggccacccctggcttgggctgggttctgtgaagttacgtatttattgagcttttggttcttttataaagacttgtctagactcca

SEQ ID NO: 13390 - DNA, 24579 bp, Homo sapiens
agatgaagaccagggagaggaaagggtggacctgaggcccccatggagaagggacgggcaggatgtgagtaatgggagaggcaatcacctattctcctgggcaatgctttgggggtgagcagcggcagaccaggatgccccagggaatggccaggtttgggccatctctggaagtgactggtccccggagagaggtggtggggctatctgcagctgaagaaacgggcagggccagagaaacaatgcaaggggactcctgggttttggctaagtagttttgggggagcaggtgaagacgtggggatccctggcccagccaggagctgccctagtataggcccagccccaagggttgtgtggggcagtctggaggttttggcctgggaaggggtcgggggaaggctgtataaaaagcttgaaagtgcggaacaggttggtggacctgaactccacctcctcgagtgggccccctgtatccacacccttcccagtcctgagcccagagttattctaaactcccgctgctgggagaggggaactgggaaccactaaatggcagaacagcacccttttccggccatatcacctgggccagaaaaaaaaaaaagagggggcccagagaaaagcgggctgtttctggggcaccgcggaggccgcagatcagaatccagctttttacaatagagcggaagcgaacctggctcagggcgattccggggcgggctaggcctgcgggtctctctgcctggtcccccggggcttttctgtcgcgcggaggcttcctgtcgcgggccctggtcccccctagcccccttccgggatgggcgagctcccgtcttcaagcccaagttaatgaccagggactttgaactttttggagatctgcaaagggctggcccctcggggacagtgacgccccccaccccctcccctgagcccggatcctggattaccccaagccaccgcccggcctccagccacctccctggctccggcgcggggcccttcctgggacccctcctctccccggtcccagccgggcggcgccgttggtacatcccggccggtccaggtggtagcgcccgcgcggctaccgtaattcccctacgtcccgcgccccagtttgcgctgagtcgactgagcccgtcccgcggctcccgtccccctctccccgcgcgccccatgaggctttggcagtctcggcccgagccttagagccttagacaccggggaggagaccctggtcctgttcctaggtgagtcgcggggaagtgggagctgcgctccggacggggggtgggactaggcgccaggacccccctaaaccgatggacagaacccggattcgagattcccacgtagtgccaggcctgtgggtgggtacagggtcctcaccagctgtatctccatttacgtgagggtggaatgggttcaagctcccgcccccatcacagtgtctctagggtgggtcggctcggagatagggccgtgaggagtctatgggaccctggccccggtatggggggtattggcggggcagggggatcctggaggggcccgggcgcgcggcgtggctgggaggctcagccgatcctccccatctggccagtcccggagtcggtcccaggcggaaaagccctctcgaggccggcagggggcgccagaggctgcgcctcgggcagtctgagcagacccaggcacccacttaggggtgggggatgcgggagacccgtgaatccggggaggccctggcctgccttggtggaagtctgggaaatggaggccaagaggtcccctgcagattccttagtaactcctcaagttgagggagctcgggggtattttaccattctcctgccctttagccggggtccgggcacacactaggacctggcagccatccccagatactgaattctatgccctcttggcacaggtgggcaaattgaggcccagtaggggaagggtgggggaacgtaggctccagaccaggtcttctgaagcccaggcaggtgccctctttcccccgctccctaccaaggaggcttctaagttgcaccggggaagggcttgctagtccaggtgctccgaagacacacgctggggtctggggctgggaactgcagaggctgggcaggaggggatgttcacagactgcagcccctccctctttctctagcactgggtcccagccttgggcatactagccaggaccgctccctggggaggaaggggccttcctggcttccagggcccgtgcggtgggcttagcctggggagaggttttctgtgtccctgccatctgcccggcacagggcagggccttaggtcaggctctgactccaggtgagcctcagaacccaaggggtgatgggtgaggcctgggcctaggggaaaggagggtgggtaggccgggtggagcgtagagagccgcctggcaaagccaccccgccctggctggcctgcccatgcatgcagtctccacccctggatttctaaggtgttgggtggggccttgggactagcaggctcccaggggagcttagccttggtgggaattcctggcaaggacatccctccagccagagagctcggactcctggttccaggcccgtctgctgtcggcagagcctggagctggccccagacctgcgtcctttcctggacagggaagtccctctcccacccagaccaggctggggccccagctcgttgtggggcagggatgcctgggggatccctggtttcccatctgcttttctggggctgggggaggtgatactgagggagaacagccgggtgcgggggtcctgccttggagactccattattcatcagcctccgcatctggtttctgggtatcagtttcaacaagccggccctgactcacaagcctggagctggggctgggctggggaggggctccctccccagggagttgggggccaggacttcttgggcctgcccctgagctgtttcagctccctgctgtggagaggaggtgggaatgcaggagcctgcccaggcccaccccactgccctggtacaggggctgggggctcctttctgctctgcactcttgcccctaaggaacagtcccccacccttgctgagtacccaggcagcagcctcactcagggatggccagggcccaggcactcaggtgacctctggtgatccgccctgacccagccctggtggtctccacttgatgcaacctggttaccccacaccggtgggctccccacaagctggctttgggatctgccgtgtcttcaggaaggcaatctccagggccctgttgcccaaaccaacattcagctgtcttcaggccccacgcctgccctgtgcctgaggcacccatttccctacgtagcagcagctggtgactttggggcaagtcagttgacacaggccttagtttctctatctgttaaatggggattgtaacagtatctcctcctaagagtctttgagaagagcgaatgggattcactgcctggaactcccacgatggggtggcacatggaatgctcagtgaaatgcagttatctgcctacaggacagtatgggggtggaggtctggggcaagaccacccgatttgaagtaggaactcacctgcccagggccagcaggcccaaggtcatggatactaggaggaggaagagaccttcggtctggcagtggggaaggctctgttgactgtcggccacaggaagggatatcctggccgagccctttcctgtccccatgtccttctgtggcatgaaggcccttctgccttcatctgttcactgatctcatccccaccaagcgcacctactgtgcaccaggactgttctaagtgccgaggacacagtgagatgcagacggccaaggcgctggcttctggagaggacagtctggtagggaagaatgatgataaaaaagtgaacaaagaaatgaattacaggtagtaataaacactaagaaggaaataatttaacttaaaggaattgagagtgggagggtaagggtggtttattttaagatgagggaaaaggacgtcttagaggtaacatttaagttggggcccggtgtcagctgtttcaagatagggtgcgtggaattccagacagaaaatacagaggagaaggccctgagcttggcgagctgtagggagagaaggaagaccggcaggtggaccctgtgcggaccagctgggagggaggcgggagcccggccatggtgggatttcactataagcaagatgggaagttttagttttcaaaactctgcctgttggccgggtgtggtggctcatgcctgtaatctcagcactttgggaggccaaggtgggggtggatcacttgagatcaggagttagtgaccagcctggtcaacatggcgaaaccccatctctactaaaatacaaaaagtagctgggtgtagtggcgggcgcctgtaatcccagctactggggaggctgaggcagaagaatcacttgaacctgggaggtggaggtcgtagtgagctgggatcatgccactgcactccaacgtgagtgacagagcaagattccgtctcaaaaacaaacaaacaaaaaacaaaaacacaactctgcctgtggtgtagacagtgggtgacctgggctttgggagtggagacagccctggaagtctcccagcctctaataaaacgctgctgccctcccaaagccatctcacggaccctggcccccttcccaccctctttccccatggaaccaggtggaggaggagcaattaggggtgggtgggctgatgacagacagcatggccacctcacccccatgggttctgaggagtgtcccaaggaggccatcccagaatcccagagccacagtctgagtttcagtcttgcctgtagacttttgtctctttatgtcactttatcccccacgccgtgaatggggctaatggtgcctgccctgccttcctgggaatcagtgtaaaagcgctttgacagccgtgtagtggtgactccagcaccagagtctgggcgtttgcgtcctctcaggctttgctgagtgccccctggcggtggggacctggcctagaactgcagggacctgggctgctgtgccatgtgggtcgccagggtttcctgatgcctccacctcacccagctcctgggggctgccaaggatagcctctcagagcagcccgccttctgcccacggccctttccagaggccaccggcctttggctctcggcctctgccgtacctgggcagtgagcagtcggtgtgagggggtgtccctggggctcaggctctcgggcaggggtctccaggttgatgggaggggctgagatgagagctggttgtgaggttggggtgggtgtgtgactggggctcaaagctggtgttggagcagagaggggtgtccctggggctagatggagagccggaccaaggaccctgaggggagtgtgccccatcctggcctcccccttctggtgcctgtattctaagagctcccttgctgggagtaagaaggggtcccctgggctgaggctccgaggcgggggtgggggtctccaggaggaagggaggagggaaggtacccttctggctgggagggaccgtgcgtgttggcgctgagggtgaggtggggaccacagcagagtgggcacccccagggctgggcggggatcgagtcacccaggggaggggctccacagtctccaaggtgggggggggtgtcaccagcgccccctgcctccagcattcaaggagctccccaggagaaagagcaagttctgaggagccctctgagcccggcattggtgttgaggagggagtcagagaagagaggggcccggggccgcgcagaggcgcagaggtgggggtaccccgggccaggcagaggtgggaaggtgggggtcccggggactgggcggaggcggggctgtgggggtcccccggccgggcagaggtaggggtgtggagtccccgggtctgggcagaggcggggaggcggggggtcgcccgggcaggcggaggcgggggtgtaggggttcccgggcggggaggcggggatccccggggctgggtggcgagggcccgggcgggagggaggtgtccgccttcctggggggctgggggctgttccgggcccggccctccccggggtccccgcgctcggcgggggcgggcgcggccgcacaatggcaggaagcggggctccgcgctttgtccggcgggcggcgcagaccgcggcttcctccggccgccatggggacaggacccggtgtctccggacgcctagcagcctccaggccgggcccggggctgcccctccgggactcggagccctcctgggccgggggtcgtgcccgcgacggtgatagccaggtacggggccgggacggggcgggaacggggctgggtgcccagttctcgcctgcagccgcccagtcctgtgcgggaggccagggagggggtgcccgtgactatgggccccgcggcccccaggggaaggatgcggcccatggcggccgagccccctacctgggcagctgcaccctggtgacggggacctcggactccggggtgtgtccccgccggctgagatgtccccgccaattcttggcgctttgtgtctggggccagctccggacacacctgtgggtcccgggccctatgctgggccgcccctctcctttccttcctctgccctggccctgcccacagcctcctcctaccccagaggcctctgtttctccttgtgcctctggccccagcccttgtgtgagggtggacgcctggttctctgtccccatcctcacatgcgtgtattccccaaagggcccccctctgttattttggctgcctggcgttagagggggtgggagctggctgttcccatgggtgggctctctcctcccttgggttgagacctgggaacattcccccccggaccctggtgtccctcctgcaggacagaggcaggacatggtgggcaggcaggcaggtgagggaggggcagttgggtctgagagaaggggctggagtctggcttcaagaaggggccattccgccctagtgctgggggagtcctgcctctggagggagctggggagactctggggtttgggggtgggacgtgaggcagaacggggagcagaaactgcaccagggagctctgcccaccccagcttctcagttgggctcatggttctcccggggggcttccagaacttcatcgtcaaccagatctgctcgacgaagtcggaaaccacctggttcagatcctggggctgagcctcactgtgcccccagtgcccctgagcctggggactgctgagaggagggaagcagatgaggtcagccgggcctgggcaccagcccctggcagcagctggaggagtcgagcagcctcagtgatggtagtggccacccagaccatcacagcagggaaactgatctcgaggctttcaagggatccagggtggggtgcgtcatagggctcagtccgtatttgttgaatactgactcttccgtaaggagcgaatcagggtatcaaatctgctgtctgtatattggattgatttaaaaacaagatggtggcacagagtcagacttggactggaagggtcccagagaccctcccagaactcctccgacctagcacggctccttccttgtcaccccctacctgcggtgagaccagggcttgggtcatgggcaggtctgccgccccagctggcactaggaaatctcaggaggcctggaagggattggagctgggagcctctgccatgctggctgggttcacagagggccagagggctgcggagcccgcagacggggggctcccaggaagaggggacaaggtggggcagggcccttccccagatcattctcatgaggagacacctgaagcttgggctcccagaagctgcaaagcctgatgtttctctcagcagtgcgctgtggattcagggtgagggtgtgggtagagccctggctgaggacagcttagtggtctctgtagtttttaaatttttttctgagacggggtctcactgtgtcgcccaggctggagtgcagcaatgtgatcatggctcactgcagcctcaacctcctgggctccagcaatcttcccacctcagcctcccaagtagctgggactacaagagagcgccaccacacccggctaattttgtttgttttttgtagaggcaggatctcactgtgtggcccgggctggagtttttgcactttgttttacgatagattaagacagaaaccagaaagagctgcaggggttgagggatcaatcccatcaccctcacttcaagccccacaagcacagttgaagatcactcctgaagggtgtagaagtgggggcacctggtgctcaaggctgccttcaggaatctgggtcatcctgtccccagccacctgcctggggcccagctccatgcagatcagcccctccctgagcacgtgggcctgcttggagtgccacctgccgactgccagtcctgtgccctgttccctttcctgtcagatggagacacggagggacacaagaaccaacagggcttgcatcaaactgagatagatttcctcctgtccccgtaatcccggctgacctgaggccagcctctcgctcctaagacacccatgagagggcgtgaatgtgggttaaaatctgggatccagtctgggtgccgtggctcacgcctgtaatcccagcacttggtgaggccgatgtgggtggatcacctgagggcaggtgttcaagaccagcctgaccaacaaggtgaaaccccgtctctactcaaaatccaaaaattacctgggtgtggtggcgtgtgcttgtagtcccagttacttgggaggctgaaacaggagaattgtctgaacccaggaggcggaggttgcagtgagccaagatcatgccactgctctccagcctgggcaacagagcgagactctatcgcaaaaaacataaataaatacataaataaataaataataatctgggatccagagccccacacacagtggcttcaagtcctagatccactggctgtgtgaccttagacaagtcatttcacctctctgagttttactttcctcttgtgtgaaacagggacaataacagcccttatcttatgggatgagatacacatgtaatgcccccagtgtggctccagacacatgacgaccacattaaaaacacactcagattcttcccggcctcctcctccctcctgtcactttctctgctatcctcaccacgcctatctcggaaatctctcatcgggctttcaccagccagaaactcttcagcgcctctctcctgccttaattcataaatgaaacaaggatttatggagcagctgggaccggaggtcaggcgctgaatcagacagagtaacatttctgtccttgcgaatgtgaccaggtgtggaggcagcagggtggaatatgtgacctgtcaggtgctggaaagtgctgaggacaggaaaggagcgtggagggcgaatgaggaggatgagaaggtgacttggggggaagctagcaggaggggagggaaggcagggagccatgcatttcaatatctggggaaaagcatctcagtccagggactggcagatgtcacagctcagaggtgggagctgccctgagggagtgtgtcccggaacgaccaggaggccagtgggtgaggggagtgagccaggatggaagagcaggacaggaggtccctgaatggggtggccttaaccctaaaaaaaaaaaaagtcaatgtcataaaagactgaaaaccctaaccttaacccttttggcttttttttttttttaagataatgtcttccctgtagcccaggctggagtgcagtggcgcaatctcagctcactgcaacctctgcctcctgagttcaaacaattctcctgcctcagcctcctgagtagctgggactacaggcgtgtgccaccatgcccggctaagtttttgtgtttttagtagagacggggtttcaccatgttagccaggatggtcttgatctcctgaccttgtgatccgcctgcctcagcctcccaaagtgctggggattacaggcatgagccaccgcgcctggcctttttatttacttatatatttatttatttatttatttatttatttatttatttattttgagacggagttttgccccaggctggagtgcgatggcacaatctcggctcactgcaacctctgcctcccgtattcaagcgattctcctgcttcagcctcccgcgtagctgggattacaggcatgcgccaccatgcccagctaattttgtatttttagtagagacagggtttcttccatgttggtcaggctggtctcgaactcccaacctcaggtgacccgcccgcctcggcctcccaaagtgctgggattacaggcatagccactgctcctggccccttttggcttttattcagagtgagatgggaacccttggagggttttgagtagatacagtgggactcctctttgaacagggcccactctagctgcacatggacaacatattgtgggggatgggggtagcagtgaggccagttttgaggccattgttgtcatctagctaaaaggtggctgggcagtggcacgcttatgagctgtggctgggttgaggccacagatactaaaggtggagccagcgggattttcgggctgaccagatgggggcataacagagaatgtcaagagtgaccccaagctgatatggtggctcacacctgtaatcccagcactaattccagcactttgggaggctgaggcgggcggatcagttgagcccaggagttcgagaccaggctgtgcaacatggcgaaatcctatctctactaaaaattagctgggtatggtggtacatgcctgtagtcccagctacttgggacggtgaggcaggagaatcacttgaacccaggaggtagaggttgcagtgagccgagattgcggcactgcactccagattgggtgacagagtgagaccctgtctcaaaaaaaaaaaggaaatcccccaccttgcagccatcagaagaatcaaataattgatttaggttaaaatcatctatgtatgctaaagctcttaggaccgcaagctcacatcaccatgcctggctaatttttttttttttggagacaaagtctcgctctgtcactcaggctggagtgcagtggtgtgatctcggctcactgcaacctctgcccccggttcaagcaattctcctgcctcagcctcctgagtagctgggactacaggcgtacgctgccacgactggctaatttttttgtattttagtagagacggggtttcaccgtgttgcccaggctgctatcgaactcctgagctcaggcaatccacccgcctcggcctcccaaagtgctaggattacaggcatgagccaccgtgcctggcaattttttatatttttagtagagatggggttttgtcatgttggccaggctggtcttgaactcctgacctcaactgattgagtgagattactggggaacaagacatctcaaagtgccatgccacagattacttattaattataggggaaaaagggactctacaaggtacagaggtccccagaggatccagcattacaggcaaatagcaagaacacacagctctgtggtgtccccgcctgaacgctcagtttgaaactttctgaggaccaccagggagatccacattgaggagctctgtgcgaggctgctggctcgaagacttccaaaatgtcaaggtcagccaggcacagtggctcatgcctataatcccagctctttgggaggtcaaggcgggcagattgcttgagcccaggagttcaagactagcctgggcaacatagtgagatctgtcactactaaaaataaaaaagttagttgggcgtagtggcatgcacctagtattcccagctactaaggaggctaaggcaggaggattacttgagtccgggaggttgaggttgcagtgagctgatcatgccatactactccagcctgggctacagagcgagaccctgtcttgaagaaaaaaaaaaagtcaatgtaataaaagaccacaaaaaacaaggctgggcacggtggctcacgcgtgtaatcccagcactttgggaggccgaggtgggcggatcacgaggtcaggagatcgagaccatcctggctaacacggtgaaaccccatctctaccaaaaatacaaaaaattagccgggcgtggtggcgggcgcctgtagtcccagctactcaggaggctgaggcaggagaatggtgtgaaccgaggaggcggagcttgcagtgagtcgagatcgcgccactgcactccagcctgggcgacagagcgagactccgtctcaaaaaaaaaaaaaaaaaaaaaaggataaacagacataaccaaatgccacgtgtgaaacttgattagttcctatatgaggaagtatatctgtaagaacgttatttagacacttgggaaaatgtcaatatagactatatatcaaggttcagtttcccaagtgcgacaattctatggggttttgtaggaaaactgtctttgttcttaggcagcagcatgatttctgccccaggggaggggggtgccgagaagagaatgggagagaagcagatgtggtagatatcaacttggggagtccagagggcatgtggatgtcatgtgctattcttataatttttggtaggtttgaaatattttaaaacaagtctgggcgcggtggctcacgcctgtaatcccagcactttgggaggccgaggcaggcggatcacctgagaccaggagttcaataccaacctggccaacatggtgaaactccgtctctactaaaaatacaaaaattagtcgggcgtggtggattgtgcctgtaatctcagctacttgggaggctgaggcaggagaatcacttgaacccgggaggcggaggatgcagtgagctgagatcgtgccattgcactccagcctgggcaacagagcgagaccccttctcagaaaaatttaaaaaaataaaaagaaaagaaatattttaaaacaaaacttgggaaaaataaagagagtgggaggagagaactaggaagtcgtgaatactgatacctgtttacagagtttagctgtgaagggaaagaaagaaagtcagccgtagctggagggtgaggtgaggcctctgtaaaatggagaaataaggctgggcgtggcagctcatgcctgtaatgccagcattttgggagaccaaggtgggcggatcacttgaggccaggagtttgagaccagcctgggcaacatggtgaaaccccgtctctacaaaaaatacaaacactcgcctatggtggtgtgtgcttctagtccaagctactcgggaggctgaggctcgaggatcacgtgagtctgggaggtcaaggctgcagtgagccatgattgtgccactgcactccctgtctcaaagaaagaaagaaaaaaaaagatggagaagccgggcgcggtggctcacgcctgtaatcccagcactttgggaggcccaggcgggctgttcacgaggtcaggaattcgagaccagtctggccaacacagtgaaaccctgtctctactaaaaatacaaaaaaaaaattagctgggcatggtggtgtgcgcctgtaatcccagctactggggaggctgaggcaggagaattgcgtgaaaccaggaggcggaggttgcagtgagccgagatcaagccattgcactccagtctgggtgacagaatgagactctgtctcagaaaaagaaaaaaaagaaaaagatggagaaataaccacgtgttggtgtggcagtgggggaaatgatccagcagaggggaaacttgatgatgtgggagaggggggactgctggggggcgtctcctcaccctggatcgagagatggagggcagttcattctaagtccctgcagcgctgggccggggtcgagggatgtggtggatctcgtggacctcctgaaggcttctgtccccaccccaggtatgtcaccacgccgactgccagcagctgcaccgccgggggcccctcaacctctgcgaggcctgtgacagcaagttccacagcaccatgcattatgatgggcatgtccgcttcgaccttcccccacaaggtgagcacaggcgggagccgcagctcggcccccagagctcctgtgtcagtgtttcagtaactgtcggaaacgtgctagggcgtcataaggacaagtcgactgtaaataatgaaacccgagtatgttacggttccttttgttccaaatgttttttagcaagagagaaagtccatgagcgtgccccttccagaggcaggcctttctctatctggtgctgtgctctcactggttctcacctcccccagctgcttttgcccctggcctgtggcccacacagagaaggcccctttctttctagttctgcctatcctcagggcaggggacttctggacaagtcctgcaagccaggctgtgggcctagcagaggcagtgtggagtgggggtggccaggtcaggaggcacttggagcaggaaataagaaattcctcttgctgagcagggacccagctcaggcccaccatcaactgcctatggaggagtggctcgcaggcacccaggcctggtgagaaatgccaacccccgagtcctttcccagctgatcagaggaacaaaaggattcttctggttgggcacggtggctcatgtctggaatacaaaaaatacaaaaattagccaggtgtggtggcacacacttgtggtcccagctgctcggaggctgaggtggaaggatcgcttgaaccccgacaatggaggctccagtgagccctgatcgtgccactgcactccagcctgagcgacagagcaagaccctgtcttaaaaaacaataaacaaacaaaagactctctcccactgccagggccccttgggaattcaggtgtggtcacagcatgggggaggggaggcctggaagaaagagccatggactttggtcccttcctgtaataacctcagaggcaaggcttccttatccttattttatagaagggtaaactgaggccacaggtgagtttgtttttggggtggagcttcaccatgggtgtcatcccagggcctttgtgtccttttgggtctgtggggatagacagcaatgactaaggccaggcaaggtggctcacacctgtaatcccagccctttgggaggctgaggtgggtggatcacttcaggtcaggagtttgagaacagcctggccaacatgttgaaaccctgtcattactaaaaatacaaaaaaatgagccgggtgtggtggcacacgcctgcaatcccagctactcaagaggctgaagcatgagaattgcttgaacccaggaggtggaggttgcagtgagccgagatcatgccactgcactccagcctgggtgacagagtgagaccctatctcaaaacaaaaacaaaaaacaatgactgagcccctctcctcacagaactgaagggcccttgctacctttaatctgggggttccagggtaacaggctgtggtccctctggaggcagccatgctgcaggctaaggaggggcgggggaggcacaaccctctcctgctttctcccaaggctctgtgctggcccggaacgtgtccacccggtcatgcccgccgcgcaccagccccgcagtggacttggaggaggaggaggaggagagctctgtggatggcaaagggtaggtgagggatgagtgggcagagagatacctggagggccccacggctgggtctcagatcagacattcaggaccagatgctctggcgccttcctcaagtaaggctgatgggcagacctcttcccacgcctgtggctgtcctgactccgggaagaggccacccagcctgggccagcctccagggtgcttgggatcctagcccacaccagaccaggtaccgttcgatgtgactcccgtgttggccaccagagggcgcacagccctatgcgggcctggccgggttgaatccacgcgggttacctgtcacctggggtgagccaagggcggggaggccacaggcccactcgccgcccacgctggcgagggccacccacacctccagcctctgccctcctcgcttccctgcagggaccggaagagcacaggcctgaaactctccaagaagaaagcaaggaggagacacacggatgtgaggagccccccagagccggcagatgcgggttccctacagcctgcgcccttccccgagcctgggccttcctccgggatgggggtggggaggtctgcatcccagggtgcagaggtctgggagatcgctggggttccctttcttgctggggttcccatccgagaccggagggtggggagggtggggaggagggttgggaaggagggtgggaaggagggtggggaggagggttgggaaggagggtgggaaggagggtggggaggagggcgggaatgagggcggtgaggagaagctcacagcccccacccccaccatcctcccaggacccaagcaaggaatgcttcactctgaaatttgacctgaatgtggacattgagacagagatcgtcccagccatgaagaagaagtcactggggtagggcttgatggggctcagggtggaagtgggactgggagtaggggtggccccatgttgcaggctccgggtctctgcaggtgtgacgtgtgtgtctgtgtggtggcccgtgagcgagcgcatccctgcgtgggcagacccgtgctggtgtgcacgccagtgtgagggagtgcggtggggtctgtgtacttgtgcattttaatcatgtatgcaggagccaggcctgcgtgtgggcaggcgtgtgacaggtctgccgtggtatgcagatgcgcctgtgtgagcacctctgcgggcaggtgtctgtggacctgcgtgtgatcccatgcgggcttcccttttccgttgggaaggtgggggcagctggggctgtgggtggggcgggggctcgtgggggcggggcccaagctgaagcgactggccgcctggttctaacacacatgcctcctgtcctgggggcagggaggtgctgctgcctgtatttgaaaggaagggcattgcgctgggcaaagtggacatctacctggaccagtccaacacacccctgtccctcaccttcgaggcctacaggttcgggggacactaccttcgtgtcaaaggtgagaagcagcctgggccaaatggggccgctgggactggcggagcctcctggagatgggcgcccttcccaggctcaggttcccattggtcgtgggcctgagcagcctcattaccatacaggtgtctctgctggatgctgctgggggaggggagggtgctggcagggcggggctgtcgggggagggcaggcaggccttggtgtggatcctccggggagagaggaccggggaccccctcctccaccagaccagggtactgaggatctctcgtggcccccacatgcagccccagccaagcctggagatgagggcaaggtggagcagggcatgaaggactccaagtccctgagtttgccgattctgcggccagctgggaccgggccccccgccctggagcgtgtggacgcccagagccgccgggagagcctggacatcttggtgaggaggagggggtgtgtcaggggagggggtgggaaggggcccaggctgggcccacagcccctcctcagaggcagtcaccctgggtctctcactgccccatcttggggttttaattgtcccttctggaaaatggggttggctgggagagtaggggaccctctctctctggatctagccatagcccaaggtgagggcttgtatctgagactcttctagtgccaggggtcagggaacctgtgtgtgcatgtgtgtgtgagagcacttgtacctggggctacagaccacccagagctgtgttccagagtgcatctgagtgtgtaactctgtgcttcatgcttgaagctgggggactgggggatgatagtctgggcgtatctgtgtctggaccttccagtctccagatatgtctgggtcccaggagaggggacaccccagggtagagatgcagagaccctcctccatcccaggctggcctgaggccctggaaacccgccctggggtggggccatgggggctggcagggggtcccggccctgaccacccttccctgaccaggcccctggccgccgccgcaagaacatgtcggagttcctgggggaggcgagcatccccgggcaggagccccccacgccctccagctgctctctgcccagcggcagcagtggcagcaccaacactggcgacagctggaagaaccgggcggccagtcgcttcagcggctttttcagctccggccccagcaccagcgcctttggccgggtatgtggccccatctgcccagggtcaggcagctggctggccatgacccctgaccctgaccagggtatctttccaggaggtagacaagatggagcagctggagggcaagctgcacacctacagcctcttcgggctgcccaggctgccccgggggctgcgcttcgaccatgactcctgggaggaggagtacgatgaagacgaggatgaggacaatgcctgcctgaggctggaggacagctggcgggagctcattgatgggcatgaggtgagtgcgggccacagtgctgctccctccttgtcccgaaaggaggacagccctcgggaggacccagtgatcagatgttccatgggacgccccaaagaggccactgttaccattagcccactttggagacactgaggctagatgaaaatggtgtgctgcttggctgttttaatggcagaggagggcccagatcttgggtgtcttaactgtgattactcatgtggtgtcaagggtgaccctgctcctcttgggacctccatgtccccattgggaaaatgagagttgcatgcaggttgcttatcctccccggccaccctaaggtgctccaggcctcgtgaatgacccatcctgccctccctctagaagctgacccggcggcagtgccaccagcaggaggcggtgtgggagctgctgcacacggaggcctcctacatcaggaaactgcgggtgatcatcaacgtgagtaggggctgcgctggtccccgtggccaccctgcccccctctttctgacagccctcagctgagtctgagcctttgcagaaggagcaggtgcctggcaatgaggtgggggcaggaaagtcagacaagggctgcgcccagggaggaggtgcctcctagaggaacctgggagggggcttcgggcaggtttgtcaggttcagctgaattagcacaggtgaggcctcattctttcactttcgttcagtggctgtttcccaacacttgctgtgtgctgggtgcccagcaggccacgccctggacgggacagagtgagctggcagtgtagggatttcggctcagggaggggagcacctaccctgggcttggagcttcctggagggaggaagcaccctcagaggtgaaatctggaggctaagccagggcagaggtggagaagggaattccaggcatggcttcaaagccagtctcccccgagcttccctccaggagggaccagggcagtgtgacctcgggagggctatgaggactgggtctttcctcagggtctggactacccaggtgcgaaggccaaagggtacagccttcttatccgtggctgctgtggggcctcctggaacggggaaggggaaggagtggcaggggagcctgaggctgggtggggccctagggctgagacagcctcccgaccccagtcacaccatcccctgatcccacagctgttcctgtgctgcctcctgaacctgcaagagtcagggctgctgtgtgaggtgcgctgggattcgggggcggcggcgggtgaggtaccaggaaggagggcgggacctggacctggggcggggctaacctggcggaggggcgtggccaaccgcacctcccgccgcgcccaggtggaggcggagcgcctgttcagcaacatcccggagatcgcgcagctgcaccgcaggctgtgggctagcgtgatggcgccggtgctggagaaggcgcggcgcacgcgagcgctgctacagcccggggacttcctcaaaggcttcaagatggtacgggcggggccgggcgcaggcgggggcactgaggcagggctggggcgccgaaaagcctccacggcccgatccggtctgcccagcatccccaacctcccccaggcccgtaaccgcacttgaccccttgtggccaagggtgaggaattacgaggcggtcgcccgggtttgagcctccacctgaccatctacccctgatccctggccacgggtggtcactttggctgaggctcagtttcctcatcaggaaacagggatcataagcttgctgcccccttggggtggtcgcccaagtgcagtaaggaagcgcttgcgcagcgcctggcgcgggccggcccgcagggagcgcgcggtaaccggcgccgtggttgttctgccccgggccagttcggctcgctcttcaagccctacatccgctactgcatggaggaggagggctgcatggagtacatgcgcggcctgctgcgcgacaacgacctcttccgggcctacatcacggtgagggcgcgcgtgccgtgggcgggggcgcaggaggacgggaccctggacggggccgggtggggcggggcctgccctgagcccgcccccactcccccaccgcagtgggcggagaagcacccacagtgccagaggctgaagctgagcgacatgctggccaaaccccaccagcggctcaccaagtacccgctgctgctcaagtcggtgctgaggaagaccgaggagccgcgcgccaaggaggccgtcgtcgccatggtaaccctgatggccagcgggagccgtcccccctgcgcggctctctgctccgtcatgaccctggacctgaagctccctcacctgcccctagatcggctccgtggagcgcttcatccaccacgtgaacgcgtgcatgcggcagcggcaggagcggcagcggctggcggccgtggtgagccgcatcgacgcctacgaggtggtggaaagcagcagcgacgaagtggacaaggtgggcgtgtgtgtctgcgggggttgccggctgggagagaggaaggcccagctggcaggcaggggctgtgctgggcatctcactgaggatgcctagctgagatgggagtcagtctctggcctcccctacgttcacgccatccgtccccagctcctgaaggaatttctgcacctggacttgacagcgcccatccctggcgcctccccggaggagacgcggcagctgctgctggaggggagcctgaggatgaaggaggggaaggacagcaaggtgattccagggccaccccacccctgtgccctgcccttcctagggacctcctgggccccagtcactggttctcagctctgcagtcccttcggtggttactcaagaaccagtgaccttgtcatagtgaatgacagttctctgcctgccattcacaaatccagcagtagggtcctagcccttgaaggcaccagttgtgcccatttgttggtgccacatgggttcctggtgggagggcagccatattccacaagtgggccaggaaccccagagccttgctactgtgccatggccccttcaggcatggggcaggctgagagcttgcacacggtgacttcaaagtcaccagtcttctttttaatgtaaacttgtattgagataagtcatcaacgtacatctcagtgaaagagaatcatcttcctcttcattttaattttacttgaaggttcatggtgggaggagtgtttgacaaaaaccgagtgctcccaggggaggctggtgccacagtccctggccctgaccctgctggcctctctggccaccccccctcctgccactgcagatggatgtgtactgcttcctcttcacggatctgctgttggtgaccaaagcagtgaagaaggcagagaggaccagggtcatcaggccacccctgctcgtggacaagattgtgtgccgggagctacgggaccctggtaaggagccctggtcccctgttcctggtcaggggctgtgatgggtgggggccatcgtctctgctgacactgacttgggccttccctaaccagggtccttcctccttatctacctgaatgagtttcacagtgctgtaggggcctacacgttccaggccagtggccaggccttgtgccgtggctgggtggacaccatttacaatgcccaggtgagtgcagagtagtgagtgggtgggcaaggcagattagggagatgctggtcacaacccattctgtcccatgtaccccaaccttgcctgcagaaccagctgcaacagctgcgtgcacaggagcccccaggcagtcagcagcccctgcagagcctggaagaggaggaggatgagcaggaggaggaagaggaggaggaggaggaggaggaggaaggcgaggacagtggcacttcagctgccagctcccctaccatcatgcggaaaagcagcggcagccccgactctcagcactggtacgtctgctcatgaccacccagcaggtcaaaccaggacaagtactctagcccaggactcctgaaggcccagccacgctcccttcctcccaatggcctcttgtcatgaacactgtgggagcggggctctgtctcccccagagtccgggtggggagggcagacacctttccatgtgctgccagccctgatccattcgtggtagctgcctggggtgctgtgctgaggatccttagggcagatccagccttggcagggaagagtgctgggctcgctactgaggtctgttgtgggcactggagctggaagatctgccacacctgccacatgctgccatctctgagcctccagccccaggagggcagagggtataaaccaccgtgcattgcccagcctggggctgcctcaggccatctaggtttcatggcctgggctgactctgctcctggccccacagtgcctcagatggctccacggagaccctggccatggttgtggtagagcctggggacacgctgtcctcccccgagttcgacagcggtcctttcagctcccagtctgatgagacctctctcagcaccactgcctcatctgccacgcccaccagtgagctgctgcccctgggtccggtggacggccgctcctgctccatggactctgcctacggcaccctctccccaacctccttacaagactttgtggccccaggcccaatggcagagctagtgcctcgggccccagagtccccacgagttccttcccctccaccctcgccccgtctccgccgccgcacccctgtccagctgttgagctgcccgccccacctgctcaagtctaagtccgaggccagcctcctccagctgctggcaggggctggcacccatgggacaccctctgcccccagccgcagcctgtcagagctctgcctggctgttccagccccaggtattaggactcagggctcccctcaggaagctgggcccagctgggattgccgaggggcccctagccctggcagcggtcctgggctagtcggctgcctggccggggaacctgcaggctcccacaggaagaggtgtggagacctgccctcgggggcctctcccagggtccagcctgagcccccaccaggggtctctgcccagcacaggaagctgaccctggcccagctctaccgaatcaggaccaccctgctgcttaactccacgctcactgcctcgtgagtggcctggactggggtagggcaggtggctcagggcactggcatgggggcccactcatgcctgggagcatcgcatttggggagggtcatggcggagggagcctgaaccctgcccagtgtctgggcgcagggggctgtggtgggcagcagtgaaggggcctgaggagtgccgtggggaagagagggtgaccagagccactctgaatggcgtcagccaaagaaggactctgtcccctccccaccctgtagggaggtctgagcagagggaggcccccaagagtgccattgaccaagagacagcagacagcctgcctcctggggcgtgccggcacctgcttcagctactgcctcctgtatgcatgagccggatgctgggcaggatccctgcctacgcccgggcccgatttgcgctttgccggactggatggagtggaggaggcccaggccacagtaccaccccacctgcccaggcagcccctcgtcacctactccccgaagttaccagctcagctcgagtcttcagggctgggctcctaggctgcccatcctacttctaccctcactggcctccagtgggattcactcctgccctgcccccaccttcccagtcccacaggccacccctggcttgggctgggttctgtgaagttacgtatttattgagcttttggttcttttataaagacttgtctagactcca

SEQ ID NO: 13391 - DNA, 3613 bp, Homo sapiens
agatgaagaccagggagaggaaagggtggacctgaggcccccatggagaagggacgggcaggatgtatgtcaccacgccgactgccagcagctgcaccgccgggggcccctcaacctctgcgaggcctgtgacagcaagttccacagcaccatgcattatgatgggcatgtccgcttcgaccttcccccacaaggctctgtgctggcccggaacgtgtccacccggtcatgcccgccgcgcaccagccccgcagtggacttggaggaggaggaggaggagagctctgtggatggcaaaggggaccggaagagcacaggcctgaaactctccaagaagaaagcaaggaggagacacacggatgacccaagcaaggaatgcttcactctgaaatttgacctgaatgtggacattgagacagagatcgtcccagccatgaagaagaagtcactgggggaggtgctgctgcctgtatttgaaaggaagggcattgcgctgggcaaagtggacatctacctggaccagtccaacacacccctgtccctcaccttcgaggcctacaggttcgggggacactaccttcgtgtcaaagccccagccaagcctggagatgagggcaaggtggagcagggcatgaaggactccaagtccctgagtttgccgattctgcggccagctgggaccgggccccccgccctggagcgtgtggacgcccagagccgccgggagagcctggacatcttggcccctggccgccgccgcaagaacatgtcggagttcctgggggaggcgagcatccccgggcaggagccccccacgccctccagctgctctctgcccagcggcagcagtggcagcaccaacactggcgacagctggaagaaccgggcggccagtcgcttcagcggctttttcagctccggccccagcaccagcgcctttggccgggaggtagacaagatggagcagctggagggcaagctgcacacctacagcctcttcgggctgcccaggctgccccgggggctgcgcttcgaccatgactcctgggaggaggagtacgatgaagacgaggatgaggacaatgcctgcctgaggctggaggacagctggcgggagctcattgatgggcatgagaagctgacccggcggcagtgccaccagcaggaggcggtgtgggagctgctgcacacggaggcctcctacatcaggaaactgcgggtgatcatcaacctgttcctgtgctgcctcctgaacctgcaagagtcagggctgctgtgtgaggtggaggcggagcgcctgttcagcaacatcccggagatcgcgcagctgcaccgcaggctgtgggctagcgtgatggcgccggtgctggagaaggcgcggcgcacgcgagcgctgctacagcccggggacttcctcaaaggcttcaagatgttcggctcgctcttcaagccctacatccgctactgcatggaggaggagggctgcatggagtacatgcgcggcctgctgcgcgacaacgacctcttccgggcctacatcacgtgggcggagaagcacccacagtgccagaggctgaagctgagcgacatgctggccaaaccccaccagcggctcaccaagtacccgctgctgctcaagtcggtgctgaggaagaccgaggagccgcgcgccaaggaggccgtcgtcgccatgatcggctccgtggagcgcttcatccaccacgtgaacgcgtgcatgcggcagcggcaggagcggcagcggctggcggccgtggtgagccgcatcgacgcctacgaggtggtggaaagcagcagcgacgaagtggacaagctcctgaaggaatttctgcacctggacttgacagcgcccatccctggcgcctccccggaggagacgcggcagctgctgctggaggggagcctgaggatgaaggaggggaaggacagcaagatggatgtgtactgcttcctcttcacggatctgctgttggtgaccaaagcagtgaagaaggcagagaggaccagggtcatcaggccacccctgctcgtggacaagattgtgtgccgggagctacgggaccctgggtccttcctccttatctacctgaatgagtttcacagtgctgtaggggcctacacgttccaggccagtggccaggccttgtgccgtggctgggtggacaccatttacaatgcccagaaccagctgcaacagctgcgtgcacaggagcccccaggcagtcagcagcccctgcagagcctggaagaggaggaggatgagcaggaggaggaagaggaggaggaggaggaggaggaggaaggcgaggacagtggcacttcagctgccagctcccctaccatcatgcggaaaagcagcggcagccccgactctcagcactgtgcctcagatggctccacggagaccctggccatggttgtggtagagcctggggacacgctgtcctcccccgagttcgacagcggtcctttcagctcccagtctgatgagacctctctcagcaccactgcctcatctgccacgcccaccagtgagctgctgcccctgggtccggtggacggccgctcctgctccatggactctgcctacggcaccctctccccaacctccttacaagactttgtggccccaggcccaatggcagagctagtgcctcgggccccagagtccccacgagttccttcccctccaccctcgccccgtctccgccgccgcacccctgtccagctgttgagctgcccgccccacctgctcaagtctaagtccgaggccagcctcctccagctgctggcaggggctggcacccatgggacaccctctgcccccagccgcagcctgtcagagctctgcctggctgttccagccccaggtattaggactcagggctcccctcaggaagctgggcccagctgggattgccgaggggcccctagccctggcagcggtcctgggctagtcggctgcctggccggggaacctgcaggctcccacaggaagaggtgtggagacctgccctcgggggcctctcccagggtccagcctgagcccccaccaggggtctctgcccagcacaggaagctgaccctggcccagctctaccgaatcaggaccaccctgctgcttaactccacgctcactgcctcggaggtctgagcagagggaggcccccaagagtgccattgaccaagagacagcagacagcctgcctcctggggcgtgccggcacctgcttcagctactgcctcctgtatgcatgagccggatgctgggcaggatccctgcctacgcccgggcccgatttgcgctttgccggactggatggagtggaggaggcccaggccacagtaccaccccacctgcccaggcagcccctcgtcacctactccccgaagttaccagctcagctcgagtcttcagggctgggctcctaggctgcccatcctacttctaccctcactggcctccagtgggattcactcctgccctgcccccaccttcccagtcccacaggccacccctggcttgggctgggttctgtgaagttacgtatttattgagcttttggttcttttataaagacttgtctagactcca

SEQ ID NO: 13392 - DNA, 29575 bp, Homo sapiens
ggacgctgacctcttttgaagggaggactgaggagatcaccccacccctcctccggttgggaggccagtggggcccaggggagcctgggtgccccgctgactgatgccctctgctcctcccctgcagacgaccagagccccgctgaaaagaagggactgcgctgtcagaaccccgcctgcatggacaaggggcgggcggccaaggtagggaggctggagagcctggggaccctcgggggcagaggggccagggctctaactgccctttctatcccagcaccagctatccacagagccctggcacgggcgcggctggctgggctgggttcaagtgtaggtggggccacagtgtgtctggtttaggaggcagagggcctgcccccagctcaggaacagtggagtcgggggacttctacaagaacaggggggtggagtaccccaaagccctttgctgcactgtggtcctagcagccattctgaggtgacaggagctgtagccttatgtcacggatgaggaaactgaggcttagccaggggaagtggtctcccacggtgctggtccagtgcccagatggcacccttcctgttgaactcagccactcttcaggcctgggcatgggtctgagatgctttgggacttggcgagtgtgaccatggccctggggatgacaaaaggaggaaggggccagttgatcctggagtgccagggcttgggagctgggagtggggcgaagtataaatcagggataaagggggcaggaaggaggataatagtactggctgggcgcttctgcctgtgatgtgctgggcttagtgccacccgctttctgtgccatatgcactgattgcggcagctctgcagggaaggcatcgtcaccccgttttccagatgaagacaccaaggttcagagaggtccagtgacttggccaaggcccacagctcatgagagatggagccggggtttggagccaggttttgcccctcccagcatgcatttacatgacaatagtgacaactgcgcaacttagcatctggcgcaggcaccaggactcactgactcctcctccggccttctgagatggtcctgtccttattctcatttacagatggggaaactgaggctcactcagggacagactgctaggaagtgggagagctgggatttgaacccagtacccaggtctgtgtcataccagggcccgtgttgtcttccatcatgtgtctcagcactgccagctgcaggaaatgtaaaatgccaccccccaccccccgctcccctcccgcacctccacccagacacacacacactcgttctgcacaggagggccgtggtgagggaacagggagaactgctatggggcggggcggggagggggcggcctccagttgccgtggtcaccaggcaggggggcggtgtgatgtcagatacaatctgctggcacggatggtgcctggcattgggctctggtgttggctggttgcctctttcccagatgggggctcctggcaacaaattggcctcagctccccccaatatacatcctgccagaggcctgcggagccccgaggcttttgcctgacctgaaggggcggctggggcaataaggcacactgtcccagcccctcctctgggcagctgctctcagggggggtcctcaagctgctcaggcaggggcaggggtgggatggcccagccttcatagaggtgaggcctgggagaagagagctggtctcagagtgggtatggtccctctgcagcctccagacctcacctccagccctggcctgcctggaacttggcacagctgacattggcatcagctgatgagggtcacccagcgtgcacggggagagtctgggccctgtcactactgggacgccctttgggacaaatggcacagactcactgtaggggcagaaatgcctgaattatcagaggcatagagagccagtcagggagggcatcctggaggagggggcctttaatggatgtgaaaacatggatagacagaacagaggcaagggcagtccaggaagggagaggcagtggtggagaggaggtgcggggcactcagatttggtaagagaaacaaagaataacattgtcgatgatgataataataaccactactggctgggtgtggttgctcatacctgcgatcccagcactgtgagaggctgaggcaggaggactgctttagcccaggagtttgaggccaacctgggcaatatagggagacctctctctactaaaattaaaaaaaaggcctggcgtggtggctcacacctgtaaccccagcactttgggaggccaaggcgggcagattgcctgagctcaggagttcgagaccagcctggccaacatggcgaaaccccatctctactataaatataaaaattagctgggcatggtggtgggtgcctgtaattccagctactcgggaggctgaggcaggagaattgcctgaacctgggaggcagaggttgcagtgaactgagatcatgccattgcactccagcctgggcaacaagagcaagactccgtctaaaaaaaaaaaaaaaaaaaaaaaaaaaaaattagccaggtgtggtggtgggtacctgtaattccagctactggggagggtgaggtgggaggatcatttgagcctgggacattgaggctgcagtgagccgtgattgtgccactgcactgcagcctgggcaacagagcaagaccctgtctcaaaaataacaggccaggcgcaggggctcatgcctgtaatcccagcactttgggaggccaaggtgggcagatcacttgaggtcaggagttcgagactagtctgggcaacatggtgaaaccccatctctaccaaaaatataaaaaataattagccggacatggtggcacacacctgtaatcccagctacttaggaggctgaggcagaagaatcgcttggaccctggagaaggaggttgcagtgagctgagatcacgcaattgcactccagcctgggcaacagagcgagactctgtctcaaaaaacacccaataataataataataacaattattgctgaccgaacatgtttacatgccaggcggggcgttaggccctcctgcttgtctcagtgaagcttcttgagaccctcaggagaacagcgttattcttatgaccacatgacttgtaaggaaacggaggcccagagaggtagaggaacttgcccacatcacacagcatgatcgtcagagcctggcctgcgtgaggcttgtctgatcaagagccctattcttactctccaggatgtgactagcgttttgaaggagatgacttcatttattcatttaccagaccagctctgagcatctgtcggtgccaggcccagttctaggcccaggagatctccagagaacaaaggggatgccctcctggaggtgacattctagctgtgctgggaggaaggaagggaagtgaccctggctggccaaacttccccccaggctgccctggcaaaggaccaatttcaggcagggctggacccttcggcttctgggcccacccttgatgttttatttgaggctctcctgggtgctggagcttctgagatgaatttgccatctgtcccctacctcctgcccctggagttcccactgggaggagggctaaccaggatgggcttcctggaggcaactggagtcctgaggattaaagaggtactgagatggaggacagctgagtgagcagggggggacattgggggctataaggggcaagcgaggccagggggcacagggagaaggggacgggaggagggggaggcaggctgcactaggagcacctgcatgtccagatgaggggtctggactgtgtgtcatggagaccccaggagagaaatggcccctccccaggatgaagatatgtagagcagtccacacctctgagctccaggatcaaacctacttttttccagctgtgcgaccctggggaagtcactacacttctctgaaccccaggttcctcatctggaaaataacccggcagcgaggattaaaagaggcccatatataacatgcttagcatagagcctagcacagcgtaggtgtgcaaggtgtcctgggagtgggggtaacaaagtcacctctagactttgggtgtgccctccgtacctgccctgggatctgagacctccccaggctccatcccagcttcttgcacacaggtggagctgtgagtttggggagatggagaaaggccgggagatcaaggcagactaatgatattgtgggttccccctgccctcctgtgaggtggccacgggacagtgtgtggactccccagctccttgctgggctccactgggcactgttcgaggtctagtcagggcgtcccaggtcacaagggggcatggaggaggacacttgtggccctgggccacaggggacattgggcaccacatgtgagggtgtttatcatggaggaggtagtgattccagcagccgccattgatccagcacgtactgtatgccaggccctgccttagcgcctggcacagaaacctcatctggccgcctcccccgctgcggtggggcctaccccatctccgtttcctagagagggccctgcagagtggcgaggtaaaatgacttgccaagcaaggcaagatcaggactcaaaccaggcctctctgtcagagcctcccatttcctcagaactctcaggaggaaagggaggtgaatttttctgcacagctcccaaaggccttgacagggaggtggggttcagcacactacaggaaagagtttccagcagctggagctatccccgaagtggaggtagtgagcaccccatcactagacatatgcaagaagagacagaaagggaagcgtagaggggattgcagtgtggagtggaggttggatgggaggacttcagagttcccttgcagcttaacaatggcctgtgaggtggcagggatgagtcagggtatgcgtgtgtggagggaggggtggtgagatgaagaccagggagaggaaagggtggacctgaggcccccatggagaagggacgggcaggatgtgagtaatgggagaggcaatcacctattctcctgggcaatgctttgggggtgagcagcggcagaccaggatgccccagggaatggccaggtttgggccatctctggaagtgactggtccccggagagaggtggtggggctatctgcagctgaagaaacgggcagggccagagaaacaatgcaaggggactcctgggttttggctaagtagttttgggggagcaggtgaagacgtggggatccctggcccagccaggagctgccctagtataggcccagccccaagggttgtgtggggcagtctggaggttttggcctgggaaggggtcgggggaaggctgtataaaaagcttgaaagtgcggaacaggttggtggacctgaactccacctcctcgagtgggccccctgtatccacacccttcccagtcctgagcccagagttattctaaactcccgctgctgggagaggggaactgggaaccactaaatggcagaacagcacccttttccggccatatcacctgggccagaaaaaaaaaaaagagggggcccagagaaaagcgggctgtttctggggcaccgcggaggccgcagatcagaatccagctttttacaatagagcggaagcgaacctggctcagggcgattccggggcgggctaggcctgcgggtctctctgcctggtcccccggggcttttctgtcgcgcggaggcttcctgtcgcgggccctggtcccccctagcccccttccgggatgggcgagctcccgtcttcaagcccaagttaatgaccagggactttgaactttttggagatctgcaaagggctggcccctcggggacagtgacgccccccaccccctcccctgagcccggatcctggattaccccaagccaccgcccggcctccagccacctccctggctccggcgcggggcccttcctgggacccctcctctccccggtcccagccgggcggcgccgttggtacatcccggccggtccaggtggtagcgcccgcgcggctaccgtaattcccctacgtcccgcgccccagtttgcgctgagtcgactgagcccgtcccgcggctcccgtccccctctccccgcgcgccccatgaggctttggcagtctcggcccgagccttagagccttagacaccggggaggagaccctggtcctgttcctaggtgagtcgcggggaagtgggagctgcgctccggacggggggtgggactaggcgccaggacccccctaaaccgatggacagaacccggattcgagattcccacgtagtgccaggcctgtgggtgggtacagggtcctcaccagctgtatctccatttacgtgagggtggaatgggttcaagctcccgcccccatcacagtgtctctagggtgggtcggctcggagatagggccgtgaggagtctatgggaccctggccccggtatggggggtattggcggggcagggggatcctggaggggcccgggcgcgcggcgtggctgggaggctcagccgatcctccccatctggccagtcccggagtcggtcccaggcggaaaagccctctcgaggccggcagggggcgccagaggctgcgcctcgggcagtctgagcagacccaggcacccacttaggggtgggggatgcgggagacccgtgaatccggggaggccctggcctgccttggtggaagtctgggaaatggaggccaagaggtcccctgcagattccttagtaactcctcaagttgagggagctcgggggtattttaccattctcctgccctttagccggggtccgggcacacactaggacctggcagccatccccagatactgaattctatgccctcttggcacaggtgggcaaattgaggcccagtaggggaagggtgggggaacgtaggctccagaccaggtcttctgaagcccaggcaggtgccctctttcccccgctccctaccaaggaggcttctaagttgcaccggggaagggcttgctagtccaggtgctccgaagacacacgctggggtctggggctgggaactgcagaggctgggcaggaggggatgttcacagactgcagcccctccctctttctctagcactgggtcccagccttgggcatactagccaggaccgctccctggggaggaaggggccttcctggcttccagggcccgtgcggtgggcttagcctggggagaggttttctgtgtccctgccatctgcccggcacagggcagggccttaggtcaggctctgactccaggtgagcctcagaacccaaggggtgatgggtgaggcctgggcctaggggaaaggagggtgggtaggccgggtggagcgtagagagccgcctggcaaagccaccccgccctggctggcctgcccatgcatgcagtctccacccctggatttctaaggtgttgggtggggccttgggactagcaggctcccaggggagcttagccttggtgggaattcctggcaaggacatccctccagccagagagctcggactcctggttccaggcccgtctgctgtcggcagagcctggagctggccccagacctgcgtcctttcctggacagggaagtccctctcccacccagaccaggctggggccccagctcgttgtggggcagggatgcctgggggatccctggtttcccatctgcttttctggggctgggggaggtgatactgagggagaacagccgggtgcgggggtcctgccttggagactccattattcatcagcctccgcatctggtttctgggtatcagtttcaacaagccggccctgactcacaagcctggagctggggctgggctggggaggggctccctccccagggagttgggggccaggacttcttgggcctgcccctgagctgtttcagctccctgctgtggagaggaggtgggaatgcaggagcctgcccaggcccaccccactgccctggtacaggggctgggggctcctttctgctctgcactcttgcccctaaggaacagtcccccacccttgctgagtacccaggcagcagcctcactcagggatggccagggcccaggcactcaggtgacctctggtgatccgccctgacccagccctggtggtctccacttgatgcaacctggttaccccacaccggtgggctccccacaagctggctttgggatctgccgtgtcttcaggaaggcaatctccagggccctgttgcccaaaccaacattcagctgtcttcaggccccacgcctgccctgtgcctgaggcacccatttccctacgtagcagcagctggtgactttggggcaagtcagttgacacaggccttagtttctctatctgttaaatggggattgtaacagtatctcctcctaagagtctttgagaagagcgaatgggattcactgcctggaactcccacgatggggtggcacatggaatgctcagtgaaatgcagttatctgcctacaggacagtatgggggtggaggtctggggcaagaccacccgatttgaagtaggaactcacctgcccagggccagcaggcccaaggtcatggatactaggaggaggaagagaccttcggtctggcagtggggaaggctctgttgactgtcggccacaggaagggatatcctggccgagccctttcctgtccccatgtccttctgtggcatgaaggcccttctgccttcatctgttcactgatctcatccccaccaagcgcacctactgtgcaccaggactgttctaagtgccgaggacacagtgagatgcagacggccaaggcgctggcttctggagaggacagtctggtagggaagaatgatgataaaaaagtgaacaaagaaatgaattacaggtagtaataaacactaagaaggaaataatttaacttaaaggaattgagagtgggagggtaagggtggtttattttaagatgagggaaaaggacgtcttagaggtaacatttaagttggggcccggtgtcagctgtttcaagatagggtgcgtggaattccagacagaaaatacagaggagaaggccctgagcttggcgagctgtagggagagaaggaagaccggcaggtggaccctgtgcggaccagctgggagggaggcgggagcccggccatggtgggatttcactataagcaagatgggaagttttagttttcaaaactctgcctgttggccgggtgtggtggctcatgcctgtaatctcagcactttgggaggccaaggtgggggtggatcacttgagatcaggagttagtgaccagcctggtcaacatggcgaaaccccatctctactaaaatacaaaaagtagctgggtgtagtggcgggcgcctgtaatcccagctactggggaggctgaggcagaagaatcacttgaacctgggaggtggaggtcgtagtgagctgggatcatgccactgcactccaacgtgagtgacagagcaagattccgtctcaaaaacaaacaaacaaaaaacaaaaacacaactctgcctgtggtgtagacagtgggtgacctgggctttgggagtggagacagccctggaagtctcccagcctctaataaaacgctgctgccctcccaaagccatctcacggaccctggcccccttcccaccctctttccccatggaaccaggtggaggaggagcaattaggggtgggtgggctgatgacagacagcatggccacctcacccccatgggttctgaggagtgtcccaaggaggccatcccagaatcccagagccacagtctgagtttcagtcttgcctgtagacttttgtctctttatgtcactttatcccccacgccgtgaatggggctaatggtgcctgccctgccttcctgggaatcagtgtaaaagcgctttgacagccgtgtagtggtgactccagcaccagagtctgggcgtttgcgtcctctcaggctttgctgagtgccccctggcggtggggacctggcctagaactgcagggacctgggctgctgtgccatgtgggtcgccagggtttcctgatgcctccacctcacccagctcctgggggctgccaaggatagcctctcagagcagcccgccttctgcccacggccctttccagaggccaccggcctttggctctcggcctctgccgtacctgggcagtgagcagtcggtgtgagggggtgtccctggggctcaggctctcgggcaggggtctccaggttgatgggaggggctgagatgagagctggttgtgaggttggggtgggtgtgtgactggggctcaaagctggtgttggagcagagaggggtgtccctggggctagatggagagccggaccaaggaccctgaggggagtgtgccccatcctggcctcccccttctggtgcctgtattctaagagctcccttgctgggagtaagaaggggtcccctgggctgaggctccgaggcgggggtgggggtctccaggaggaagggaggagggaaggtacccttctggctgggagggaccgtgcgtgttggcgctgagggtgaggtggggaccacagcagagtgggcacccccagggctgggcggggatcgagtcacccaggggaggggctccacagtctccaaggtgggggggggtgtcaccagcgccccctgcctccagcattcaaggagctccccaggagaaagagcaagttctgaggagccctctgagcccggcattggtgttgaggagggagtcagagaagagaggggcccggggccgcgcagaggcgcagaggtgggggtaccccgggccaggcagaggtgggaaggtgggggtcccggggactgggcggaggcggggctgtgggggtcccccggccgggcagaggtaggggtgtggagtccccgggtctgggcagaggcggggaggcggggggtcgcccgggcaggcggaggcgggggtgtaggggttcccgggcggggaggcggggatccccggggctgggtggcgagggcccgggcgggagggaggtgtccgccttcctggggggctgggggctgttccgggcccggccctccccggggtccccgcgctcggcgggggcgggcgcggccgcacaatggcaggaagcggggctccgcgctttgtccggcgggcggcgcagaccgcggcttcctccggccgccatggggacaggacccggtgtctccggacgcctagcagcctccaggccgggcccggggctgcccctccgggactcggagccctcctgggccgggggtcgtgcccgcgacggtgatagccaggtacggggccgggacggggcgggaacggggctgggtgcccagttctcgcctgcagccgcccagtcctgtgcgggaggccagggagggggtgcccgtgactatgggccccgcggcccccaggggaaggatgcggcccatggcggccgagccccctacctgggcagctgcaccctggtgacggggacctcggactccggggtgtgtccccgccggctgagatgtccccgccaattcttggcgctttgtgtctggggccagctccggacacacctgtgggtcccgggccctatgctgggccgcccctctcctttccttcctctgccctggccctgcccacagcctcctcctaccccagaggcctctgtttctccttgtgcctctggccccagcccttgtgtgagggtggacgcctggttctctgtccccatcctcacatgcgtgtattccccaaagggcccccctctgttattttggctgcctggcgttagagggggtgggagctggctgttcccatgggtgggctctctcctcccttgggttgagacctgggaacattcccccccggaccctggtgtccctcctgcaggacagaggcaggacatggtgggcaggcaggcaggtgagggaggggcagttgggtctgagagaaggggctggagtctggcttcaagaaggggccattccgccctagtgctgggggagtcctgcctctggagggagctggggagactctggggtttgggggtgggacgtgaggcagaacggggagcagaaactgcaccagggagctctgcccaccccagcttctcagttgggctcatggttctcccggggggcttccagaacttcatcgtcaaccagatctgctcgacgaagtcggaaaccacctggttcagatcctggggctgagcctcactgtgcccccagtgcccctgagcctggggactgctgagaggagggaagcagatgaggtcagccgggcctgggcaccagcccctggcagcagctggaggagtcgagcagcctcagtgatggtagtggccacccagaccatcacagcagggaaactgatctcgaggctttcaagggatccagggtggggtgcgtcatagggctcagtccgtatttgttgaatactgactcttccgtaaggagcgaatcagggtatcaaatctgctgtctgtatattggattgatttaaaaacaagatggtggcacagagtcagacttggactggaagggtcccagagaccctcccagaactcctccgacctagcacggctccttccttgtcaccccctacctgcggtgagaccagggcttgggtcatgggcaggtctgccgccccagctggcactaggaaatctcaggaggcctggaagggattggagctgggagcctctgccatgctggctgggttcacagagggccagagggctgcggagcccgcagacggggggctcccaggaagaggggacaaggtggggcagggcccttccccagatcattctcatgaggagacacctgaagcttgggctcccagaagctgcaaagcctgatgtttctctcagcagtgcgctgtggattcagggtgagggtgtgggtagagccctggctgaggacagcttagtggtctctgtagtttttaaatttttttctgagacggggtctcactgtgtcgcccaggctggagtgcagcaatgtgatcatggctcactgcagcctcaacctcctgggctccagcaatcttcccacctcagcctcccaagtagctgggactacaagagagcgccaccacacccggctaattttgtttgttttttgtagaggcaggatctcactgtgtggcccgggctggagtttttgcactttgttttacgatagattaagacagaaaccagaaagagctgcaggggttgagggatcaatcccatcaccctcacttcaagccccacaagcacagttgaagatcactcctgaagggtgtagaagtgggggcacctggtgctcaaggctgccttcaggaatctgggtcatcctgtccccagccacctgcctggggcccagctccatgcagatcagcccctccctgagcacgtgggcctgcttggagtgccacctgccgactgccagtcctgtgccctgttccctttcctgtcagatggagacacggagggacacaagaaccaacagggcttgcatcaaactgagatagatttcctcctgtccccgtaatcccggctgacctgaggccagcctctcgctcctaagacacccatgagagggcgtgaatgtgggttaaaatctgggatccagtctgggtgccgtggctcacgcctgtaatcccagcacttggtgaggccgatgtgggtggatcacctgagggcaggtgttcaagaccagcctgaccaacaaggtgaaaccccgtctctactcaaaatccaaaaattacctgggtgtggtggcgtgtgcttgtagtcccagttacttgggaggctgaaacaggagaattgtctgaacccaggaggcggaggttgcagtgagccaagatcatgccactgctctccagcctgggcaacagagcgagactctatcgcaaaaaacataaataaatacataaataaataaataataatctgggatccagagccccacacacagtggcttcaagtcctagatccactggctgtgtgaccttagacaagtcatttcacctctctgagttttactttcctcttgtgtgaaacagggacaataacagcccttatcttatgggatgagatacacatgtaatgcccccagtgtggctccagacacatgacgaccacattaaaaacacactcagattcttcccggcctcctcctccctcctgtcactttctctgctatcctcaccacgcctatctcggaaatctctcatcgggctttcaccagccagaaactcttcagcgcctctctcctgccttaattcataaatgaaacaaggatttatggagcagctgggaccggaggtcaggcgctgaatcagacagagtaacatttctgtccttgcgaatgtgaccaggtgtggaggcagcagggtggaatatgtgacctgtcaggtgctggaaagtgctgaggacaggaaaggagcgtggagggcgaatgaggaggatgagaaggtgacttggggggaagctagcaggaggggagggaaggcagggagccatgcatttcaatatctggggaaaagcatctcagtccagggactggcagatgtcacagctcagaggtgggagctgccctgagggagtgtgtcccggaacgaccaggaggccagtgggtgaggggagtgagccaggatggaagagcaggacaggaggtccctgaatggggtggccttaaccctaaaaaaaaaaaaagtcaatgtcataaaagactgaaaaccctaaccttaacccttttggcttttttttttttttaagataatgtcttccctgtagcccaggctggagtgcagtggcgcaatctcagctcactgcaacctctgcctcctgagttcaaacaattctcctgcctcagcctcctgagtagctgggactacaggcgtgtgccaccatgcccggctaagtttttgtgtttttagtagagacggggtttcaccatgttagccaggatggtcttgatctcctgaccttgtgatccgcctgcctcagcctcccaaagtgctggggattacaggcatgagccaccgcgcctggcctttttatttacttatatatttatttatttatttatttatttatttatttatttattttgagacggagttttgccccaggctggagtgcgatggcacaatctcggctcactgcaacctctgcctcccgtattcaagcgattctcctgcttcagcctcccgcgtagctgggattacaggcatgcgccaccatgcccagctaattttgtatttttagtagagacagggtttcttccatgttggtcaggctggtctcgaactcccaacctcaggtgacccgcccgcctcggcctcccaaagtgctgggattacaggcatagccactgctcctggccccttttggcttttattcagagtgagatgggaacccttggagggttttgagtagatacagtgggactcctctttgaacagggcccactctagctgcacatggacaacatattgtgggggatgggggtagcagtgaggccagttttgaggccattgttgtcatctagctaaaaggtggctgggcagtggcacgcttatgagctgtggctgggttgaggccacagatactaaaggtggagccagcgggattttcgggctgaccagatgggggcataacagagaatgtcaagagtgaccccaagctgatatggtggctcacacctgtaatcccagcactaattccagcactttgggaggctgaggcgggcggatcagttgagcccaggagttcgagaccaggctgtgcaacatggcgaaatcctatctctactaaaaattagctgggtatggtggtacatgcctgtagtcccagctacttgggacggtgaggcaggagaatcacttgaacccaggaggtagaggttgcagtgagccgagattgcggcactgcactccagattgggtgacagagtgagaccctgtctcaaaaaaaaaaaggaaatcccccaccttgcagccatcagaagaatcaaataattgatttaggttaaaatcatctatgtatgctaaagctcttaggaccgcaagctcacatcaccatgcctggctaatttttttttttttggagacaaagtctcgctctgtcactcaggctggagtgcagtggtgtgatctcggctcactgcaacctctgcccccggttcaagcaattctcctgcctcagcctcctgagtagctgggactacaggcgtacgctgccacgactggctaatttttttgtattttagtagagacggggtttcaccgtgttgcccaggctgctatcgaactcctgagctcaggcaatccacccgcctcggcctcccaaagtgctaggattacaggcatgagccaccgtgcctggcaattttttatatttttagtagagatggggttttgtcatgttggccaggctggtcttgaactcctgacctcaactgattgagtgagattactggggaacaagacatctcaaagtgccatgccacagattacttattaattataggggaaaaagggactctacaaggtacagaggtccccagaggatccagcattacaggcaaatagcaagaacacacagctctgtggtgtccccgcctgaacgctcagtttgaaactttctgaggaccaccagggagatccacattgaggagctctgtgcgaggctgctggctcgaagacttccaaaatgtcaaggtcagccaggcacagtggctcatgcctataatcccagctctttgggaggtcaaggcgggcagattgcttgagcccaggagttcaagactagcctgggcaacatagtgagatctgtcactactaaaaataaaaaagttagttgggcgtagtggcatgcacctagtattcccagctactaaggaggctaaggcaggaggattacttgagtccgggaggttgaggttgcagtgagctgatcatgccatactactccagcctgggctacagagcgagaccctgtcttgaagaaaaaaaaaaagtcaatgtaataaaagaccacaaaaaacaaggctgggcacggtggctcacgcgtgtaatcccagcactttgggaggccgaggtgggcggatcacgaggtcaggagatcgagaccatcctggctaacacggtgaaaccccatctctaccaaaaatacaaaaaattagccgggcgtggtggcgggcgcctgtagtcccagctactcaggaggctgaggcaggagaatggtgtgaaccgaggaggcggagcttgcagtgagtcgagatcgcgccactgcactccagcctgggcgacagagcgagactccgtctcaaaaaaaaaaaaaaaaaaaaaaggataaacagacataaccaaatgccacgtgtgaaacttgattagttcctatatgaggaagtatatctgtaagaacgttatttagacacttgggaaaatgtcaatatagactatatatcaaggttcagtttcccaagtgcgacaattctatggggttttgtaggaaaactgtctttgttcttaggcagcagcatgatttctgccccaggggaggggggtgccgagaagagaatgggagagaagcagatgtggtagatatcaacttggggagtccagagggcatgtggatgtcatgtgctattcttataatttttggtaggtttgaaatattttaaaacaagtctgggcgcggtggctcacgcctgtaatcccagcactttgggaggccgaggcaggcggatcacctgagaccaggagttcaataccaacctggccaacatggtgaaactccgtctctactaaaaatacaaaaattagtcgggcgtggtggattgtgcctgtaatctcagctacttgggaggctgaggcaggagaatcacttgaacccgggaggcggaggatgcagtgagctgagatcgtgccattgcactccagcctgggcaacagagcgagaccccttctcagaaaaatttaaaaaaataaaaagaaaagaaatattttaaaacaaaacttgggaaaaataaagagagtgggaggagagaactaggaagtcgtgaatactgatacctgtttacagagtttagctgtgaagggaaagaaagaaagtcagccgtagctggagggtgaggtgaggcctctgtaaaatggagaaataaggctgggcgtggcagctcatgcctgtaatgccagcattttgggagaccaaggtgggcggatcacttgaggccaggagtttgagaccagcctgggcaacatggtgaaaccccgtctctacaaaaaatacaaacactcgcctatggtggtgtgtgcttctagtccaagctactcgggaggctgaggctcgaggatcacgtgagtctgggaggtcaaggctgcagtgagccatgattgtgccactgcactccctgtctcaaagaaagaaagaaaaaaaaagatggagaagccgggcgcggtggctcacgcctgtaatcccagcactttgggaggcccaggcgggctgttcacgaggtcaggaattcgagaccagtctggccaacacagtgaaaccctgtctctactaaaaatacaaaaaaaaaattagctgggcatggtggtgtgcgcctgtaatcccagctactggggaggctgaggcaggagaattgcgtgaaaccaggaggcggaggttgcagtgagccgagatcaagccattgcactccagtctgggtgacagaatgagactctgtctcagaaaaagaaaaaaaagaaaaagatggagaaataaccacgtgttggtgtggcagtgggggaaatgatccagcagaggggaaacttgatgatgtgggagaggggggactgctggggggcgtctcctcaccctggatcgagagatggagggcagttcattctaagtccctgcagcgctgggccggggtcgagggatgtggtggatctcgtggacctcctgaaggcttctgtccccaccccaggtatgtcaccacgccgactgccagcagctgcaccgccgggggcccctcaacctctgcgaggcctgtgacagcaagttccacagcaccatgcattatgatgggcatgtccgcttcgaccttcccccacaaggtgagcacaggcgggagccgcagctcggcccccagagctcctgtgtcagtgtttcagtaactgtcggaaacgtgctagggcgtcataaggacaagtcgactgtaaataatgaaacccgagtatgttacggttccttttgttccaaatgttttttagcaagagagaaagtccatgagcgtgccccttccagaggcaggcctttctctatctggtgctgtgctctcactggttctcacctcccccagctgcttttgcccctggcctgtggcccacacagagaaggcccctttctttctagttctgcctatcctcagggcaggggacttctggacaagtcctgcaagccaggctgtgggcctagcagaggcagtgtggagtgggggtggccaggtcaggaggcacttggagcaggaaataagaaattcctcttgctgagcagggacccagctcaggcccaccatcaactgcctatggaggagtggctcgcaggcacccaggcctggtgagaaatgccaacccccgagtcctttcccagctgatcagaggaacaaaaggattcttctggttgggcacggtggctcatgtctggaatacaaaaaatacaaaaattagccaggtgtggtggcacacacttgtggtcccagctgctcggaggctgaggtggaaggatcgcttgaaccccgacaatggaggctccagtgagccctgatcgtgccactgcactccagcctgagcgacagagcaagaccctgtcttaaaaaacaataaacaaacaaaagactctctcccactgccagggccccttgggaattcaggtgtggtcacagcatgggggaggggaggcctggaagaaagagccatggactttggtcccttcctgtaataacctcagaggcaaggcttccttatccttattttatagaagggtaaactgaggccacaggtgagtttgtttttggggtggagcttcaccatgggtgtcatcccagggcctttgtgtccttttgggtctgtggggatagacagcaatgactaaggccaggcaaggtggctcacacctgtaatcccagccctttgggaggctgaggtgggtggatcacttcaggtcaggagtttgagaacagcctggccaacatgttgaaaccctgtcattactaaaaatacaaaaaaatgagccgggtgtggtggcacacgcctgcaatcccagctactcaagaggctgaagcatgagaattgcttgaacccaggaggtggaggttgcagtgagccgagatcatgccactgcactccagcctgggtgacagagtgagaccctatctcaaaacaaaaacaaaaaacaatgactgagcccctctcctcacagaactgaagggcccttgctacctttaatctgggggttccagggtaacaggctgtggtccctctggaggcagccatgctgcaggctaaggaggggcgggggaggcacaaccctctcctgctttctcccaaggctctgtgctggcccggaacgtgtccacccggtcatgcccgccgcgcaccagccccgcagtggacttggaggaggaggaggaggagagctctgtggatggcaaagggtaggtgagggatgagtgggcagagagatacctggagggccccacggctgggtctcagatcagacattcaggaccagatgctctggcgccttcctcaagtaaggctgatgggcagacctcttcccacgcctgtggctgtcctgactccgggaagaggccacccagcctgggccagcctccagggtgcttgggatcctagcccacaccagaccaggtaccgttcgatgtgactcccgtgttggccaccagagggcgcacagccctatgcgggcctggccgggttgaatccacgcgggttacctgtcacctggggtgagccaagggcggggaggccacaggcccactcgccgcccacgctggcgagggccacccacacctccagcctctgccctcctcgcttccctgcagggaccggaagagcacaggcctgaaactctccaagaagaaagcaaggaggagacacacggatgtgaggagccccccagagccggcagatgcgggttccctacagcctgcgcccttccccgagcctgggccttcctccgggatgggggtggggaggtctgcatcccagggtgcagaggtctgggagatcgctggggttccctttcttgctggggttcccatccgagaccggagggtggggagggtggggaggagggttgggaaggagggtgggaaggagggtggggaggagggttgggaaggagggtgggaaggagggtggggaggagggcgggaatgagggcggtgaggagaagctcacagcccccacccccaccatcctcccaggacccaagcaaggaatgcttcactctgaaatttgacctgaatgtggacattgagacagagatcgtcccagccatgaagaagaagtcactggggtagggcttgatggggctcagggtggaagtgggactgggagtaggggtggccccatgttgcaggctccgggtctctgcaggtgtgacgtgtgtgtctgtgtggtggcccgtgagcgagcgcatccctgcgtgggcagacccgtgctggtgtgcacgccagtgtgagggagtgcggtggggtctgtgtacttgtgcattttaatcatgtatgcaggagccaggcctgcgtgtgggcaggcgtgtgacaggtctgccgtggtatgcagatgcgcctgtgtgagcacctctgcgggcaggtgtctgtggacctgcgtgtgatcccatgcgggcttcccttttccgttgggaaggtgggggcagctggggctgtgggtggggcgggggctcgtgggggcggggcccaagctgaagcgactggccgcctggttctaacacacatgcctcctgtcctgggggcagggaggtgctgctgcctgtatttgaaaggaagggcattgcgctgggcaaagtggacatctacctggaccagtccaacacacccctgtccctcaccttcgaggcctacaggttcgggggacactaccttcgtgtcaaaggtgagaagcagcctgggccaaatggggccgctgggactggcggagcctcctggagatgggcgcccttcccaggctcaggttcccattggtcgtgggcctgagcagcctcattaccatacaggtgtctctgctggatgctgctgggggaggggagggtgctggcagggcggggctgtcgggggagggcaggcaggccttggtgtggatcctccggggagagaggaccggggaccccctcctccaccagaccagggtactgaggatctctcgtggcccccacatgcagccccagccaagcctggagatgagggcaaggtggagcagggcatgaaggactccaagtccctgagtttgccgattctgcggccagctgggaccgggccccccgccctggagcgtgtggacgcccagagccgccgggagagcctggacatcttggtgaggaggagggggtgtgtcaggggagggggtgggaaggggcccaggctgggcccacagcccctcctcagaggcagtcaccctgggtctctcactgccccatcttggggttttaattgtcccttctggaaaatggggttggctgggagagtaggggaccctctctctctggatctagccatagcccaaggtgagggcttgtatctgagactcttctagtgccaggggtcagggaacctgtgtgtgcatgtgtgtgtgagagcacttgtacctggggctacagaccacccagagctgtgttccagagtgcatctgagtgtgtaactctgtgcttcatgcttgaagctgggggactgggggatgatagtctgggcgtatctgtgtctggaccttccagtctccagatatgtctgggtcccaggagaggggacaccccagggtagagatgcagagaccctcctccatcccaggctggcctgaggccctggaaacccgccctggggtggggccatgggggctggcagggggtcccggccctgaccacccttccctgaccaggcccctggccgccgccgcaagaacatgtcggagttcctgggggaggcgagcatccccgggcaggagccccccacgccctccagctgctctctgcccagcggcagcagtggcagcaccaacactggcgacagctggaagaaccgggcggccagtcgcttcagcggctttttcagctccggccccagcaccagcgcctttggccgggtatgtggccccatctgcccagggtcaggcagctggctggccatgacccctgaccctgaccagggtatctttccaggaggtagacaagatggagcagctggagggcaagctgcacacctacagcctcttcgggctgcccaggctgccccgggggctgcgcttcgaccatgactcctgggaggaggagtacgatgaagacgaggatgaggacaatgcctgcctgaggctggaggacagctggcgggagctcattgatgggcatgaggtgagtgcgggccacagtgctgctccctccttgtcccgaaaggaggacagccctcgggaggacccagtgatcagatgttccatgggacgccccaaagaggccactgttaccattagcccactttggagacactgaggctagatgaaaatggtgtgctgcttggctgttttaatggcagaggagggcccagatcttgggtgtcttaactgtgattactcatgtggtgtcaagggtgaccctgctcctcttgggacctccatgtccccattgggaaaatgagagttgcatgcaggttgcttatcctccccggccaccctaaggtgctccaggcctcgtgaatgacccatcctgccctccctctagaagctgacccggcggcagtgccaccagcaggaggcggtgtgggagctgctgcacacggaggcctcctacatcaggaaactgcgggtgatcatcaacgtgagtaggggctgcgctggtccccgtggccaccctgcccccctctttctgacagccctcagctgagtctgagcctttgcagaaggagcaggtgcctggcaatgaggtgggggcaggaaagtcagacaagggctgcgcccagggaggaggtgcctcctagaggaacctgggagggggcttcgggcaggtttgtcaggttcagctgaattagcacaggtgaggcctcattctttcactttcgttcagtggctgtttcccaacacttgctgtgtgctgggtgcccagcaggccacgccctggacgggacagagtgagctggcagtgtagggatttcggctcagggaggggagcacctaccctgggcttggagcttcctggagggaggaagcaccctcagaggtgaaatctggaggctaagccagggcagaggtggagaagggaattccaggcatggcttcaaagccagtctcccccgagcttccctccaggagggaccagggcagtgtgacctcgggagggctatgaggactgggtctttcctcagggtctggactacccaggtgcgaaggccaaagggtacagccttcttatccgtggctgctgtggggcctcctggaacggggaaggggaaggagtggcaggggagcctgaggctgggtggggccctagggctgagacagcctcccgaccccagtcacaccatcccctgatcccacagctgttcctgtgctgcctcctgaacctgcaagagtcagggctgctgtgtgaggtgcgctgggattcgggggcggcggcgggtgaggtaccaggaaggagggcgggacctggacctggggcggggctaacctggcggaggggcgtggccaaccgcacctcccgccgcgcccaggtggaggcggagcgcctgttcagcaacatcccggagatcgcgcagctgcaccgcaggctgtgggctagcgtgatggcgccggtgctggagaaggcgcggcgcacgcgagcgctgctacagcccggggacttcctcaaaggcttcaagatggtacgggcggggccgggcgcaggcgggggcactgaggcagggctggggcgccgaaaagcctccacggcccgatccggtctgcccagcatccccaacctcccccaggcccgtaaccgcacttgaccccttgtggccaagggtgaggaattacgaggcggtcgcccgggtttgagcctccacctgaccatctacccctgatccctggccacgggtggtcactttggctgaggctcagtttcctcatcaggaaacagggatcataagcttgctgcccccttggggtggtcgcccaagtgcagtaaggaagcgcttgcgcagcgcctggcgcgggccggcccgcagggagcgcgcggtaaccggcgccgtggttgttctgccccgggccagttcggctcgctcttcaagccctacatccgctactgcatggaggaggagggctgcatggagtacatgcgcggcctgctgcgcgacaacgacctcttccgggcctacatcacggtgagggcgcgcgtgccgtgggcgggggcgcaggaggacgggaccctggacggggccgggtggggcggggcctgccctgagcccgcccccactcccccaccgcagtgggcggagaagcacccacagtgccagaggctgaagctgagcgacatgctggccaaaccccaccagcggctcaccaagtacccgctgctgctcaagtcggtgctgaggaagaccgaggagccgcgcgccaaggaggccgtcgtcgccatggtaaccctgatggccagcgggagccgtcccccctgcgcggctctctgctccgtcatgaccctggacctgaagctccctcacctgcccctagatcggctccgtggagcgcttcatccaccacgtgaacgcgtgcatgcggcagcggcaggagcggcagcggctggcggccgtggtgagccgcatcgacgcctacgaggtggtggaaagcagcagcgacgaagtggacaaggtgggcgtgtgtgtctgcgggggttgccggctgggagagaggaaggcccagctggcaggcaggggctgtgctgggcatctcactgaggatgcctagctgagatgggagtcagtctctggcctcccctacgttcacgccatccgtccccagctcctgaaggaatttctgcacctggacttgacagcgcccatccctggcgcctccccggaggagacgcggcagctgctgctggaggggagcctgaggatgaaggaggggaaggacagcaaggtgattccagggccaccccacccctgtgccctgcccttcctagggacctcctgggccccagtcactggttctcagctctgcagtcccttcggtggttactcaagaaccagtgaccttgtcatagtgaatgacagttctctgcctgccattcacaaatccagcagtagggtcctagcccttgaaggcaccagttgtgcccatttgttggtgccacatgggttcctggtgggagggcagccatattccacaagtgggccaggaaccccagagccttgctactgtgccatggccccttcaggcatggggcaggctgagagcttgcacacggtgacttcaaagtcaccagtcttctttttaatgtaaacttgtattgagataagtcatcaacgtacatctcagtgaaagagaatcatcttcctcttcattttaattttacttgaaggttcatggtgggaggagtgtttgacaaaaaccgagtgctcccaggggaggctggtgccacagtccctggccctgaccctgctggcctctctggccaccccccctcctgccactgcagatggatgtgtactgcttcctcttcacggatctgctgttggtgaccaaagcagtgaagaaggcagagaggaccagggtcatcaggccacccctgctcgtggacaagattgtgtgccgggagctacgggaccctggtaaggagccctggtcccctgttcctggtcaggggctgtgatgggtgggggccatcgtctctgctgacactgacttgggccttccctaaccagggtccttcctccttatctacctgaatgagtttcacagtgctgtaggggcctacacgttccaggccagtggccaggccttgtgccgtggctgggtggacaccatttacaatgcccaggtgagtgcagagtagtgagtgggtgggcaaggcagattagggagatgctggtcacaacccattctgtcccatgtaccccaaccttgcctgcagaaccagctgcaacagctgcgtgcacaggagcccccaggcagtcagcagcccctgcagagcctggaagaggaggaggatgagcaggaggaggaagaggaggaggaggaggaggaggaggaaggcgaggacagtggcacttcagctgccagctcccctaccatcatgcggaaaagcagcggcagccccgactctcagcactggtacgtctgctcatgaccacccagcaggtcaaaccaggacaagtactctagcccaggactcctgaaggcccagccacgctcccttcctcccaatggcctcttgtcatgaacactgtgggagcggggctctgtctcccccagagtccgggtggggagggcagacacctttccatgtgctgccagccctgatccattcgtggtagctgcctggggtgctgtgctgaggatccttagggcagatccagccttggcagggaagagtgctgggctcgctactgaggtctgttgtgggcactggagctggaagatctgccacacctgccacatgctgccatctctgagcctccagccccaggagggcagagggtataaaccaccgtgcattgcccagcctggggctgcctcaggccatctaggtttcatggcctgggctgactctgctcctggccccacagtgcctcagatggctccacggagaccctggccatggttgtggtagagcctggggacacgctgtcctcccccgagttcgacagcggtcctttcagctcccagtctgatgagacctctctcagcaccactgcctcatctgccacgcccaccagtgagctgctgcccctgggtccggtggacggccgctcctgctccatggactctgcctacggcaccctctccccaacctccttacaagactttgtggccccaggcccaatggcagagctagtgcctcgggccccagagtccccacgagttccttcccctccaccctcgccccgtctccgccgccgcacccctgtccagctgttgagctgcccgccccacctgctcaagtctaagtccgaggccagcctcctccagctgctggcaggggctggcacccatgggacaccctctgcccccagccgcagcctgtcagagctctgcctggctgttccagccccaggtattaggactcagggctcccctcaggaagctgggcccagctgggattgccgaggggcccctagccctggcagcggtcctgggctagtcggctgcctggccggggaacctgcaggctcccacaggaagaggtgtggagacctgccctcgggggcctctcccagggtccagcctgagcccccaccaggggtctctgcccagcacaggaagctgaccctggcccagctctaccgaatcaggaccaccctgctgcttaactccacgctcactgcctcgtgagtggcctggactggggtagggcaggtggctcagggcactggcatgggggcccactcatgcctgggagcatcgcatttggggagggtcatggcggagggagcctgaaccctgcccagtgtctgggcgcagggggctgtggtgggcagcagtgaaggggcctgaggagtgccgtggggaagagagggtgaccagagccactctgaatggcgtcagccaaagaaggactctgtcccctccccaccctgtagggaggtctgagcagagggaggcccccaagagtgccattgaccaagagacagcagacagcctgcctcctggggcgtgccggcacctgcttcagctactgcctcctgtatgcatgagccggatgctgggcaggatccctgcctacgcccgggcccgatttgcgctttgccggactggatggagtggaggaggcccaggccacagtaccaccccacctgcccaggcagcccctcgtcacctactccccgaagttaccagctcagctcgagtcttcagggctgggctcctaggctgcccatcctacttctaccctcactggcctccagtgggattcactcctgccctgcccccaccttcccagtcccacaggccacccctggcttgggctgggttctgtgaagttacgtatttattgagcttttggttcttttataaagacttgtctagactcca

SEQ ID NO: 13393 - DNA, 3753 bp, Homo sapiens
ggacgctgacctcttttgaagggaggactgaggagatcaccccacccctcctccggttgggaggccagtggggcccaggggagcctgggtgccccgctgactgatgccctctgctcctcccctgcagacgaccagagccccgctgaaaagaagggactgcgctgtcagaaccccgcctgcatggacaaggggcgggcggccaaggtatgtcaccacgccgactgccagcagctgcaccgccgggggcccctcaacctctgcgaggcctgtgacagcaagttccacagcaccatgcattatgatgggcatgtccgcttcgaccttcccccacaaggctctgtgctggcccggaacgtgtccacccggtcatgcccgccgcgcaccagccccgcagtggacttggaggaggaggaggaggagagctctgtggatggcaaaggggaccggaagagcacaggcctgaaactctccaagaagaaagcaaggaggagacacacggatgacccaagcaaggaatgcttcactctgaaatttgacctgaatgtggacattgagacagagatcgtcccagccatgaagaagaagtcactgggggaggtgctgctgcctgtatttgaaaggaagggcattgcgctgggcaaagtggacatctacctggaccagtccaacacacccctgtccctcaccttcgaggcctacaggttcgggggacactaccttcgtgtcaaagccccagccaagcctggagatgagggcaaggtggagcagggcatgaaggactccaagtccctgagtttgccgattctgcggccagctgggaccgggccccccgccctggagcgtgtggacgcccagagccgccgggagagcctggacatcttggcccctggccgccgccgcaagaacatgtcggagttcctgggggaggcgagcatccccgggcaggagccccccacgccctccagctgctctctgcccagcggcagcagtggcagcaccaacactggcgacagctggaagaaccgggcggccagtcgcttcagcggctttttcagctccggccccagcaccagcgcctttggccgggaggtagacaagatggagcagctggagggcaagctgcacacctacagcctcttcgggctgcccaggctgccccgggggctgcgcttcgaccatgactcctgggaggaggagtacgatgaagacgaggatgaggacaatgcctgcctgaggctggaggacagctggcgggagctcattgatgggcatgagaagctgacccggcggcagtgccaccagcaggaggcggtgtgggagctgctgcacacggaggcctcctacatcaggaaactgcgggtgatcatcaacctgttcctgtgctgcctcctgaacctgcaagagtcagggctgctgtgtgaggtggaggcggagcgcctgttcagcaacatcccggagatcgcgcagctgcaccgcaggctgtgggctagcgtgatggcgccggtgctggagaaggcgcggcgcacgcgagcgctgctacagcccggggacttcctcaaaggcttcaagatgttcggctcgctcttcaagccctacatccgctactgcatggaggaggagggctgcatggagtacatgcgcggcctgctgcgcgacaacgacctcttccgggcctacatcacgtgggcggagaagcacccacagtgccagaggctgaagctgagcgacatgctggccaaaccccaccagcggctcaccaagtacccgctgctgctcaagtcggtgctgaggaagaccgaggagccgcgcgccaaggaggccgtcgtcgccatgatcggctccgtggagcgcttcatccaccacgtgaacgcgtgcatgcggcagcggcaggagcggcagcggctggcggccgtggtgagccgcatcgacgcctacgaggtggtggaaagcagcagcgacgaagtggacaagctcctgaaggaatttctgcacctggacttgacagcgcccatccctggcgcctccccggaggagacgcggcagctgctgctggaggggagcctgaggatgaaggaggggaaggacagcaagatggatgtgtactgcttcctcttcacggatctgctgttggtgaccaaagcagtgaagaaggcagagaggaccagggtcatcaggccacccctgctcgtggacaagattgtgtgccgggagctacgggaccctgggtccttcctccttatctacctgaatgagtttcacagtgctgtaggggcctacacgttccaggccagtggccaggccttgtgccgtggctgggtggacaccatttacaatgcccagaaccagctgcaacagctgcgtgcacaggagcccccaggcagtcagcagcccctgcagagcctggaagaggaggaggatgagcaggaggaggaagaggaggaggaggaggaggaggaggaaggcgaggacagtggcacttcagctgccagctcccctaccatcatgcggaaaagcagcggcagccccgactctcagcactgtgcctcagatggctccacggagaccctggccatggttgtggtagagcctggggacacgctgtcctcccccgagttcgacagcggtcctttcagctcccagtctgatgagacctctctcagcaccactgcctcatctgccacgcccaccagtgagctgctgcccctgggtccggtggacggccgctcctgctccatggactctgcctacggcaccctctccccaacctccttacaagactttgtggccccaggcccaatggcagagctagtgcctcgggccccagagtccccacgagttccttcccctccaccctcgccccgtctccgccgccgcacccctgtccagctgttgagctgcccgccccacctgctcaagtctaagtccgaggccagcctcctccagctgctggcaggggctggcacccatgggacaccctctgcccccagccgcagcctgtcagagctctgcctggctgttccagccccaggtattaggactcagggctcccctcaggaagctgggcccagctgggattgccgaggggcccctagccctggcagcggtcctgggctagtcggctgcctggccggggaacctgcaggctcccacaggaagaggtgtggagacctgccctcgggggcctctcccagggtccagcctgagcccccaccaggggtctctgcccagcacaggaagctgaccctggcccagctctaccgaatcaggaccaccctgctgcttaactccacgctcactgcctcggaggtctgagcagagggaggcccccaagagtgccattgaccaagagacagcagacagcctgcctcctggggcgtgccggcacctgcttcagctactgcctcctgtatgcatgagccggatgctgggcaggatccctgcctacgcccgggcccgatttgcgctttgccggactggatggagtggaggaggcccaggccacagtaccaccccacctgcccaggcagcccctcgtcacctactccccgaagttaccagctcagctcgagtcttcagggctgggctcctaggctgcccatcctacttctaccctcactggcctccagtgggattcactcctgccctgcccccaccttcccagtcccacaggccacccctggcttgggctgggttctgtgaagttacgtatttattgagcttttggttcttttataaagacttgtctagactcca

SEQ ID NO: 13394 - DNA, 3550 bp, Homo sapiens
cttgatctcccgctgtgaccagcccctctctgcctggcaggggaaagccaccaaactaaggccttcctggtagccaaggagcccagcagaggggctgctgctggctgctgggattgcagaggccggggtctctgtggtgttgctttcctggaaaggagggacggcacctccagggcagccagcagtgtgggagcccattccagggcgcaaatgggcactcaggaatggaaaatccaagaaggaaccaaccaccaacaaggaaatgcagtgtgagcggcggctgcgaagtctgtgccttcaaatatacagcgcccaggggacctgtgttggacggggagcaaattggcagggctgagagcgccttggttttctgtgcagacaggtccagctgcagaaattaagactggggctgagtcggggagaagccttccatgttgagatggcaactgggcaaagcaggacggagacctgtgtgtctgattagagaggcctgtggcattggcatgtggctggaggtccaggcagggtgccaccaccgcagaggtcaagcatgaattcagtcctgacaaaacatgggtctccacctcgaagctggctcagcctttgttcaggaaccgacgaccagagccccgctgaaaagaagggactgcgctgtcagaaccccgcctgcatggacaaggggcgggcggccaaggtatgtcaccacgccgactgccagcagctgcaccgccgggggcccctcaacctctgcgaggcctgtgacagcaagttccacagcaccatgcattatgatgggcatgtccgcttcgaccttcccccacaaggctctgtgctggcccggaacgtgtccacccggtcatgcccgccgcgcaccagccccgcagtggacttggaggaggaggaggaggagagctctgtggatggcaaaggggaccggaagagcacaggcctgaaactctccaagaagaaagcaaggaggagacacacggatgacccaagcaaggaatgcttcactctgaaatttgacctgaatgtggacattgagacagagatcgtcccagccatgaagaagaagtcactgggggaggtgctgctgcctgtatttgaaaggaagggcattgcgctgggcaaagtggacatctacctggaccagtccaacacacccctgtccctcaccttcgaggcctacaggttcgggggacactaccttcgtgtcaaagccccagccaagcctggagatgagggcaaggtggagcagggcatgaaggactccaagtccctgagtttgccgattctgcggccagctgggaccgggccccccgccctggagcgtgtggacgcccagagccgccgggagagcctggacatcttggcccctggccgccgccgcaagaacatgtcggagttcctgggggaggcgagcatccccgggcaggagccccccacgccctccagctgctctctgcccagcggcagcagtggcagcaccaacactggcgacagctggaagaaccgggcggccagtcgcttcagcggctttttcagctccggccccagcaccagcgcctttggccgggaggtagacaagatggagcagctggagggcaagctgcacacctacagcctcttcgggctgcccaggctgccccgggggctgcgcttcgaccatgactcctgggaggaggagtacgatgaagacgaggatgaggacaatgcctgcctgaggctggaggacagctggcgggagctcattgatgggcatgagaagctgacccggcggcagtgccaccagcaggaggcggtgtgggagctgctgcacacggaggcctcctacatcaggaaactgcgggtgatcatcaacctgttcctgtgctgcctcctgaacctgcaagagtcagggctgctgtgtgaggtggaggcggagcgcctgttcagcaacatcccggagatcgcgcagctgcaccgcaggctgtgggctagcgtgatggcgccggtgctggagaaggcgcggcgcacgcgagcgctgctacagcccggggacttcctcaaaggcttcaagatgttcggctcgctcttcaagccctacatccgctactgcatggaggaggagggctgcatggagtacatgcgcggcctgctgcgcgacaacgacctcttccgggcctacatcacgtgggcggagaagcacccacagtgccagaggctgaagctgagcgacatgctggccaaaccccaccagcggctcaccaagtacccgctgctgctcaagtcggtgctgaggaagaccgaggagccgcgcgccaaggaggccgtcgtcgccatgatcggctccgtggagcgcttcatccaccacgtgaacgcgtgcatgcggcagcggcaggagcggcagcggctggcggccgtggtgagccgcatcgacgcctacgaggtggtggaaagcagcagcgacgaagtggacaagctcctgaaggaatttctgcacctggacttgacagcgcccatccctggcgcctccccggaggagacgcggcagctgctgctggaggggagcctgaggatgaaggaggggaaggacagcaagatggatgtgtactgcttcctcttcacggatctgctgttggtgaccaaagcagtgaagaaggcagagaggaccagggtcatcaggccacccctgctcgtggacaagattgtgtgccgggagctacgggaccctgggtccttcctccttatctacctgaatgagtttcacagtgctgtaggggcctacacgttccaggccagtggccaggccttgtgccgtggctgggtggacaccatttacaatgcccagaaccagctgcaacagctgcgtgcacaggagcccccaggcagtcagcagcccctgcagagcctggaagaggaggaggatgagcaggaggaggaagaggaggaggaggaggaggaggaggaaggcgaggacagtggcacttcagctgccagctcccctaccatcatgcggaaaagcagcggcagccccgactctcagcactggaagctgaccctggcccagctctaccgaatcaggaccaccctgctgcttaactccacgctcactgcctcggaggtctgagcagagggaggcccccaagagtgccattgaccaagagacagcagacagcctgcctcctggggcgtgccggcacctgcttcagctactgcctcctgtatgcatgagccggatgctgggcaggatccctgcctacgcccgggcccgatttgcgctttgccggactggatggagtggaggaggcccaggccacagtaccaccccacctgcccaggcagcccctcgtcacctactccccgaagttaccagctcagctcgagtcttcagggctgggctcctaggctgcccatcctacttctaccctcactggcctccagtgggattcactcctgccctgcccccaccttcccagtcccacaggccacccctggcttgggctgggttctgtgaagttacgtatttattgagcttttggttcttttataaagacttgtctagactcca

SEQ ID NO: 13395 - DNA, 5221 bp, Homo sapiens
aaactaaggccttcctggtagccaaggagcccagcagaggggctgctgctggctgctgggattgcagaggccggggtctctgtggtgttgctttcctggaaaggagggacggcacctccagggcagccagcagtgtgggagcccattccagggcgcaaatgggcactcaggaatggaaaatccaagaaggaaccaaccaccaacaaggaaatgcagtgtgagcggcggctgcgaagtctgtgccttcaaatatacagcgcccaggggacctgtgttggacggggagcaaattggcagggctgagagcgccttggttttctgtgcagacaggtccagctgcagaaattaagactggggctgagtcggggagaagccttccatgttgagatggcaactgggcaaagcaggacggagacctgtgtgtctgattagagaggcctgtggcattggcatgtggctggaggtccaggcagggtgccaccaccgcagaggtcaagcatgaattcagtcctgacaaaacatgggtctccacctcgaagctggctcagcctttgttcaggaaccgacgaccagagccccgctgaaaagaagggactgcgctgtcagaaccccgcctgcatggacaaggggcgggcggccaaggtatgtcaccacgccgactgccagcagctgcaccgccgggggcccctcaacctctgcgaggcctgtgacagcaagttccacagcaccatgcattatgatgggcatgtccgcttcgaccttcccccacaaggctctgtgctggcccggaacgtgtccacccggtcatgcccgccgcgcaccagccccgcagtggacttggaggaggaggaggaggagagctctgtggatggcaaaggggaccggaagagcacaggcctgaaactctccaagaagaaagcaaggaggagacacacggatgacccaagcaaggaatgcttcactctgaaatttgacctgaatgtggacattgagacagagatcgtcccagccatgaagaagaagtcactgggggaggtgctgctgcctgtatttgaaaggaagggcattgcgctgggcaaagtggacatctacctggaccagtccaacacacccctgtccctcaccttcgaggcctacaggttcgggggacactaccttcgtgtcaaagccccagccaagcctggagatgagggcaaggtggagcagggcatgaaggactccaagtccctgagtttgccgattctgcggccagctgggaccgggccccccgccctggagcgtgtggacgcccagagccgccgggagagcctggacatcttggcccctggccgccgccgcaagaacatgtcggagttcctgggggaggcgagcatccccgggcaggagccccccacgccctccagctgctctctgcccagcggcagcagtggcagcaccaacactggcgacagctggaagaaccgggcggccagtcgcttcagcggctttttcagctccggccccagcaccagcgcctttggccgggaggtagacaagatggagcagctggagggcaagctgcacacctacagcctcttcgggctgcccaggctgccccgggggctgcgcttcgaccatgactcctgggaggaggagtacgatgaagacgaggatgaggacaatgcctgcctgaggctggaggacagctggcgggagctcattgatgggcatgagaagctgacccggcggcagtgccaccagcaggaggcggtgtgggagctgctgcacacggaggcctcctacatcaggaaactgcgggtgatcatcaacctgttcctgtgctgcctcctgaacctgcaagagtcagggctgctgtgtgaggtggaggcggagcgcctgttcagcaacatcccggagatcgcgcagctgcaccgcaggctgtgggctagcgtgatggcgccggtgctggagaaggcgcggcgcacgcgagcgctgctacagcccggggacttcctcaaaggcttcaagatgttcggctcgctcttcaagccctacatccgctactgcatggaggaggagggctgcatggagtacatgcgcggcctgctgcgcgacaacgacctcttccgggcctacatcacgtgggcggagaagcacccacagtgccagaggctgaagctgagcgacatgctggccaaaccccaccagcggctcaccaagtacccgctgctgctcaagtcggtgctgaggaagaccgaggagccgcgcgccaaggaggccgtcgtcgccatgatcggctccgtggagcgcttcatccaccacgtgaacgcgtgcatgcggcagcggcaggagcggcagcggctggcggccgtggtgagccgcatcgacgcctacgaggtggtggaaagcagcagcgacgaagtggacaagctcctgaaggaatttctgcacctggacttgacagcgcccatccctggcgcctccccggaggagacgcggcagctgctgctggaggggagcctgaggatgaaggaggggaaggacagcaagatggatgtgtactgcttcctcttcacggatctgctgttggtgaccaaagcagtgaagaaggcagagaggaccagggtcatcaggccacccctgctcgtggacaagattgtgtgccgggagctacgggaccctgggtccttcctccttatctacctgaatgagtttcacagtgctgtaggggcctacacgttccaggccagtggccaggccttgtgccgtggctgggtggacaccatttacaatgcccagaaccagctgcaacagctgcgtgcacaggagcccccaggcagtcagcagcccctgcagagcctggaagaggaggaggatgagcaggaggaggaagaggaggaggaggaggaggaggaggaaggcgaggacagtggcacttcagctgccagctcccctaccatcatgcggaaaagcagcggcagccccgactctcagcactgtgcctcagatggctccacggagaccctggccatggttgtggtagagcctggggacacgctgtcctcccccgagttcgacagcggtcctttcagctcccagtctgatgagacctctctcagcaccactgcctcatctgccacgcccaccagtgagctgctgcccctgggtccggtggacggccgctcctgctccatggactctgcctacggcaccctctccccaacctccttacaagactttgtggccccaggcccaatggcagagctagtgcctcgggccccagagtccccacgagttccttcccctccaccctcgccccgtctccgccgccgcacccctgtccagctgttgagctgcccgccccacctgctcaagtctaagtccgaggccagcctcctccagctgctggcaggggctggcacccatgggacaccctctgcccccagccgcagcctgtcagagctctgcctggctgttccagccccaggtattaggactcagggctcccctcaggaagctgggcccagctgggattgccgaggggcccctagccctggcagcggtcctgggctagtcggctgcctggccggggaacctgcaggctcccacaggaagaggtgtggagacctgccctcgggggcctctcccagggtccagcctgagcccccaccaggggtctctgcccagcacaggaagctgaccctggcccagctctaccgaatcaggaccaccctgctgcttaactccacgctcactgcctcggaggtctgagcagagggaggcccccaagagtgccattgaccaagagacagcagacagcctgcctcctggggcgtgccggcacctgcttcagctactgcctcctgtatgcatgagccggatgctgggcaggatccctgcctacgcccgggcccgatttgcgctttgccggactggatggagtggaggaggcccaggccacagtaccaccccacctgcccaggcagcccctcgtcacctactccccgaagttaccagctcagctcgagtcttcagggctgggctcctaggctgcccatcctacttctaccctcactggcctccagtgggattcactcctgccctgcccccaccttcccagtcccacaggccacccctggcttgggctgggttctgtgaagttacgtatttattgagcttttggttcttttataaagacttgtctagactccactgggaagagtcctttgctttggggcccagtgactcggggcacttgagttcagggcggcctccttgtgttcctgtgctcctccacttgccacggatgggccacggatggagcttgccatgggaagcactgggaagtaatggggtgtggggtgccaccagaccaacacccccagacttccccaccttcagccaccatcagagcctctccccaggtgccccccggggattcagggctgaatctgcccagttcccacactcaggccagccctcttgggaaggtgggtcctccatgggggtcccttcaggaactttttttttttttttaatacagagtctcactctgtcacctaggttggagtgcagtggtgtgatgtcggctcactgcaacctctgcctcccgggttcaaacgattctcctgccccagccactctagtagctggaactgcaggtgtgcaccaccacgccgggctagtttttgtattttaagtagagacggcatttcaccatattggtcaggctggtctcgaactcctgaccccaagtgttccgcccgcctctgcctcccatagtgctagaattacaggcctgagctactgcgcttggccccttgcggtacttttggcccaacctcctccatggctggggacgcggaggccgagagagaagtcacttgccctggctctaccttgaagtggttctcagggttggggcgagagtcggggtggggaccgagatgcagctctatcctgtgcccctggtcgcagcaggcagcccagcgcttcgcgtgttctacttggcctgtccgctgccgcctaatgagctcaggtctaggccgagcagagggggcacctggtcggactcggttgggctcgggcggccccgcctccccccgcccgccaggcgggcccttctcgacggcgcggggcgggccctgcgggcgcggggctgaaggcggaaccacgacgggcagagagcacggagccgggaagcccctgggcgcccgtcggagggctatggagcagcggccgc

SEQ ID NO: 13396 - DNA, 19863 bp, Homo sapiens
agcattcaaggagctccccaggagaaagagcaagttctgaggagccctctgagcccggcattggtgttgaggagggagtcagagaagagaggggcccggggccgcgcagaggcgcagaggtgggggtaccccgggccaggcagaggtgggaaggtgggggtcccggggactgggcggaggcggggctgtgggggtcccccggccgggcagaggtaggggtgtggagtccccgggtctgggcagaggcggggaggcggggggtcgcccgggcaggcggaggcgggggtgtaggggttcccgggcggggaggcggggatccccggggctgggtggcgagggcccgggcgggagggaggtgtccgccttcctggggggctgggggctgttccgggcccggccctccccggggtccccgcgctcggcgggggcgggcgcggccgcacaatggcaggaagcggggctccgcgctttgtccggcgggcggcgcagaccgcggcttcctccggccgccatggggacaggacccggtgtctccggacgcctagcagcctccaggccgggcccggggctgcccctccgggactcggagccctcctgggccgggggtcgtgcccgcgacggtgatagccaggtacggggccgggacggggcgggaacggggctgggtgcccagttctcgcctgcagccgcccagtcctgtgcgggaggccagggagggggtgcccgtgactatgggccccgcggcccccaggggaaggatgcggcccatggcggccgagccccctacctgggcagctgcaccctggtgacggggacctcggactccggggtgtgtccccgccggctgagatgtccccgccaattcttggcgctttgtgtctggggccagctccggacacacctgtgggtcccgggccctatgctgggccgcccctctcctttccttcctctgccctggccctgcccacagcctcctcctaccccagaggcctctgtttctccttgtgcctctggccccagcccttgtgtgagggtggacgcctggttctctgtccccatcctcacatgcgtgtattccccaaagggcccccctctgttattttggctgcctggcgttagagggggtgggagctggctgttcccatgggtgggctctctcctcccttgggttgagacctgggaacattcccccccggaccctggtgtccctcctgcaggacagaggcaggacatggtgggcaggcaggcaggtgagggaggggcagttgggtctgagagaaggggctggagtctggcttcaagaaggggccattccgccctagtgctgggggagtcctgcctctggagggagctggggagactctggggtttgggggtgggacgtgaggcagaacggggagcagaaactgcaccagggagctctgcccaccccagcttctcagttgggctcatggttctcccggggggcttccagaacttcatcgtcaaccagatctgctcgacgaagtcggaaaccacctggttcagatcctggggctgagcctcactgtgcccccagtgcccctgagcctggggactgctgagaggagggaagcagatgaggtcagccgggcctgggcaccagcccctggcagcagctggaggagtcgagcagcctcagtgatggtagtggccacccagaccatcacagcagggaaactgatctcgaggctttcaagggatccagggtggggtgcgtcatagggctcagtccgtatttgttgaatactgactcttccgtaaggagcgaatcagggtatcaaatctgctgtctgtatattggattgatttaaaaacaagatggtggcacagagtcagacttggactggaagggtcccagagaccctcccagaactcctccgacctagcacggctccttccttgtcaccccctacctgcggtgagaccagggcttgggtcatgggcaggtctgccgccccagctggcactaggaaatctcaggaggcctggaagggattggagctgggagcctctgccatgctggctgggttcacagagggccagagggctgcggagcccgcagacggggggctcccaggaagaggggacaaggtggggcagggcccttccccagatcattctcatgaggagacacctgaagcttgggctcccagaagctgcaaagcctgatgtttctctcagcagtgcgctgtggattcagggtgagggtgtgggtagagccctggctgaggacagcttagtggtctctgtagtttttaaatttttttctgagacggggtctcactgtgtcgcccaggctggagtgcagcaatgtgatcatggctcactgcagcctcaacctcctgggctccagcaatcttcccacctcagcctcccaagtagctgggactacaagagagcgccaccacacccggctaattttgtttgttttttgtagaggcaggatctcactgtgtggcccgggctggagtttttgcactttgttttacgatagattaagacagaaaccagaaagagctgcaggggttgagggatcaatcccatcaccctcacttcaagccccacaagcacagttgaagatcactcctgaagggtgtagaagtgggggcacctggtgctcaaggctgccttcaggaatctgggtcatcctgtccccagccacctgcctggggcccagctccatgcagatcagcccctccctgagcacgtgggcctgcttggagtgccacctgccgactgccagtcctgtgccctgttccctttcctgtcagatggagacacggagggacacaagaaccaacagggcttgcatcaaactgagatagatttcctcctgtccccgtaatcccggctgacctgaggccagcctctcgctcctaagacacccatgagagggcgtgaatgtgggttaaaatctgggatccagtctgggtgccgtggctcacgcctgtaatcccagcacttggtgaggccgatgtgggtggatcacctgagggcaggtgttcaagaccagcctgaccaacaaggtgaaaccccgtctctactcaaaatccaaaaattacctgggtgtggtggcgtgtgcttgtagtcccagttacttgggaggctgaaacaggagaattgtctgaacccaggaggcggaggttgcagtgagccaagatcatgccactgctctccagcctgggcaacagagcgagactctatcgcaaaaaacataaataaatacataaataaataaataataatctgggatccagagccccacacacagtggcttcaagtcctagatccactggctgtgtgaccttagacaagtcatttcacctctctgagttttactttcctcttgtgtgaaacagggacaataacagcccttatcttatgggatgagatacacatgtaatgcccccagtgtggctccagacacatgacgaccacattaaaaacacactcagattcttcccggcctcctcctccctcctgtcactttctctgctatcctcaccacgcctatctcggaaatctctcatcgggctttcaccagccagaaactcttcagcgcctctctcctgccttaattcataaatgaaacaaggatttatggagcagctgggaccggaggtcaggcgctgaatcagacagagtaacatttctgtccttgcgaatgtgaccaggtgtggaggcagcagggtggaatatgtgacctgtcaggtgctggaaagtgctgaggacaggaaaggagcgtggagggcgaatgaggaggatgagaaggtgacttggggggaagctagcaggaggggagggaaggcagggagccatgcatttcaatatctggggaaaagcatctcagtccagggactggcagatgtcacagctcagaggtgggagctgccctgagggagtgtgtcccggaacgaccaggaggccagtgggtgaggggagtgagccaggatggaagagcaggacaggaggtccctgaatggggtggccttaaccctaaaaaaaaaaaaagtcaatgtcataaaagactgaaaaccctaaccttaacccttttggcttttttttttttttaagataatgtcttccctgtagcccaggctggagtgcagtggcgcaatctcagctcactgcaacctctgcctcctgagttcaaacaattctcctgcctcagcctcctgagtagctgggactacaggcgtgtgccaccatgcccggctaagtttttgtgtttttagtagagacggggtttcaccatgttagccaggatggtcttgatctcctgaccttgtgatccgcctgcctcagcctcccaaagtgctggggattacaggcatgagccaccgcgcctggcctttttatttacttatatatttatttatttatttatttatttatttatttatttattttgagacggagttttgccccaggctggagtgcgatggcacaatctcggctcactgcaacctctgcctcccgtattcaagcgattctcctgcttcagcctcccgcgtagctgggattacaggcatgcgccaccatgcccagctaattttgtatttttagtagagacagggtttcttccatgttggtcaggctggtctcgaactcccaacctcaggtgacccgcccgcctcggcctcccaaagtgctgggattacaggcatagccactgctcctggccccttttggcttttattcagagtgagatgggaacccttggagggttttgagtagatacagtgggactcctctttgaacagggcccactctagctgcacatggacaacatattgtgggggatgggggtagcagtgaggccagttttgaggccattgttgtcatctagctaaaaggtggctgggcagtggcacgcttatgagctgtggctgggttgaggccacagatactaaaggtggagccagcgggattttcgggctgaccagatgggggcataacagagaatgtcaagagtgaccccaagctgatatggtggctcacacctgtaatcccagcactaattccagcactttgggaggctgaggcgggcggatcagttgagcccaggagttcgagaccaggctgtgcaacatggcgaaatcctatctctactaaaaattagctgggtatggtggtacatgcctgtagtcccagctacttgggacggtgaggcaggagaatcacttgaacccaggaggtagaggttgcagtgagccgagattgcggcactgcactccagattgggtgacagagtgagaccctgtctcaaaaaaaaaaaggaaatcccccaccttgcagccatcagaagaatcaaataattgatttaggttaaaatcatctatgtatgctaaagctcttaggaccgcaagctcacatcaccatgcctggctaatttttttttttttggagacaaagtctcgctctgtcactcaggctggagtgcagtggtgtgatctcggctcactgcaacctctgcccccggttcaagcaattctcctgcctcagcctcctgagtagctgggactacaggcgtacgctgccacgactggctaatttttttgtattttagtagagacggggtttcaccgtgttgcccaggctgctatcgaactcctgagctcaggcaatccacccgcctcggcctcccaaagtgctaggattacaggcatgagccaccgtgcctggcaattttttatatttttagtagagatggggttttgtcatgttggccaggctggtcttgaactcctgacctcaactgattgagtgagattactggggaacaagacatctcaaagtgccatgccacagattacttattaattataggggaaaaagggactctacaaggtacagaggtccccagaggatccagcattacaggcaaatagcaagaacacacagctctgtggtgtccccgcctgaacgctcagtttgaaactttctgaggaccaccagggagatccacattgaggagctctgtgcgaggctgctggctcgaagacttccaaaatgtcaaggtcagccaggcacagtggctcatgcctataatcccagctctttgggaggtcaaggcgggcagattgcttgagcccaggagttcaagactagcctgggcaacatagtgagatctgtcactactaaaaataaaaaagttagttgggcgtagtggcatgcacctagtattcccagctactaaggaggctaaggcaggaggattacttgagtccgggaggttgaggttgcagtgagctgatcatgccatactactccagcctgggctacagagcgagaccctgtcttgaagaaaaaaaaaaagtcaatgtaataaaagaccacaaaaaacaaggctgggcacggtggctcacgcgtgtaatcccagcactttgggaggccgaggtgggcggatcacgaggtcaggagatcgagaccatcctggctaacacggtgaaaccccatctctaccaaaaatacaaaaaattagccgggcgtggtggcgggcgcctgtagtcccagctactcaggaggctgaggcaggagaatggtgtgaaccgaggaggcggagcttgcagtgagtcgagatcgcgccactgcactccagcctgggcgacagagcgagactccgtctcaaaaaaaaaaaaaaaaaaaaaaggataaacagacataaccaaatgccacgtgtgaaacttgattagttcctatatgaggaagtatatctgtaagaacgttatttagacacttgggaaaatgtcaatatagactatatatcaaggttcagtttcccaagtgcgacaattctatggggttttgtaggaaaactgtctttgttcttaggcagcagcatgatttctgccccaggggaggggggtgccgagaagagaatgggagagaagcagatgtggtagatatcaacttggggagtccagagggcatgtggatgtcatgtgctattcttataatttttggtaggtttgaaatattttaaaacaagtctgggcgcggtggctcacgcctgtaatcccagcactttgggaggccgaggcaggcggatcacctgagaccaggagttcaataccaacctggccaacatggtgaaactccgtctctactaaaaatacaaaaattagtcgggcgtggtggattgtgcctgtaatctcagctacttgggaggctgaggcaggagaatcacttgaacccgggaggcggaggatgcagtgagctgagatcgtgccattgcactccagcctgggcaacagagcgagaccccttctcagaaaaatttaaaaaaataaaaagaaaagaaatattttaaaacaaaacttgggaaaaataaagagagtgggaggagagaactaggaagtcgtgaatactgatacctgtttacagagtttagctgtgaagggaaagaaagaaagtcagccgtagctggagggtgaggtgaggcctctgtaaaatggagaaataaggctgggcgtggcagctcatgcctgtaatgccagcattttgggagaccaaggtgggcggatcacttgaggccaggagtttgagaccagcctgggcaacatggtgaaaccccgtctctacaaaaaatacaaacactcgcctatggtggtgtgtgcttctagtccaagctactcgggaggctgaggctcgaggatcacgtgagtctgggaggtcaaggctgcagtgagccatgattgtgccactgcactccctgtctcaaagaaagaaagaaaaaaaaagatggagaagccgggcgcggtggctcacgcctgtaatcccagcactttgggaggcccaggcgggctgttcacgaggtcaggaattcgagaccagtctggccaacacagtgaaaccctgtctctactaaaaatacaaaaaaaaaattagctgggcatggtggtgtgcgcctgtaatcccagctactggggaggctgaggcaggagaattgcgtgaaaccaggaggcggaggttgcagtgagccgagatcaagccattgcactccagtctgggtgacagaatgagactctgtctcagaaaaagaaaaaaaagaaaaagatggagaaataaccacgtgttggtgtggcagtgggggaaatgatccagcagaggggaaacttgatgatgtgggagaggggggactgctggggggcgtctcctcaccctggatcgagagatggagggcagttcattctaagtccctgcagcgctgggccggggtcgagggatgtggtggatctcgtggacctcctgaaggcttctgtccccaccccaggtatgtcaccacgccgactgccagcagctgcaccgccgggggcccctcaacctctgcgaggcctgtgacagcaagttccacagcaccatgcattatgatgggcatgtccgcttcgaccttcccccacaaggtgagcacaggcgggagccgcagctcggcccccagagctcctgtgtcagtgtttcagtaactgtcggaaacgtgctagggcgtcataaggacaagtcgactgtaaataatgaaacccgagtatgttacggttccttttgttccaaatgttttttagcaagagagaaagtccatgagcgtgccccttccagaggcaggcctttctctatctggtgctgtgctctcactggttctcacctcccccagctgcttttgcccctggcctgtggcccacacagagaaggcccctttctttctagttctgcctatcctcagggcaggggacttctggacaagtcctgcaagccaggctgtgggcctagcagaggcagtgtggagtgggggtggccaggtcaggaggcacttggagcaggaaataagaaattcctcttgctgagcagggacccagctcaggcccaccatcaactgcctatggaggagtggctcgcaggcacccaggcctggtgagaaatgccaacccccgagtcctttcccagctgatcagaggaacaaaaggattcttctggttgggcacggtggctcatgtctggaatacaaaaaatacaaaaattagccaggtgtggtggcacacacttgtggtcccagctgctcggaggctgaggtggaaggatcgcttgaaccccgacaatggaggctccagtgagccctgatcgtgccactgcactccagcctgagcgacagagcaagaccctgtcttaaaaaacaataaacaaacaaaagactctctcccactgccagggccccttgggaattcaggtgtggtcacagcatgggggaggggaggcctggaagaaagagccatggactttggtcccttcctgtaataacctcagaggcaaggcttccttatccttattttatagaagggtaaactgaggccacaggtgagtttgtttttggggtggagcttcaccatgggtgtcatcccagggcctttgtgtccttttgggtctgtggggatagacagcaatgactaaggccaggcaaggtggctcacacctgtaatcccagccctttgggaggctgaggtgggtggatcacttcaggtcaggagtttgagaacagcctggccaacatgttgaaaccctgtcattactaaaaatacaaaaaaatgagccgggtgtggtggcacacgcctgcaatcccagctactcaagaggctgaagcatgagaattgcttgaacccaggaggtggaggttgcagtgagccgagatcatgccactgcactccagcctgggtgacagagtgagaccctatctcaaaacaaaaacaaaaaacaatgactgagcccctctcctcacagaactgaagggcccttgctacctttaatctgggggttccagggtaacaggctgtggtccctctggaggcagccatgctgcaggctaaggaggggcgggggaggcacaaccctctcctgctttctcccaaggctctgtgctggcccggaacgtgtccacccggtcatgcccgccgcgcaccagccccgcagtggacttggaggaggaggaggaggagagctctgtggatggcaaagggtaggtgagggatgagtgggcagagagatacctggagggccccacggctgggtctcagatcagacattcaggaccagatgctctggcgccttcctcaagtaaggctgatgggcagacctcttcccacgcctgtggctgtcctgactccgggaagaggccacccagcctgggccagcctccagggtgcttgggatcctagcccacaccagaccaggtaccgttcgatgtgactcccgtgttggccaccagagggcgcacagccctatgcgggcctggccgggttgaatccacgcgggttacctgtcacctggggtgagccaagggcggggaggccacaggcccactcgccgcccacgctggcgagggccacccacacctccagcctctgccctcctcgcttccctgcagggaccggaagagcacaggcctgaaactctccaagaagaaagcaaggaggagacacacggatgtgaggagccccccagagccggcagatgcgggttccctacagcctgcgcccttccccgagcctgggccttcctccgggatgggggtggggaggtctgcatcccagggtgcagaggtctgggagatcgctggggttccctttcttgctggggttcccatccgagaccggagggtggggagggtggggaggagggttgggaaggagggtgggaaggagggtggggaggagggttgggaaggagggtgggaaggagggtggggaggagggcgggaatgagggcggtgaggagaagctcacagcccccacccccaccatcctcccaggacccaagcaaggaatgcttcactctgaaatttgacctgaatgtggacattgagacagagatcgtcccagccatgaagaagaagtcactggggtagggcttgatggggctcagggtggaagtgggactgggagtaggggtggccccatgttgcaggctccgggtctctgcaggtgtgacgtgtgtgtctgtgtggtggcccgtgagcgagcgcatccctgcgtgggcagacccgtgctggtgtgcacgccagtgtgagggagtgcggtggggtctgtgtacttgtgcattttaatcatgtatgcaggagccaggcctgcgtgtgggcaggcgtgtgacaggtctgccgtggtatgcagatgcgcctgtgtgagcacctctgcgggcaggtgtctgtggacctgcgtgtgatcccatgcgggcttcccttttccgttgggaaggtgggggcagctggggctgtgggtggggcgggggctcgtgggggcggggcccaagctgaagcgactggccgcctggttctaacacacatgcctcctgtcctgggggcagggaggtgctgctgcctgtatttgaaaggaagggcattgcgctgggcaaagtggacatctacctggaccagtccaacacacccctgtccctcaccttcgaggcctacaggttcgggggacactaccttcgtgtcaaaggtgagaagcagcctgggccaaatggggccgctgggactggcggagcctcctggagatgggcgcccttcccaggctcaggttcccattggtcgtgggcctgagcagcctcattaccatacaggtgtctctgctggatgctgctgggggaggggagggtgctggcagggcggggctgtcgggggagggcaggcaggccttggtgtggatcctccggggagagaggaccggggaccccctcctccaccagaccagggtactgaggatctctcgtggcccccacatgcagccccagccaagcctggagatgagggcaaggtggagcagggcatgaaggactccaagtccctgagtttgccgattctgcggccagctgggaccgggccccccgccctggagcgtgtggacgcccagagccgccgggagagcctggacatcttggtgaggaggagggggtgtgtcaggggagggggtgggaaggggcccaggctgggcccacagcccctcctcagaggcagtcaccctgggtctctcactgccccatcttggggttttaattgtcccttctggaaaatggggttggctgggagagtaggggaccctctctctctggatctagccatagcccaaggtgagggcttgtatctgagactcttctagtgccaggggtcagggaacctgtgtgtgcatgtgtgtgtgagagcacttgtacctggggctacagaccacccagagctgtgttccagagtgcatctgagtgtgtaactctgtgcttcatgcttgaagctgggggactgggggatgatagtctgggcgtatctgtgtctggaccttccagtctccagatatgtctgggtcccaggagaggggacaccccagggtagagatgcagagaccctcctccatcccaggctggcctgaggccctggaaacccgccctggggtggggccatgggggctggcagggggtcccggccctgaccacccttccctgaccaggcccctggccgccgccgcaagaacatgtcggagttcctgggggaggcgagcatccccgggcaggagccccccacgccctccagctgctctctgcccagcggcagcagtggcagcaccaacactggcgacagctggaagaaccgggcggccagtcgcttcagcggctttttcagctccggccccagcaccagcgcctttggccgggtatgtggccccatctgcccagggtcaggcagctggctggccatgacccctgaccctgaccagggtatctttccaggaggtagacaagatggagcagctggagggcaagctgcacacctacagcctcttcgggctgcccaggctgccccgggggctgcgcttcgaccatgactcctgggaggaggagtacgatgaagacgaggatgaggacaatgcctgcctgaggctggaggacagctggcgggagctcattgatgggcatgaggtgagtgcgggccacagtgctgctccctccttgtcccgaaaggaggacagccctcgggaggacccagtgatcagatgttccatgggacgccccaaagaggccactgttaccattagcccactttggagacactgaggctagatgaaaatggtgtgctgcttggctgttttaatggcagaggagggcccagatcttgggtgtcttaactgtgattactcatgtggtgtcaagggtgaccctgctcctcttgggacctccatgtccccattgggaaaatgagagttgcatgcaggttgcttatcctccccggccaccctaaggtgctccaggcctcgtgaatgacccatcctgccctccctctagaagctgacccggcggcagtgccaccagcaggaggcggtgtgggagctgctgcacacggaggcctcctacatcaggaaactgcgggtgatcatcaacgtgagtaggggctgcgctggtccccgtggccaccctgcccccctctttctgacagccctcagctgagtctgagcctttgcagaaggagcaggtgcctggcaatgaggtgggggcaggaaagtcagacaagggctgcgcccagggaggaggtgcctcctagaggaacctgggagggggcttcgggcaggtttgtcaggttcagctgaattagcacaggtgaggcctcattctttcactttcgttcagtggctgtttcccaacacttgctgtgtgctgggtgcccagcaggccacgccctggacgggacagagtgagctggcagtgtagggatttcggctcagggaggggagcacctaccctgggcttggagcttcctggagggaggaagcaccctcagaggtgaaatctggaggctaagccagggcagaggtggagaagggaattccaggcatggcttcaaagccagtctcccccgagcttccctccaggagggaccagggcagtgtgacctcgggagggctatgaggactgggtctttcctcagggtctggactacccaggtgcgaaggccaaagggtacagccttcttatccgtggctgctgtggggcctcctggaacggggaaggggaaggagtggcaggggagcctgaggctgggtggggccctagggctgagacagcctcccgaccccagtcacaccatcccctgatcccacagctgttcctgtgctgcctcctgaacctgcaagagtcagggctgctgtgtgaggtgcgctgggattcgggggcggcggcgggtgaggtaccaggaaggagggcgggacctggacctggggcggggctaacctggcggaggggcgtggccaaccgcacctcccgccgcgcccaggtggaggcggagcgcctgttcagcaacatcccggagatcgcgcagctgcaccgcaggctgtgggctagcgtgatggcgccggtgctggagaaggcgcggcgcacgcgagcgctgctacagcccggggacttcctcaaaggcttcaagatggtacgggcggggccgggcgcaggcgggggcactgaggcagggctggggcgccgaaaagcctccacggcccgatccggtctgcccagcatccccaacctcccccaggcccgtaaccgcacttgaccccttgtggccaagggtgaggaattacgaggcggtcgcccgggtttgagcctccacctgaccatctacccctgatccctggccacgggtggtcactttggctgaggctcagtttcctcatcaggaaacagggatcataagcttgctgcccccttggggtggtcgcccaagtgcagtaaggaagcgcttgcgcagcgcctggcgcgggccggcccgcagggagcgcgcggtaaccggcgccgtggttgttctgccccgggccagttcggctcgctcttcaagccctacatccgctactgcatggaggaggagggctgcatggagtacatgcgcggcctgctgcgcgacaacgacctcttccgggcctacatcacggtgagggcgcgcgtgccgtgggcgggggcgcaggaggacgggaccctggacggggccgggtggggcggggcctgccctgagcccgcccccactcccccaccgcagtgggcggagaagcacccacagtgccagaggctgaagctgagcgacatgctggccaaaccccaccagcggctcaccaagtacccgctgctgctcaagtcggtgctgaggaagaccgaggagccgcgcgccaaggaggccgtcgtcgccatggtaaccctgatggccagcgggagccgtcccccctgcgcggctctctgctccgtcatgaccctggacctgaagctccctcacctgcccctagatcggctccgtggagcgcttcatccaccacgtgaacgcgtgcatgcggcagcggcaggagcggcagcggctggcggccgtggtgagccgcatcgacgcctacgaggtggtggaaagcagcagcgacgaagtggacaaggtgggcgtgtgtgtctgcgggggttgccggctgggagagaggaaggcccagctggcaggcaggggctgtgctgggcatctcactgaggatgcctagctgagatgggagtcagtctctggcctcccctacgttcacgccatccgtccccagctcctgaaggaatttctgcacctggacttgacagcgcccatccctggcgcctccccggaggagacgcggcagctgctgctggaggggagcctgaggatgaaggaggggaaggacagcaaggtgattccagggccaccccacccctgtgccctgcccttcctagggacctcctgggccccagtcactggttctcagctctgcagtcccttcggtggttactcaagaaccagtgaccttgtcatagtgaatgacagttctctgcctgccattcacaaatccagcagtagggtcctagcccttgaaggcaccagttgtgcccatttgttggtgccacatgggttcctggtgggagggcagccatattccacaagtgggccaggaaccccagagccttgctactgtgccatggccccttcaggcatggggcaggctgagagcttgcacacggtgacttcaaagtcaccagtcttctttttaatgtaaacttgtattgagataagtcatcaacgtacatctcagtgaaagagaatcatcttcctcttcattttaattttacttgaaggttcatggtgggaggagtgtttgacaaaaaccgagtgctcccaggggaggctggtgccacagtccctggccctgaccctgctggcctctctggccaccccccctcctgccactgcagatggatgtgtactgcttcctcttcacggatctgctgttggtgaccaaagcagtgaagaaggcagagaggaccagggtcatcaggccacccctgctcgtggacaagattgtgtgccgggagctacgggaccctggtaaggagccctggtcccctgttcctggtcaggggctgtgatgggtgggggccatcgtctctgctgacactgacttgggccttccctaaccagggtccttcctccttatctacctgaatgagtttcacagtgctgtaggggcctacacgttccaggccagtggccaggccttgtgccgtggctgggtggacaccatttacaatgcccaggtgagtgcagagtagtgagtgggtgggcaaggcagattagggagatgctggtcacaacccattctgtcccatgtaccccaaccttgcctgcagaaccagctgcaacagctgcgtgcacaggagcccccaggcagtcagcagcccctgcagagcctggaagaggaggaggatgagcaggaggaggaagaggaggaggaggaggaggaggaggaaggcgaggacagtggcacttcagctgccagctcccctaccatcatgcggaaaagcagcggcagccccgactctcagcactggtacgtctgctcatgaccacccagcaggtcaaaccaggacaagtactctagcccaggactcctgaaggcccagccacgctcccttcctcccaatggcctcttgtcatgaacactgtgggagcggggctctgtctcccccagagtccgggtggggagggcagacacctttccatgtgctgccagccctgatccattcgtggtagctgcctggggtgctgtgctgaggatccttagggcagatccagccttggcagggaagagtgctgggctcgctactgaggtctgttgtgggcactggagctggaagatctgccacacctgccacatgctgccatctctgagcctccagccccaggagggcagagggtataaaccaccgtgcattgcccagcctggggctgcctcaggccatctaggtttcatggcctgggctgactctgctcctggccccacagtgcctcagatggctccacggagaccctggccatggttgtggtagagcctggggacacgctgtcctcccccgagttcgacagcggtcctttcagctcccagtctgatgagacctctctcagcaccactgcctcatctgccacgcccaccagtgagctgctgcccctgggtccggtggacggccgctcctgctccatggactctgcctacggcaccctctccccaacctccttacaagactttgtggccccaggcccaatggcagagctagtgcctcgggccccagagtccccacgagttccttcccctccaccctcgccccgtctccgccgccgcacccctgtccagctgttgagctgcccgccccacctgctcaagtctaagtccgaggccagcctcctccagctgctggcaggggctggcacccatgggacaccctctgcccccagccgcagcctgtcagagctctgcctggctgttccagccccaggtattaggactcagggctcccctcaggaagctgggcccagctgggattgccgaggggcccctagccctggcagcggtcctgggctagtcggctgcctggccggggaacctgcaggctcccacaggaagaggtgtggagacctgccctcgggggcctctcccagggtccagcctgagcccccaccaggggtctctgcccagcacaggaagctgaccctggcccagctctaccgaatcaggaccaccctgctgcttaactccacgctcactgcctcgtgagtggcctggactggggtagggcaggtggctcagggcactggcatgggggcccactcatgcctgggagcatcgcatttggggagggtcatggcggagggagcctgaaccctgcccagtgtctgggcgcagggggctgtggtgggcagcagtgaaggggcctgaggagtgccgtggggaagagagggtgaccagagccactctgaatggcgtcagccaaagaaggactctgtcccctccccaccctgtagggaggtctgagcagagggaggcccccaagagtgccattgaccaagagacagcagacagcctgcctcctggggcgtgccggcacctgcttcagctactgcctcctgtatgcatgagccggatgctgggcaggatccctgcctacgcccgggcccgatttgcgctttgccggactggatggagtggaggaggcccaggccacagtaccaccccacctgcccaggcagcccctcgtcacctactccccgaagttaccagctcagctcgagtcttcagggctgggctcctaggctgcccatcctacttctaccctcactggcctccagtgggattcactcctgccctgcccccaccttcccagtcccacaggccacccctggcttgggctgggttctgtgaagttacgtatttattgagcttttggttcttttataaagacttgtctagactccactgggaagagtcctttgctttggggcccagtgactcggggcacttgagttcagggcggcctccttgtgttcctgtgctcctccacttgccacggatgggccacggatggagcttgccatgggaagcactgggaagtaatggggtgtggggtgccaccagaccaacacccccagacttccccaccttcagccaccatcagagcctctccccaggtgccccccggggattcagggctgaatctgcccagttcccacactcaggccagccctcttgggaaggtgggtcctccatgggggtcccttcaggaactttttttttttttttaatacagagtctcactctgtcacctaggttggagtgcagtggtgtgatgtcggctcactgcaacctctgcctcccgggttcaaacgattctcctgccccagccactctagtagctggaactgcaggtgtgcaccaccacgccgggctagtttttgtattttaagtagagacggcatttcaccatattggtcaggctggtctcgaactcctgaccccaagtgttccgcccgcctctgcctcccatagtgctagaattacaggcctgagctactgcgcttggccccttgcggtacttttggcccaacctcctccatggctggggacgcggaggccgagagagaagtcacttgccctggctctaccttgaagtggttctcagggttggggcgagagtcggggtggggaccgagatgcagctctatcctgtgcccctggtcgcagcaggcagcccagcgcttcgcgtgttctacttggcctgtccgctgccgcctaatgagctcaggtctaggccgagcagagggggcacctggtcggactcggttgggctcgggcggccccgcctccccccgcccgccaggcgggcccttctcgacggcgcggggcgggccctgcgggcgcggggctgaaggcggaaccacgacgggcagagagcacggagccgggaagcccctgggcgcccgtcggagggctatggagcagcggccgc

SEQ ID NO: 13397 - DNA, 4698 bp, Homo sapiens
agcattcaaggagctccccaggagaaagagcaagttctgaggagccctctgagcccggcattggtgttgaggagggagtcagagaagagaggggcccggggccgcgcagaggcgcagaggtatgtcaccacgccgactgccagcagctgcaccgccgggggcccctcaacctctgcgaggcctgtgacagcaagttccacagcaccatgcattatgatgggcatgtccgcttcgaccttcccccacaaggctctgtgctggcccggaacgtgtccacccggtcatgcccgccgcgcaccagccccgcagtggacttggaggaggaggaggaggagagctctgtggatggcaaaggggaccggaagagcacaggcctgaaactctccaagaagaaagcaaggaggagacacacggatgacccaagcaaggaatgcttcactctgaaatttgacctgaatgtggacattgagacagagatcgtcccagccatgaagaagaagtcactgggggaggtgctgctgcctgtatttgaaaggaagggcattgcgctgggcaaagtggacatctacctggaccagtccaacacacccctgtccctcaccttcgaggcctacaggttcgggggacactaccttcgtgtcaaagccccagccaagcctggagatgagggcaaggtggagcagggcatgaaggactccaagtccctgagtttgccgattctgcggccagctgggaccgggccccccgccctggagcgtgtggacgcccagagccgccgggagagcctggacatcttggcccctggccgccgccgcaagaacatgtcggagttcctgggggaggcgagcatccccgggcaggagccccccacgccctccagctgctctctgcccagcggcagcagtggcagcaccaacactggcgacagctggaagaaccgggcggccagtcgcttcagcggctttttcagctccggccccagcaccagcgcctttggccgggaggtagacaagatggagcagctggagggcaagctgcacacctacagcctcttcgggctgcccaggctgccccgggggctgcgcttcgaccatgactcctgggaggaggagtacgatgaagacgaggatgaggacaatgcctgcctgaggctggaggacagctggcgggagctcattgatgggcatgagaagctgacccggcggcagtgccaccagcaggaggcggtgtgggagctgctgcacacggaggcctcctacatcaggaaactgcgggtgatcatcaacctgttcctgtgctgcctcctgaacctgcaagagtcagggctgctgtgtgaggtggaggcggagcgcctgttcagcaacatcccggagatcgcgcagctgcaccgcaggctgtgggctagcgtgatggcgccggtgctggagaaggcgcggcgcacgcgagcgctgctacagcccggggacttcctcaaaggcttcaagatgttcggctcgctcttcaagccctacatccgctactgcatggaggaggagggctgcatggagtacatgcgcggcctgctgcgcgacaacgacctcttccgggcctacatcacgtgggcggagaagcacccacagtgccagaggctgaagctgagcgacatgctggccaaaccccaccagcggctcaccaagtacccgctgctgctcaagtcggtgctgaggaagaccgaggagccgcgcgccaaggaggccgtcgtcgccatgatcggctccgtggagcgcttcatccaccacgtgaacgcgtgcatgcggcagcggcaggagcggcagcggctggcggccgtggtgagccgcatcgacgcctacgaggtggtggaaagcagcagcgacgaagtggacaagctcctgaaggaatttctgcacctggacttgacagcgcccatccctggcgcctccccggaggagacgcggcagctgctgctggaggggagcctgaggatgaaggaggggaaggacagcaagatggatgtgtactgcttcctcttcacggatctgctgttggtgaccaaagcagtgaagaaggcagagaggaccagggtcatcaggccacccctgctcgtggacaagattgtgtgccgggagctacgggaccctgggtccttcctccttatctacctgaatgagtttcacagtgctgtaggggcctacacgttccaggccagtggccaggccttgtgccgtggctgggtggacaccatttacaatgcccagaaccagctgcaacagctgcgtgcacaggagcccccaggcagtcagcagcccctgcagagcctggaagaggaggaggatgagcaggaggaggaagaggaggaggaggaggaggaggaggaaggcgaggacagtggcacttcagctgccagctcccctaccatcatgcggaaaagcagcggcagccccgactctcagcactgtgcctcagatggctccacggagaccctggccatggttgtggtagagcctggggacacgctgtcctcccccgagttcgacagcggtcctttcagctcccagtctgatgagacctctctcagcaccactgcctcatctgccacgcccaccagtgagctgctgcccctgggtccggtggacggccgctcctgctccatggactctgcctacggcaccctctccccaacctccttacaagactttgtggccccaggcccaatggcagagctagtgcctcgggccccagagtccccacgagttccttcccctccaccctcgccccgtctccgccgccgcacccctgtccagctgttgagctgcccgccccacctgctcaagtctaagtccgaggccagcctcctccagctgctggcaggggctggcacccatgggacaccctctgcccccagccgcagcctgtcagagctctgcctggctgttccagccccaggtattaggactcagggctcccctcaggaagctgggcccagctgggattgccgaggggcccctagccctggcagcggtcctgggctagtcggctgcctggccggggaacctgcaggctcccacaggaagaggtgtggagacctgccctcgggggcctctcccagggtccagcctgagcccccaccaggggtctctgcccagcacaggaagctgaccctggcccagctctaccgaatcaggaccaccctgctgcttaactccacgctcactgcctcggaggtctgagcagagggaggcccccaagagtgccattgaccaagagacagcagacagcctgcctcctggggcgtgccggcacctgcttcagctactgcctcctgtatgcatgagccggatgctgggcaggatccctgcctacgcccgggcccgatttgcgctttgccggactggatggagtggaggaggcccaggccacagtaccaccccacctgcccaggcagcccctcgtcacctactccccgaagttaccagctcagctcgagtcttcagggctgggctcctaggctgcccatcctacttctaccctcactggcctccagtgggattcactcctgccctgcccccaccttcccagtcccacaggccacccctggcttgggctgggttctgtgaagttacgtatttattgagcttttggttcttttataaagacttgtctagactccactgggaagagtcctttgctttggggcccagtgactcggggcacttgagttcagggcggcctccttgtgttcctgtgctcctccacttgccacggatgggccacggatggagcttgccatgggaagcactgggaagtaatggggtgtggggtgccaccagaccaacacccccagacttccccaccttcagccaccatcagagcctctccccaggtgccccccggggattcagggctgaatctgcccagttcccacactcaggccagccctcttgggaaggtgggtcctccatgggggtcccttcaggaactttttttttttttttaatacagagtctcactctgtcacctaggttggagtgcagtggtgtgatgtcggctcactgcaacctctgcctcccgggttcaaacgattctcctgccccagccactctagtagctggaactgcaggtgtgcaccaccacgccgggctagtttttgtattttaagtagagacggcatttcaccatattggtcaggctggtctcgaactcctgaccccaagtgttccgcccgcctctgcctcccatagtgctagaattacaggcctgagctactgcgcttggccccttgcggtacttttggcccaacctcctccatggctggggacgcggaggccgagagagaagtcacttgccctggctctaccttgaagtggttctcagggttggggcgagagtcggggtggggaccgagatgcagctctatcctgtgcccctggtcgcagcaggcagcccagcgcttcgcgtgttctacttggcctgtccgctgccgcctaatgagctcaggtctaggccgagcagagggggcacctggtcggactcggttgggctcgggcggccccgcctccccccgcccgccaggcgggcccttctcgacggcgcggggcgggccctgcgggcgcggggctgaaggcggaaccacgacgggcagagagcacggagccgggaagcccctgggcgcccgtcggagggctatggagcagcggccgc

SEQ ID NO: 13398 - DNA, 3697 bp, Homo sapiens
cccagtccccggcgtccccggcgcccccgcccgccgcccgccccccgcgcggcacggggcctgctccatggacgaccagagccccgctgaaaagaagggactgcgctgtcagaaccccgcctgcatggacaaggggcgggcggccaaggtatgtcaccacgccgactgccagcagctgcaccgccgggggcccctcaacctctgcgaggcctgtgacagcaagttccacagcaccatgcattatgatgggcatgtccgcttcgaccttcccccacaaggctctgtgctggcccggaacgtgtccacccggtcatgcccgccgcgcaccagccccgcagtggacttggaggaggaggaggaggagagctctgtggatggcaaaggggaccggaagagcacaggcctgaaactctccaagaagaaagcaaggaggagacacacggatgacccaagcaaggaatgcttcactctgaaatttgacctgaatgtggacattgagacagagatcgtcccagccatgaagaagaagtcactgggggaggtgctgctgcctgtatttgaaaggaagggcattgcgctgggcaaagtggacatctacctggaccagtccaacacacccctgtccctcaccttcgaggcctacaggttcgggggacactaccttcgtgtcaaagccccagccaagcctggagatgagggcaaggtggagcagggcatgaaggactccaagtccctgagtttgccgattctgcggccagctgggaccgggccccccgccctggagcgtgtggacgcccagagccgccgggagagcctggacatcttggcccctggccgccgccgcaagaacatgtcggagttcctgggggaggcgagcatccccgggcaggagccccccacgccctccagctgctctctgcccagcggcagcagtggcagcaccaacactggcgacagctggaagaaccgggcggccagtcgcttcagcggctttttcagctccggccccagcaccagcgcctttggccgggaggtagacaagatggagcagctggagggcaagctgcacacctacagcctcttcgggctgcccaggctgccccgggggctgcgcttcgaccatgactcctgggaggaggagtacgatgaagacgaggatgaggacaatgcctgcctgaggctggaggacagctggcgggagctcattgatgggcatgagaagctgacccggcggcagtgccaccagcaggaggcggtgtgggagctgctgcacacggaggcctcctacatcaggaaactgcgggtgatcatcaacctgttcctgtgctgcctcctgaacctgcaagagtcagggctgctgtgtgaggtggaggcggagcgcctgttcagcaacatcccggagatcgcgcagctgcaccgcaggctgtgggctagcgtgatggcgccggtgctggagaaggcgcggcgcacgcgagcgctgctacagcccggggacttcctcaaaggcttcaagatgttcggctcgctcttcaagccctacatccgctactgcatggaggaggagggctgcatggagtacatgcgcggcctgctgcgcgacaacgacctcttccgggcctacatcacgtgggcggagaagcacccacagtgccagaggctgaagctgagcgacatgctggccaaaccccaccagcggctcaccaagtacccgctgctgctcaagtcggtgctgaggaagaccgaggagccgcgcgccaaggaggccgtcgtcgccatgatcggctccgtggagcgcttcatccaccacgtgaacgcgtgcatgcggcagcggcaggagcggcagcggctggcggccgtggtgagccgcatcgacgcctacgaggtggtggaaagcagcagcgacgaagtggacaagctcctgaaggaatttctgcacctggacttgacagcgcccatccctggcgcctccccggaggagacgcggcagctgctgctggaggggagcctgaggatgaaggaggggaaggacagcaagatggatgtgtactgcttcctcttcacggatctgctgttggtgaccaaagcagtgaagaaggcagagaggaccagggtcatcaggccacccctgctcgtggacaagattgtgtgccgggagctacgggaccctgggtccttcctccttatctacctgaatgagtttcacagtgctgtaggggcctacacgttccaggccagtggccaggccttgtgccgtggctgggtggacaccatttacaatgcccagaaccagctgcaacagctgcgtgcacaggagcccccaggcagtcagcagcccctgcagagcctggaagaggaggaggatgagcaggaggaggaagaggaggaggaggaggaggaggaggaaggcgaggacagtggcacttcagctgccagctcccctaccatcatgcggaaaagcagcggcagccccgactctcagcactgtgcctcagatggctccacggagaccctggccatggttgtggtagagcctggggacacgctgtcctcccccgagttcgacagcggtcctttcagctcccagtctgatgagacctctctcagcaccactgcctcatctgccacgcccaccagtgagctgctgcccctgggtccggtggacggccgctcctgctccatggactctgcctacggcaccctctccccaacctccttacaagactttgtggccccaggcccaatggcagagctagtgcctcgggccccagagtccccacgagttccttcccctccaccctcgccccgtctccgccgccgcacccctgtccagctgttgagctgcccgccccacctgctcaagtctaagtccgaggccagcctcctccagctgctggcaggggctggcacccatgggacaccctctgcccccagccgcagcctgtcagagctctgcctggctgttccagccccaggtattaggactcagggctcccctcaggaagctgggcccagctgggattgccgaggggcccctagccctggcagcggtcctgggctagtcggctgcctggccggggaacctgcaggctcccacaggaagaggtgtggagacctgccctcgggggcctctcccagggtccagcctgagcccccaccaggggtctctgcccagcacaggaagctgaccctggcccagctctaccgaatcaggaccaccctgctgcttaactccacgctcactgcctcggaggtctgagcagagggaggcccccaagagtgccattgaccaagagacagcagacagcctgcctcctggggcgtgccggcacctgcttcagctactgcctcctgtatgcatgagccggatgctgggcaggatccctgcctacgcccgggcccgatttgcgctttgccggactggatggagtggaggaggcccaggccacagtaccaccccacctgcccaggcagcccctcgtcacctactccccgaagttaccagctcagctcgagtcttcagggctgggctcctaggctgcccatcctacttctaccctcactggcctccagtgggattcactcctgccctgcccccaccttcccagtcccacaggccacccctggcttgggctgggttctgtgaagttacgtatttattgagcttttggttcttttataaagacttgtctagactcca

SEQ ID NO: 13399 - DNA, 4462 bp, Homo sapiens
aggctgtgggctagcgtgatggcgccggtgctggagaaggcgcggcgcacgcgagcgctgctacagcccggggacttcctcaaaggcttcaagatggtacgggcggggccgggcgcaggcgggggcactgaggcagggctggggcgccgaaaagcctccacggcccgatccggtctgcccagcatccccaacctcccccaggcccgtaaccgcacttgaccccttgtggccaagggtgaggaattacgaggcggtcgcccgggtttgagcctccacctgaccatctacccctgatccctggccacgggtggtcactttggctgaggctcagtttcctcatcaggaaacagggatcataagcttgctgcccccttggggtggtcgcccaagtgcagtaaggaagcgcttgcgcagcgcctggcgcgggccggcccgcagggagcgcgcggtaaccggcgccgtggttgttctgccccgggccagttcggctcgctcttcaagccctacatccgctactgcatggaggaggagggctgcatggagtacatgcgcggcctgctgcgcgacaacgacctcttccgggcctacatcacggtgagggcgcgcgtgccgtgggcgggggcgcaggaggacgggaccctggacggggccgggtggggcggggcctgccctgagcccgcccccactcccccaccgcagtgggcggagaagcacccacagtgccagaggctgaagctgagcgacatgctggccaaaccccaccagcggctcaccaagtacccgctgctgctcaagtcggtgctgaggaagaccgaggagccgcgcgccaaggaggccgtcgtcgccatggtaaccctgatggccagcgggagccgtcccccctgcgcggctctctgctccgtcatgaccctggacctgaagctccctcacctgcccctagatcggctccgtggagcgcttcatccaccacgtgaacgcgtgcatgcggcagcggcaggagcggcagcggctggcggccgtggtgagccgcatcgacgcctacgaggtggtggaaagcagcagcgacgaagtggacaaggtgggcgtgtgtgtctgcgggggttgccggctgggagagaggaaggcccagctggcaggcaggggctgtgctgggcatctcactgaggatgcctagctgagatgggagtcagtctctggcctcccctacgttcacgccatccgtccccagctcctgaaggaatttctgcacctggacttgacagcgcccatccctggcgcctccccggaggagacgcggcagctgctgctggaggggagcctgaggatgaaggaggggaaggacagcaaggtgattccagggccaccccacccctgtgccctgcccttcctagggacctcctgggccccagtcactggttctcagctctgcagtcccttcggtggttactcaagaaccagtgaccttgtcatagtgaatgacagttctctgcctgccattcacaaatccagcagtagggtcctagcccttgaaggcaccagttgtgcccatttgttggtgccacatgggttcctggtgggagggcagccatattccacaagtgggccaggaaccccagagccttgctactgtgccatggccccttcaggcatggggcaggctgagagcttgcacacggtgacttcaaagtcaccagtcttctttttaatgtaaacttgtattgagataagtcatcaacgtacatctcagtgaaagagaatcatcttcctcttcattttaattttacttgaaggttcatggtgggaggagtgtttgacaaaaaccgagtgctcccaggggaggctggtgccacagtccctggccctgaccctgctggcctctctggccaccccccctcctgccactgcagatggatgtgtactgcttcctcttcacggatctgctgttggtgaccaaagcagtgaagaaggcagagaggaccagggtcatcaggccacccctgctcgtggacaagattgtgtgccgggagctacgggaccctggtaaggagccctggtcccctgttcctggtcaggggctgtgatgggtgggggccatcgtctctgctgacactgacttgggccttccctaaccagggtccttcctccttatctacctgaatgagtttcacagtgctgtaggggcctacacgttccaggccagtggccaggccttgtgccgtggctgggtggacaccatttacaatgcccaggtgagtgcagagtagtgagtgggtgggcaaggcagattagggagatgctggtcacaacccattctgtcccatgtaccccaaccttgcctgcagaaccagctgcaacagctgcgtgcacaggagcccccaggcagtcagcagcccctgcagagcctggaagaggaggaggatgagcaggaggaggaagaggaggaggaggaggaggaggaggaaggcgaggacagtggcacttcagctgccagctcccctaccatcatgcggaaaagcagcggcagccccgactctcagcactggtacgtctgctcatgaccacccagcaggtcaaaccaggacaagtactctagcccaggactcctgaaggcccagccacgctcccttcctcccaatggcctcttgtcatgaacactgtgggagcggggctctgtctcccccagagtccgggtggggagggcagacacctttccatgtgctgccagccctgatccattcgtggtagctgcctggggtgctgtgctgaggatccttagggcagatccagccttggcagggaagagtgctgggctcgctactgaggtctgttgtgggcactggagctggaagatctgccacacctgccacatgctgccatctctgagcctccagccccaggagggcagagggtataaaccaccgtgcattgcccagcctggggctgcctcaggccatctaggtttcatggcctgggctgactctgctcctggccccacagtgcctcagatggctccacggagaccctggccatggttgtggtagagcctggggacacgctgtcctcccccgagttcgacagcggtcctttcagctcccagtctgatgagacctctctcagcaccactgcctcatctgccacgcccaccagtgagctgctgcccctgggtccggtggacggccgctcctgctccatggactctgcctacggcaccctctccccaacctccttacaagactttgtggccccaggcccaatggcagagctagtgcctcgggccccagagtccccacgagttccttcccctccaccctcgccccgtctccgccgccgcacccctgtccagctgttgagctgcccgccccacctgctcaagtctaagtccgaggccagcctcctccagctgctggcaggggctggcacccatgggacaccctctgcccccagccgcagcctgtcagagctctgcctggctgttccagccccaggtattaggactcagggctcccctcaggaagctgggcccagctgggattgccgaggggcccctagccctggcagcggtcctgggctagtcggctgcctggccggggaacctgcaggctcccacaggaagaggtgtggagacctgccctcgggggcctctcccagggtccagcctgagcccccaccaggggtctctgcccagcacaggaagctgaccctggcccagctctaccgaatcaggaccaccctgctgcttaactccacgctcactgcctcgtgagtggcctggactggggtagggcaggtggctcagggcactggcatgggggcccactcatgcctgggagcatcgcatttggggagggtcatggcggagggagcctgaaccctgcccagtgtctgggcgcagggggctgtggtgggcagcagtgaaggggcctgaggagtgccgtggggaagagagggtgaccagagccactctgaatggcgtcagccaaagaaggactctgtcccctccccaccctgtagggaggtctgagcagagggaggcccccaagagtgccattgaccaagagacagcagacagcctgcctcctggggcgtgccggcacctgcttcagctactgcctcctgtatgcatgagccggatgctgggcaggatccctgcctacgcccgggcccgatttgcgctttgccggactggatggagtggaggaggcccaggccacagtaccaccccacctgcccaggcagcccctcgtcacctactccccgaagttaccagctcagctcgagtcttcagggctgggctcctaggctgcccatcctacttctaccctcactggcctccagtgggattcactcctgccctgcccccaccttcccagtcccacaggccacccctggcttgggctgggttctgtgaagttacgtatttattgagcttttggttcttttataaagacttgtctagactcca

SEQ ID NO: 13400 - DNA, 2664 bp, Homo sapiens
aggctgtgggctagcgtgatggcgccggtgctggagaaggcgcggcgcacgcgagcgctgctacagcccggggacttcctcaaaggcttcaagatggtacgggcggggccgggcgcaggcgggggcactgaggcagggctggggcgccgaaaagcctccacggcccgatccggtctgcccagcatccccaacctcccccaggcccgtaaccgcacttgaccccttgtggccaagggtgaggaattacgaggcggtcgcccgggtttgagcctccacctgaccatctacccctgatccctggccacgggtggtcactttggctgaggctcagtttcctcatcaggaaacagggatcataagcttgctgcccccttggggtggtcgcccaagtgcagtaaggaagcgcttgcgcagcgcctggcgcgggccggcccgcagggagcgcgcggtaaccggcgccgtggttgttctgccccgggccagttcggctcgctcttcaagccctacatccgctactgcatggaggaggagggctgcatggagtacatgcgcggcctgctgcgcgacaacgacctcttccgggcctacatcacgtgggcggagaagcacccacagtgccagaggctgaagctgagcgacatgctggccaaaccccaccagcggctcaccaagtacccgctgctgctcaagtcggtgctgaggaagaccgaggagccgcgcgccaaggaggccgtcgtcgccatgatcggctccgtggagcgcttcatccaccacgtgaacgcgtgcatgcggcagcggcaggagcggcagcggctggcggccgtggtgagccgcatcgacgcctacgaggtggtggaaagcagcagcgacgaagtggacaagctcctgaaggaatttctgcacctggacttgacagcgcccatccctggcgcctccccggaggagacgcggcagctgctgctggaggggagcctgaggatgaaggaggggaaggacagcaagatggatgtgtactgcttcctcttcacggatctgctgttggtgaccaaagcagtgaagaaggcagagaggaccagggtcatcaggccacccctgctcgtggacaagattgtgtgccgggagctacgggaccctgggtccttcctccttatctacctgaatgagtttcacagtgctgtaggggcctacacgttccaggccagtggccaggccttgtgccgtggctgggtggacaccatttacaatgcccagaaccagctgcaacagctgcgtgcacaggagcccccaggcagtcagcagcccctgcagagcctggaagaggaggaggatgagcaggaggaggaagaggaggaggaggaggaggaggaggaaggcgaggacagtggcacttcagctgccagctcccctaccatcatgcggaaaagcagcggcagccccgactctcagcactgtgcctcagatggctccacggagaccctggccatggttgtggtagagcctggggacacgctgtcctcccccgagttcgacagcggtcctttcagctcccagtctgatgagacctctctcagcaccactgcctcatctgccacgcccaccagtgagctgctgcccctgggtccggtggacggccgctcctgctccatggactctgcctacggcaccctctccccaacctccttacaagactttgtggccccaggcccaatggcagagctagtgcctcgggccccagagtccccacgagttccttcccctccaccctcgccccgtctccgccgccgcacccctgtccagctgttgagctgcccgccccacctgctcaagtctaagtccgaggccagcctcctccagctgctggcaggggctggcacccatgggacaccctctgcccccagccgcagcctgtcagagctctgcctggctgttccagccccaggtattaggactcagggctcccctcaggaagctgggcccagctgggattgccgaggggcccctagccctggcagcggtcctgggctagtcggctgcctggccggggaacctgcaggctcccacaggaagaggtgtggagacctgccctcgggggcctctcccagggtccagcctgagcccccaccaggggtctctgcccagcacaggaagctgaccctggcccagctctaccgaatcaggaccaccctgctgcttaactccacgctcactgcctcggaggtctgagcagagggaggcccccaagagtgccattgaccaagagacagcagacagcctgcctcctggggcgtgccggcacctgcttcagctactgcctcctgtatgcatgagccggatgctgggcaggatccctgcctacgcccgggcccgatttgcgctttgccggactggatggagtggaggaggcccaggccacagtaccaccccacctgcccaggcagcccctcgtcacctactccccgaagttaccagctcagctcgagtcttcagggctgggctcctaggctgcccatcctacttctaccctcactggcctccagtgggattcactcctgccctgcccccaccttcccagtcccacaggccacccctggcttgggctgggttctgtgaagttacgtatttattgagcttttggttcttttataaagacttgtctagactcca

SEQ ID NO: 13401 - DNA, 11497 bp, Homo sapiens
gcaagttccacagcaccatgcattatgatgggcatgtccgcttcgaccttcccccacaaggtgagcacaggcgggagccgcagctcggcccccagagctcctgtgtcagtgtttcagtaactgtcggaaacgtgctagggcgtcataaggacaagtcgactgtaaataatgaaacccgagtatgttacggttccttttgttccaaatgttttttagcaagagagaaagtccatgagcgtgccccttccagaggcaggcctttctctatctggtgctgtgctctcactggttctcacctcccccagctgcttttgcccctggcctgtggcccacacagagaaggcccctttctttctagttctgcctatcctcagggcaggggacttctggacaagtcctgcaagccaggctgtgggcctagcagaggcagtgtggagtgggggtggccaggtcaggaggcacttggagcaggaaataagaaattcctcttgctgagcagggacccagctcaggcccaccatcaactgcctatggaggagtggctcgcaggcacccaggcctggtgagaaatgccaacccccgagtcctttcccagctgatcagaggaacaaaaggattcttctggttgggcacggtggctcatgtctggaatacaaaaaatacaaaaattagccaggtgtggtggcacacacttgtggtcccagctgctcggaggctgaggtggaaggatcgcttgaaccccgacaatggaggctccagtgagccctgatcgtgccactgcactccagcctgagcgacagagcaagaccctgtcttaaaaaacaataaacaaacaaaagactctctcccactgccagggccccttgggaattcaggtgtggtcacagcatgggggaggggaggcctggaagaaagagccatggactttggtcccttcctgtaataacctcagaggcaaggcttccttatccttattttatagaagggtaaactgaggccacaggtgagtttgtttttggggtggagcttcaccatgggtgtcatcccagggcctttgtgtccttttgggtctgtggggatagacagcaatgactaaggccaggcaaggtggctcacacctgtaatcccagccctttgggaggctgaggtgggtggatcacttcaggtcaggagtttgagaacagcctggccaacatgttgaaaccctgtcattactaaaaatacaaaaaaatgagccgggtgtggtggcacacgcctgcaatcccagctactcaagaggctgaagcatgagaattgcttgaacccaggaggtggaggttgcagtgagccgagatcatgccactgcactccagcctgggtgacagagtgagaccctatctcaaaacaaaaacaaaaaacaatgactgagcccctctcctcacagaactgaagggcccttgctacctttaatctgggggttccagggtaacaggctgtggtccctctggaggcagccatgctgcaggctaaggaggggcgggggaggcacaaccctctcctgctttctcccaaggctctgtgctggcccggaacgtgtccacccggtcatgcccgccgcgcaccagccccgcagtggacttggaggaggaggaggaggagagctctgtggatggcaaagggtaggtgagggatgagtgggcagagagatacctggagggccccacggctgggtctcagatcagacattcaggaccagatgctctggcgccttcctcaagtaaggctgatgggcagacctcttcccacgcctgtggctgtcctgactccgggaagaggccacccagcctgggccagcctccagggtgcttgggatcctagcccacaccagaccaggtaccgttcgatgtgactcccgtgttggccaccagagggcgcacagccctatgcgggcctggccgggttgaatccacgcgggttacctgtcacctggggtgagccaagggcggggaggccacaggcccactcgccgcccacgctggcgagggccacccacacctccagcctctgccctcctcgcttccctgcagggaccggaagagcacaggcctgaaactctccaagaagaaagcaaggaggagacacacggatgtgaggagccccccagagccggcagatgcgggttccctacagcctgcgcccttccccgagcctgggccttcctccgggatgggggtggggaggtctgcatcccagggtgcagaggtctgggagatcgctggggttccctttcttgctggggttcccatccgagaccggagggtggggagggtggggaggagggttgggaaggagggtgggaaggagggtggggaggagggttgggaaggagggtgggaaggagggtggggaggagggcgggaatgagggcggtgaggagaagctcacagcccccacccccaccatcctcccaggacccaagcaaggaatgcttcactctgaaatttgacctgaatgtggacattgagacagagatcgtcccagccatgaagaagaagtcactggggtagggcttgatggggctcagggtggaagtgggactgggagtaggggtggccccatgttgcaggctccgggtctctgcaggtgtgacgtgtgtgtctgtgtggtggcccgtgagcgagcgcatccctgcgtgggcagacccgtgctggtgtgcacgccagtgtgagggagtgcggtggggtctgtgtacttgtgcattttaatcatgtatgcaggagccaggcctgcgtgtgggcaggcgtgtgacaggtctgccgtggtatgcagatgcgcctgtgtgagcacctctgcgggcaggtgtctgtggacctgcgtgtgatcccatgcgggcttcccttttccgttgggaaggtgggggcagctggggctgtgggtggggcgggggctcgtgggggcggggcccaagctgaagcgactggccgcctggttctaacacacatgcctcctgtcctgggggcagggaggtgctgctgcctgtatttgaaaggaagggcattgcgctgggcaaagtggacatctacctggaccagtccaacacacccctgtccctcaccttcgaggcctacaggttcgggggacactaccttcgtgtcaaaggtgagaagcagcctgggccaaatggggccgctgggactggcggagcctcctggagatgggcgcccttcccaggctcaggttcccattggtcgtgggcctgagcagcctcattaccatacaggtgtctctgctggatgctgctgggggaggggagggtgctggcagggcggggctgtcgggggagggcaggcaggccttggtgtggatcctccggggagagaggaccggggaccccctcctccaccagaccagggtactgaggatctctcgtggcccccacatgcagccccagccaagcctggagatgagggcaaggtggagcagggcatgaaggactccaagtccctgagtttgccgattctgcggccagctgggaccgggccccccgccctggagcgtgtggacgcccagagccgccgggagagcctggacatcttggtgaggaggagggggtgtgtcaggggagggggtgggaaggggcccaggctgggcccacagcccctcctcagaggcagtcaccctgggtctctcactgccccatcttggggttttaattgtcccttctggaaaatggggttggctgggagagtaggggaccctctctctctggatctagccatagcccaaggtgagggcttgtatctgagactcttctagtgccaggggtcagggaacctgtgtgtgcatgtgtgtgtgagagcacttgtacctggggctacagaccacccagagctgtgttccagagtgcatctgagtgtgtaactctgtgcttcatgcttgaagctgggggactgggggatgatagtctgggcgtatctgtgtctggaccttccagtctccagatatgtctgggtcccaggagaggggacaccccagggtagagatgcagagaccctcctccatcccaggctggcctgaggccctggaaacccgccctggggtggggccatgggggctggcagggggtcccggccctgaccacccttccctgaccaggcccctggccgccgccgcaagaacatgtcggagttcctgggggaggcgagcatccccgggcaggagccccccacgccctccagctgctctctgcccagcggcagcagtggcagcaccaacactggcgacagctggaagaaccgggcggccagtcgcttcagcggctttttcagctccggccccagcaccagcgcctttggccgggtatgtggccccatctgcccagggtcaggcagctggctggccatgacccctgaccctgaccagggtatctttccaggaggtagacaagatggagcagctggagggcaagctgcacacctacagcctcttcgggctgcccaggctgccccgggggctgcgcttcgaccatgactcctgggaggaggagtacgatgaagacgaggatgaggacaatgcctgcctgaggctggaggacagctggcgggagctcattgatgggcatgaggtgagtgcgggccacagtgctgctccctccttgtcccgaaaggaggacagccctcgggaggacccagtgatcagatgttccatgggacgccccaaagaggccactgttaccattagcccactttggagacactgaggctagatgaaaatggtgtgctgcttggctgttttaatggcagaggagggcccagatcttgggtgtcttaactgtgattactcatgtggtgtcaagggtgaccctgctcctcttgggacctccatgtccccattgggaaaatgagagttgcatgcaggttgcttatcctccccggccaccctaaggtgctccaggcctcgtgaatgacccatcctgccctccctctagaagctgacccggcggcagtgccaccagcaggaggcggtgtgggagctgctgcacacggaggcctcctacatcaggaaactgcgggtgatcatcaacgtgagtaggggctgcgctggtccccgtggccaccctgcccccctctttctgacagccctcagctgagtctgagcctttgcagaaggagcaggtgcctggcaatgaggtgggggcaggaaagtcagacaagggctgcgcccagggaggaggtgcctcctagaggaacctgggagggggcttcgggcaggtttgtcaggttcagctgaattagcacaggtgaggcctcattctttcactttcgttcagtggctgtttcccaacacttgctgtgtgctgggtgcccagcaggccacgccctggacgggacagagtgagctggcagtgtagggatttcggctcagggaggggagcacctaccctgggcttggagcttcctggagggaggaagcaccctcagaggtgaaatctggaggctaagccagggcagaggtggagaagggaattccaggcatggcttcaaagccagtctcccccgagcttccctccaggagggaccagggcagtgtgacctcgggagggctatgaggactgggtctttcctcagggtctggactacccaggtgcgaaggccaaagggtacagccttcttatccgtggctgctgtggggcctcctggaacggggaaggggaaggagtggcaggggagcctgaggctgggtggggccctagggctgagacagcctcccgaccccagtcacaccatcccctgatcccacagctgttcctgtgctgcctcctgaacctgcaagagtcagggctgctgtgtgaggtgcgctgggattcgggggcggcggcgggtgaggtaccaggaaggagggcgggacctggacctggggcggggctaacctggcggaggggcgtggccaaccgcacctcccgccgcgcccaggtggaggcggagcgcctgttcagcaacatcccggagatcgcgcagctgcaccgcaggctgtgggctagcgtgatggcgccggtgctggagaaggcgcggcgcacgcgagcgctgctacagcccggggacttcctcaaaggcttcaagatggtacgggcggggccgggcgcaggcgggggcactgaggcagggctggggcgccgaaaagcctccacggcccgatccggtctgcccagcatccccaacctcccccaggcccgtaaccgcacttgaccccttgtggccaagggtgaggaattacgaggcggtcgcccgggtttgagcctccacctgaccatctacccctgatccctggccacgggtggtcactttggctgaggctcagtttcctcatcaggaaacagggatcataagcttgctgcccccttggggtggtcgcccaagtgcagtaaggaagcgcttgcgcagcgcctggcgcgggccggcccgcagggagcgcgcggtaaccggcgccgtggttgttctgccccgggccagttcggctcgctcttcaagccctacatccgctactgcatggaggaggagggctgcatggagtacatgcgcggcctgctgcgcgacaacgacctcttccgggcctacatcacggtgagggcgcgcgtgccgtgggcgggggcgcaggaggacgggaccctggacggggccgggtggggcggggcctgccctgagcccgcccccactcccccaccgcagtgggcggagaagcacccacagtgccagaggctgaagctgagcgacatgctggccaaaccccaccagcggctcaccaagtacccgctgctgctcaagtcggtgctgaggaagaccgaggagccgcgcgccaaggaggccgtcgtcgccatggtaaccctgatggccagcgggagccgtcccccctgcgcggctctctgctccgtcatgaccctggacctgaagctccctcacctgcccctagatcggctccgtggagcgcttcatccaccacgtgaacgcgtgcatgcggcagcggcaggagcggcagcggctggcggccgtggtgagccgcatcgacgcctacgaggtggtggaaagcagcagcgacgaagtggacaaggtgggcgtgtgtgtctgcgggggttgccggctgggagagaggaaggcccagctggcaggcaggggctgtgctgggcatctcactgaggatgcctagctgagatgggagtcagtctctggcctcccctacgttcacgccatccgtccccagctcctgaaggaatttctgcacctggacttgacagcgcccatccctggcgcctccccggaggagacgcggcagctgctgctggaggggagcctgaggatgaaggaggggaaggacagcaaggtgattccagggccaccccacccctgtgccctgcccttcctagggacctcctgggccccagtcactggttctcagctctgcagtcccttcggtggttactcaagaaccagtgaccttgtcatagtgaatgacagttctctgcctgccattcacaaatccagcagtagggtcctagcccttgaaggcaccagttgtgcccatttgttggtgccacatgggttcctggtgggagggcagccatattccacaagtgggccaggaaccccagagccttgctactgtgccatggccccttcaggcatggggcaggctgagagcttgcacacggtgacttcaaagtcaccagtcttctttttaatgtaaacttgtattgagataagtcatcaacgtacatctcagtgaaagagaatcatcttcctcttcattttaattttacttgaaggttcatggtgggaggagtgtttgacaaaaaccgagtgctcccaggggaggctggtgccacagtccctggccctgaccctgctggcctctctggccaccccccctcctgccactgcagatggatgtgtactgcttcctcttcacggatctgctgttggtgaccaaagcagtgaagaaggcagagaggaccagggtcatcaggccacccctgctcgtggacaagattgtgtgccgggagctacgggaccctggtaaggagccctggtcccctgttcctggtcaggggctgtgatgggtgggggccatcgtctctgctgacactgacttgggccttccctaaccagggtccttcctccttatctacctgaatgagtttcacagtgctgtaggggcctacacgttccaggccagtggccaggccttgtgccgtggctgggtggacaccatttacaatgcccaggtgagtgcagagtagtgagtgggtgggcaaggcagattagggagatgctggtcacaacccattctgtcccatgtaccccaaccttgcctgcagaaccagctgcaacagctgcgtgcacaggagcccccaggcagtcagcagcccctgcagagcctggaagaggaggaggatgagcaggaggaggaagaggaggaggaggaggaggaggaggaaggcgaggacagtggcacttcagctgccagctcccctaccatcatgcggaaaagcagcggcagccccgactctcagcactggtacgtctgctcatgaccacccagcaggtcaaaccaggacaagtactctagcccaggactcctgaaggcccagccacgctcccttcctcccaatggcctcttgtcatgaacactgtgggagcggggctctgtctcccccagagtccgggtggggagggcagacacctttccatgtgctgccagccctgatccattcgtggtagctgcctggggtgctgtgctgaggatccttagggcagatccagccttggcagggaagagtgctgggctcgctactgaggtctgttgtgggcactggagctggaagatctgccacacctgccacatgctgccatctctgagcctccagccccaggagggcagagggtataaaccaccgtgcattgcccagcctggggctgcctcaggccatctaggtttcatggcctgggctgactctgctcctggccccacagtgcctcagatggctccacggagaccctggccatggttgtggtagagcctggggacacgctgtcctcccccgagttcgacagcggtcctttcagctcccagtctgatgagacctctctcagcaccactgcctcatctgccacgcccaccagtgagctgctgcccctgggtccggtggacggccgctcctgctccatggactctgcctacggcaccctctccccaacctccttacaagactttgtggccccaggcccaatggcagagctagtgcctcgggccccagagtccccacgagttccttcccctccaccctcgccccgtctccgccgccgcacccctgtccagctgttgagctgcccgccccacctgctcaagtctaagtccgaggccagcctcctccagctgctggcaggggctggcacccatgggacaccctctgcccccagccgcagcctgtcagagctctgcctggctgttccagccccaggtattaggactcagggctcccctcaggaagctgggcccagctgggattgccgaggggcccctagccctggcagcggtcctgggctagtcggctgcctggccggggaacctgcaggctcccacaggaagaggtgtggagacctgccctcgggggcctctcccagggtccagcctgagcccccaccaggggtctctgcccagcacaggaagctgaccctggcccagctctaccgaatcaggaccaccctgctgcttaactccacgctcactgcctcgtgagtggcctggactggggtagggcaggtggctcagggcactggcatgggggcccactcatgcctgggagcatcgcatttggggagggtcatggcggagggagcctgaaccctgcccagtgtctgggcgcagggggctgtggtgggcagcagtgaaggggcctgaggagtgccgtggggaagagagggtgaccagagccactctgaatggcgtcagccaaagaaggactctgtcccctccccaccctgtagggaggtctgagcagagggaggcccccaagagtgccattgaccaagagacagcagacagcctgcctcctggggcgtgccggcacctgcttcagctactgcctcctgtatgcatgagccggatgctgggcaggatccctgcctacgcccgggcccgatttgcgctttgccggactggatggagtggaggaggcccaggccacagtaccaccccacctgcccaggcagcccctcgtcacctactccccgaagttaccagctcagctcgagtcttcagggctgggctcctaggctgcccatcctacttctaccctcactggcctccagtgggattcactcctgccctgcccccaccttcccagtcccacaggccacccctggcttgggctgggttctgtgaagttacgtatttattgagcttttggttcttttataaagacttgtctagactccactgggaagagtcctttgctttggggcccagtgactcggggcacttgagttcagggcggcctccttgtgttcctgtgctcctccacttgccacggatgggccacggatggagcttgccatgggaagcactgggaagtaatggggtgtggggtgccaccagaccaacacccccagacttccccaccttcagccaccatcagagcctctccccaggtgccccccggggattcagggctgaatctgcccagttcccacactcaggccagccctcttgggaaggtgggtcctccatgggggtcccttcaggaactttttttttttttttaatacagagtctcactctgtcacctaggttggagtgcagtggtgtgatgtcggctcactgcaacctctgcctcccgggttcaaacgattctcctgccccagccactctagtagctggaactgcaggtgtgcaccaccacgccgggctagtttttgtattttaagtagagacggcatttcaccatattggtcaggctggtctcgaactcctgaccccaagtgttccgcccgcctctgcctcccatagtgctagaattacaggcctgagctactgcgcttggccccttgcggtacttttggcccaacctcctccatggctggggacgcggaggccgagagagaagtcacttgccctggctctaccttgaagtggttctcagggttggggcgagagtcggggtggggaccgagatgcagctctatcctgtgcccctggtcgcagcaggcagcccagcgcttcgcgtgttctacttggcctgtccgctgccgcctaatgagctcaggtctaggccgagcagagggggcacctggtcggactcggttgggctcgggcggccccgcctccccccgcccgccaggcgggcccttctcgacggcgcggggcgggccctgcgggcgcggggctgaaggcggaaccacgacgggcagagagcacggagccgggaagcccctgggcgcccgtcggagggctatggagcagcggccgc

SEQ ID NO: 13402 - DNA, 4968 bp, Homo sapiens
gcaagttccacagcaccatgcattatgatgggcatgtccgcttcgaccttcccccacaaggctctgtgctggcccggaacgtgtccacccggtcatgcccgccgcgcaccagccccgcagtggacttggaggaggaggaggaggagagctctgtggatggcaaaggggaccggaagagcacaggcctgaaactctccaagaagaaagcaaggaggagacacacggatgacccaagcaaggaatgcttcactctgaaatttgacctgaatgtggacattgagacagagatcgtcccagccatgaagaagaagtcactggggtagggcttgatggggctcagggtggaagtgggactgggagtaggggtggccccatgttgcaggctccgggtctctgcaggtgtgacgtgtgtgtctgtgtggtggcccgtgagcgagcgcatccctgcgtgggcagacccgtgctggtgtgcacgccagtgtgagggagtgcggtggggtctgtgtacttgtgcattttaatcatgtatgcaggagccaggcctgcgtgtgggcaggcgtgtgacaggtctgccgtggtatgcagatgcgcctgtgtgagcacctctgcgggcaggtgtctgtggacctgcgtgtgatcccatgcgggcttcccttttccgttgggaaggtgggggcagctggggctgtgggtggggcgggggctcgtgggggcggggcccaagctgaagcgactggccgcctggttctaacacacatgcctcctgtcctgggggcagggaggtgctgctgcctgtatttgaaaggaagggcattgcgctgggcaaagtggacatctacctggaccagtccaacacacccctgtccctcaccttcgaggcctacaggttcgggggacactaccttcgtgtcaaagccccagccaagcctggagatgagggcaaggtggagcagggcatgaaggactccaagtccctgagtttgccgattctgcggccagctgggaccgggccccccgccctggagcgtgtggacgcccagagccgccgggagagcctggacatcttggcccctggccgccgccgcaagaacatgtcggagttcctgggggaggcgagcatccccgggcaggagccccccacgccctccagctgctctctgcccagcggcagcagtggcagcaccaacactggcgacagctggaagaaccgggcggccagtcgcttcagcggctttttcagctccggccccagcaccagcgcctttggccgggaggtagacaagatggagcagctggagggcaagctgcacacctacagcctcttcgggctgcccaggctgccccgggggctgcgcttcgaccatgactcctgggaggaggagtacgatgaagacgaggatgaggacaatgcctgcctgaggctggaggacagctggcgggagctcattgatgggcatgagaagctgacccggcggcagtgccaccagcaggaggcggtgtgggagctgctgcacacggaggcctcctacatcaggaaactgcgggtgatcatcaacctgttcctgtgctgcctcctgaacctgcaagagtcagggctgctgtgtgaggtggaggcggagcgcctgttcagcaacatcccggagatcgcgcagctgcaccgcaggctgtgggctagcgtgatggcgccggtgctggagaaggcgcggcgcacgcgagcgctgctacagcccggggacttcctcaaaggcttcaagatgttcggctcgctcttcaagccctacatccgctactgcatggaggaggagggctgcatggagtacatgcgcggcctgctgcgcgacaacgacctcttccgggcctacatcacgtgggcggagaagcacccacagtgccagaggctgaagctgagcgacatgctggccaaaccccaccagcggctcaccaagtacccgctgctgctcaagtcggtgctgaggaagaccgaggagccgcgcgccaaggaggccgtcgtcgccatgatcggctccgtggagcgcttcatccaccacgtgaacgcgtgcatgcggcagcggcaggagcggcagcggctggcggccgtggtgagccgcatcgacgcctacgaggtggtggaaagcagcagcgacgaagtggacaagctcctgaaggaatttctgcacctggacttgacagcgcccatccctggcgcctccccggaggagacgcggcagctgctgctggaggggagcctgaggatgaaggaggggaaggacagcaagatggatgtgtactgcttcctcttcacggatctgctgttggtgaccaaagcagtgaagaaggcagagaggaccagggtcatcaggccacccctgctcgtggacaagattgtgtgccgggagctacgggaccctgggtccttcctccttatctacctgaatgagtttcacagtgctgtaggggcctacacgttccaggccagtggccaggccttgtgccgtggctgggtggacaccatttacaatgcccagaaccagctgcaacagctgcgtgcacaggagcccccaggcagtcagcagcccctgcagagcctggaagaggaggaggatgagcaggaggaggaagaggaggaggaggaggaggaggaggaaggcgaggacagtggcacttcagctgccagctcccctaccatcatgcggaaaagcagcggcagccccgactctcagcactgtgcctcagatggctccacggagaccctggccatggttgtggtagagcctggggacacgctgtcctcccccgagttcgacagcggtcctttcagctcccagtctgatgagacctctctcagcaccactgcctcatctgccacgcccaccagtgagctgctgcccctgggtccggtggacggccgctcctgctccatggactctgcctacggcaccctctccccaacctccttacaagactttgtggccccaggcccaatggcagagctagtgcctcgggccccagagtccccacgagttccttcccctccaccctcgccccgtctccgccgccgcacccctgtccagctgttgagctgcccgccccacctgctcaagtctaagtccgaggccagcctcctccagctgctggcaggggctggcacccatgggacaccctctgcccccagccgcagcctgtcagagctctgcctggctgttccagccccaggtattaggactcagggctcccctcaggaagctgggcccagctgggattgccgaggggcccctagccctggcagcggtcctgggctagtcggctgcctggccggggaacctgcaggctcccacaggaagaggtgtggagacctgccctcgggggcctctcccagggtccagcctgagcccccaccaggggtctctgcccagcacaggaagctgaccctggcccagctctaccgaatcaggaccaccctgctgcttaactccacgctcactgcctcggaggtctgagcagagggaggcccccaagagtgccattgaccaagagacagcagacagcctgcctcctggggcgtgccggcacctgcttcagctactgcctcctgtatgcatgagccggatgctgggcaggatccctgcctacgcccgggcccgatttgcgctttgccggactggatggagtggaggaggcccaggccacagtaccaccccacctgcccaggcagcccctcgtcacctactccccgaagttaccagctcagctcgagtcttcagggctgggctcctaggctgcccatcctacttctaccctcactggcctccagtgggattcactcctgccctgcccccaccttcccagtcccacaggccacccctggcttgggctgggttctgtgaagttacgtatttattgagcttttggttcttttataaagacttgtctagactccactgggaagagtcctttgctttggggcccagtgactcggggcacttgagttcagggcggcctccttgtgttcctgtgctcctccacttgccacggatgggccacggatggagcttgccatgggaagcactgggaagtaatggggtgtggggtgccaccagaccaacacccccagacttccccaccttcagccaccatcagagcctctccccaggtgccccccggggattcagggctgaatctgcccagttcccacactcaggccagccctcttgggaaggtgggtcctccatgggggtcccttcaggaactttttttttttttttaatacagagtctcactctgtcacctaggttggagtgcagtggtgtgatgtcggctcactgcaacctctgcctcccgggttcaaacgattctcctgccccagccactctagtagctggaactgcaggtgtgcaccaccacgccgggctagtttttgtattttaagtagagacggcatttcaccatattggtcaggctggtctcgaactcctgaccccaagtgttccgcccgcctctgcctcccatagtgctagaattacaggcctgagctactgcgcttggccccttgcggtacttttggcccaacctcctccatggctggggacgcggaggccgagagagaagtcacttgccctggctctaccttgaagtggttctcagggttggggcgagagtcggggtggggaccgagatgcagctctatcctgtgcccctggtcgcagcaggcagcccagcgcttcgcgtgttctacttggcctgtccgctgccgcctaatgagctcaggtctaggccgagcagagggggcacctggtcggactcggttgggctcgggcggccccgcctccccccgcccgccaggcgggcccttctcgacggcgcggggcgggccctgcgggcgcggggctgaaggcggaaccacgacgggcagagagcacggagccgggaagcccctgggcgcccgtcggagggctatggagcagcggccgc

SEQ ID NO: 13403 - DNA, 19378 bp, Homo sapiens
gcagaccgcggcttcctccggccgccatggggacaggacccggtgtctccggacgcctagcagcctccaggccgggcccggggctgcccctccgggactcggagccctcctgggccgggggtcgtgcccgcgacggtgatagccaggtacggggccgggacggggcgggaacggggctgggtgcccagttctcgcctgcagccgcccagtcctgtgcgggaggccagggagggggtgcccgtgactatgggccccgcggcccccaggggaaggatgcggcccatggcggccgagccccctacctgggcagctgcaccctggtgacggggacctcggactccggggtgtgtccccgccggctgagatgtccccgccaattcttggcgctttgtgtctggggccagctccggacacacctgtgggtcccgggccctatgctgggccgcccctctcctttccttcctctgccctggccctgcccacagcctcctcctaccccagaggcctctgtttctccttgtgcctctggccccagcccttgtgtgagggtggacgcctggttctctgtccccatcctcacatgcgtgtattccccaaagggcccccctctgttattttggctgcctggcgttagagggggtgggagctggctgttcccatgggtgggctctctcctcccttgggttgagacctgggaacattcccccccggaccctggtgtccctcctgcaggacagaggcaggacatggtgggcaggcaggcaggtgagggaggggcagttgggtctgagagaaggggctggagtctggcttcaagaaggggccattccgccctagtgctgggggagtcctgcctctggagggagctggggagactctggggtttgggggtgggacgtgaggcagaacggggagcagaaactgcaccagggagctctgcccaccccagcttctcagttgggctcatggttctcccggggggcttccagaacttcatcgtcaaccagatctgctcgacgaagtcggaaaccacctggttcagatcctggggctgagcctcactgtgcccccagtgcccctgagcctggggactgctgagaggagggaagcagatgaggtcagccgggcctgggcaccagcccctggcagcagctggaggagtcgagcagcctcagtgatggtagtggccacccagaccatcacagcagggaaactgatctcgaggctttcaagggatccagggtggggtgcgtcatagggctcagtccgtatttgttgaatactgactcttccgtaaggagcgaatcagggtatcaaatctgctgtctgtatattggattgatttaaaaacaagatggtggcacagagtcagacttggactggaagggtcccagagaccctcccagaactcctccgacctagcacggctccttccttgtcaccccctacctgcggtgagaccagggcttgggtcatgggcaggtctgccgccccagctggcactaggaaatctcaggaggcctggaagggattggagctgggagcctctgccatgctggctgggttcacagagggccagagggctgcggagcccgcagacggggggctcccaggaagaggggacaaggtggggcagggcccttccccagatcattctcatgaggagacacctgaagcttgggctcccagaagctgcaaagcctgatgtttctctcagcagtgcgctgtggattcagggtgagggtgtgggtagagccctggctgaggacagcttagtggtctctgtagtttttaaatttttttctgagacggggtctcactgtgtcgcccaggctggagtgcagcaatgtgatcatggctcactgcagcctcaacctcctgggctccagcaatcttcccacctcagcctcccaagtagctgggactacaagagagcgccaccacacccggctaattttgtttgttttttgtagaggcaggatctcactgtgtggcccgggctggagtttttgcactttgttttacgatagattaagacagaaaccagaaagagctgcaggggttgagggatcaatcccatcaccctcacttcaagccccacaagcacagttgaagatcactcctgaagggtgtagaagtgggggcacctggtgctcaaggctgccttcaggaatctgggtcatcctgtccccagccacctgcctggggcccagctccatgcagatcagcccctccctgagcacgtgggcctgcttggagtgccacctgccgactgccagtcctgtgccctgttccctttcctgtcagatggagacacggagggacacaagaaccaacagggcttgcatcaaactgagatagatttcctcctgtccccgtaatcccggctgacctgaggccagcctctcgctcctaagacacccatgagagggcgtgaatgtgggttaaaatctgggatccagtctgggtgccgtggctcacgcctgtaatcccagcacttggtgaggccgatgtgggtggatcacctgagggcaggtgttcaagaccagcctgaccaacaaggtgaaaccccgtctctactcaaaatccaaaaattacctgggtgtggtggcgtgtgcttgtagtcccagttacttgggaggctgaaacaggagaattgtctgaacccaggaggcggaggttgcagtgagccaagatcatgccactgctctccagcctgggcaacagagcgagactctatcgcaaaaaacataaataaatacataaataaataaataataatctgggatccagagccccacacacagtggcttcaagtcctagatccactggctgtgtgaccttagacaagtcatttcacctctctgagttttactttcctcttgtgtgaaacagggacaataacagcccttatcttatgggatgagatacacatgtaatgcccccagtgtggctccagacacatgacgaccacattaaaaacacactcagattcttcccggcctcctcctccctcctgtcactttctctgctatcctcaccacgcctatctcggaaatctctcatcgggctttcaccagccagaaactcttcagcgcctctctcctgccttaattcataaatgaaacaaggatttatggagcagctgggaccggaggtcaggcgctgaatcagacagagtaacatttctgtccttgcgaatgtgaccaggtgtggaggcagcagggtggaatatgtgacctgtcaggtgctggaaagtgctgaggacaggaaaggagcgtggagggcgaatgaggaggatgagaaggtgacttggggggaagctagcaggaggggagggaaggcagggagccatgcatttcaatatctggggaaaagcatctcagtccagggactggcagatgtcacagctcagaggtgggagctgccctgagggagtgtgtcccggaacgaccaggaggccagtgggtgaggggagtgagccaggatggaagagcaggacaggaggtccctgaatggggtggccttaaccctaaaaaaaaaaaaagtcaatgtcataaaagactgaaaaccctaaccttaacccttttggcttttttttttttttaagataatgtcttccctgtagcccaggctggagtgcagtggcgcaatctcagctcactgcaacctctgcctcctgagttcaaacaattctcctgcctcagcctcctgagtagctgggactacaggcgtgtgccaccatgcccggctaagtttttgtgtttttagtagagacggggtttcaccatgttagccaggatggtcttgatctcctgaccttgtgatccgcctgcctcagcctcccaaagtgctggggattacaggcatgagccaccgcgcctggcctttttatttacttatatatttatttatttatttatttatttatttatttatttattttgagacggagttttgccccaggctggagtgcgatggcacaatctcggctcactgcaacctctgcctcccgtattcaagcgattctcctgcttcagcctcccgcgtagctgggattacaggcatgcgccaccatgcccagctaattttgtatttttagtagagacagggtttcttccatgttggtcaggctggtctcgaactcccaacctcaggtgacccgcccgcctcggcctcccaaagtgctgggattacaggcatagccactgctcctggccccttttggcttttattcagagtgagatgggaacccttggagggttttgagtagatacagtgggactcctctttgaacagggcccactctagctgcacatggacaacatattgtgggggatgggggtagcagtgaggccagttttgaggccattgttgtcatctagctaaaaggtggctgggcagtggcacgcttatgagctgtggctgggttgaggccacagatactaaaggtggagccagcgggattttcgggctgaccagatgggggcataacagagaatgtcaagagtgaccccaagctgatatggtggctcacacctgtaatcccagcactaattccagcactttgggaggctgaggcgggcggatcagttgagcccaggagttcgagaccaggctgtgcaacatggcgaaatcctatctctactaaaaattagctgggtatggtggtacatgcctgtagtcccagctacttgggacggtgaggcaggagaatcacttgaacccaggaggtagaggttgcagtgagccgagattgcggcactgcactccagattgggtgacagagtgagaccctgtctcaaaaaaaaaaaggaaatcccccaccttgcagccatcagaagaatcaaataattgatttaggttaaaatcatctatgtatgctaaagctcttaggaccgcaagctcacatcaccatgcctggctaatttttttttttttggagacaaagtctcgctctgtcactcaggctggagtgcagtggtgtgatctcggctcactgcaacctctgcccccggttcaagcaattctcctgcctcagcctcctgagtagctgggactacaggcgtacgctgccacgactggctaatttttttgtattttagtagagacggggtttcaccgtgttgcccaggctgctatcgaactcctgagctcaggcaatccacccgcctcggcctcccaaagtgctaggattacaggcatgagccaccgtgcctggcaattttttatatttttagtagagatggggttttgtcatgttggccaggctggtcttgaactcctgacctcaactgattgagtgagattactggggaacaagacatctcaaagtgccatgccacagattacttattaattataggggaaaaagggactctacaaggtacagaggtccccagaggatccagcattacaggcaaatagcaagaacacacagctctgtggtgtccccgcctgaacgctcagtttgaaactttctgaggaccaccagggagatccacattgaggagctctgtgcgaggctgctggctcgaagacttccaaaatgtcaaggtcagccaggcacagtggctcatgcctataatcccagctctttgggaggtcaaggcgggcagattgcttgagcccaggagttcaagactagcctgggcaacatagtgagatctgtcactactaaaaataaaaaagttagttgggcgtagtggcatgcacctagtattcccagctactaaggaggctaaggcaggaggattacttgagtccgggaggttgaggttgcagtgagctgatcatgccatactactccagcctgggctacagagcgagaccctgtcttgaagaaaaaaaaaaagtcaatgtaataaaagaccacaaaaaacaaggctgggcacggtggctcacgcgtgtaatcccagcactttgggaggccgaggtgggcggatcacgaggtcaggagatcgagaccatcctggctaacacggtgaaaccccatctctaccaaaaatacaaaaaattagccgggcgtggtggcgggcgcctgtagtcccagctactcaggaggctgaggcaggagaatggtgtgaaccgaggaggcggagcttgcagtgagtcgagatcgcgccactgcactccagcctgggcgacagagcgagactccgtctcaaaaaaaaaaaaaaaaaaaaaaggataaacagacataaccaaatgccacgtgtgaaacttgattagttcctatatgaggaagtatatctgtaagaacgttatttagacacttgggaaaatgtcaatatagactatatatcaaggttcagtttcccaagtgcgacaattctatggggttttgtaggaaaactgtctttgttcttaggcagcagcatgatttctgccccaggggaggggggtgccgagaagagaatgggagagaagcagatgtggtagatatcaacttggggagtccagagggcatgtggatgtcatgtgctattcttataatttttggtaggtttgaaatattttaaaacaagtctgggcgcggtggctcacgcctgtaatcccagcactttgggaggccgaggcaggcggatcacctgagaccaggagttcaataccaacctggccaacatggtgaaactccgtctctactaaaaatacaaaaattagtcgggcgtggtggattgtgcctgtaatctcagctacttgggaggctgaggcaggagaatcacttgaacccgggaggcggaggatgcagtgagctgagatcgtgccattgcactccagcctgggcaacagagcgagaccccttctcagaaaaatttaaaaaaataaaaagaaaagaaatattttaaaacaaaacttgggaaaaataaagagagtgggaggagagaactaggaagtcgtgaatactgatacctgtttacagagtttagctgtgaagggaaagaaagaaagtcagccgtagctggagggtgaggtgaggcctctgtaaaatggagaaataaggctgggcgtggcagctcatgcctgtaatgccagcattttgggagaccaaggtgggcggatcacttgaggccaggagtttgagaccagcctgggcaacatggtgaaaccccgtctctacaaaaaatacaaacactcgcctatggtggtgtgtgcttctagtccaagctactcgggaggctgaggctcgaggatcacgtgagtctgggaggtcaaggctgcagtgagccatgattgtgccactgcactccctgtctcaaagaaagaaagaaaaaaaaagatggagaagccgggcgcggtggctcacgcctgtaatcccagcactttgggaggcccaggcgggctgttcacgaggtcaggaattcgagaccagtctggccaacacagtgaaaccctgtctctactaaaaatacaaaaaaaaaattagctgggcatggtggtgtgcgcctgtaatcccagctactggggaggctgaggcaggagaattgcgtgaaaccaggaggcggaggttgcagtgagccgagatcaagccattgcactccagtctgggtgacagaatgagactctgtctcagaaaaagaaaaaaaagaaaaagatggagaaataaccacgtgttggtgtggcagtgggggaaatgatccagcagaggggaaacttgatgatgtgggagaggggggactgctggggggcgtctcctcaccctggatcgagagatggagggcagttcattctaagtccctgcagcgctgggccggggtcgagggatgtggtggatctcgtggacctcctgaaggcttctgtccccaccccaggtatgtcaccacgccgactgccagcagctgcaccgccgggggcccctcaacctctgcgaggcctgtgacagcaagttccacagcaccatgcattatgatgggcatgtccgcttcgaccttcccccacaaggtgagcacaggcgggagccgcagctcggcccccagagctcctgtgtcagtgtttcagtaactgtcggaaacgtgctagggcgtcataaggacaagtcgactgtaaataatgaaacccgagtatgttacggttccttttgttccaaatgttttttagcaagagagaaagtccatgagcgtgccccttccagaggcaggcctttctctatctggtgctgtgctctcactggttctcacctcccccagctgcttttgcccctggcctgtggcccacacagagaaggcccctttctttctagttctgcctatcctcagggcaggggacttctggacaagtcctgcaagccaggctgtgggcctagcagaggcagtgtggagtgggggtggccaggtcaggaggcacttggagcaggaaataagaaattcctcttgctgagcagggacccagctcaggcccaccatcaactgcctatggaggagtggctcgcaggcacccaggcctggtgagaaatgccaacccccgagtcctttcccagctgatcagaggaacaaaaggattcttctggttgggcacggtggctcatgtctggaatacaaaaaatacaaaaattagccaggtgtggtggcacacacttgtggtcccagctgctcggaggctgaggtggaaggatcgcttgaaccccgacaatggaggctccagtgagccctgatcgtgccactgcactccagcctgagcgacagagcaagaccctgtcttaaaaaacaataaacaaacaaaagactctctcccactgccagggccccttgggaattcaggtgtggtcacagcatgggggaggggaggcctggaagaaagagccatggactttggtcccttcctgtaataacctcagaggcaaggcttccttatccttattttatagaagggtaaactgaggccacaggtgagtttgtttttggggtggagcttcaccatgggtgtcatcccagggcctttgtgtccttttgggtctgtggggatagacagcaatgactaaggccaggcaaggtggctcacacctgtaatcccagccctttgggaggctgaggtgggtggatcacttcaggtcaggagtttgagaacagcctggccaacatgttgaaaccctgtcattactaaaaatacaaaaaaatgagccgggtgtggtggcacacgcctgcaatcccagctactcaagaggctgaagcatgagaattgcttgaacccaggaggtggaggttgcagtgagccgagatcatgccactgcactccagcctgggtgacagagtgagaccctatctcaaaacaaaaacaaaaaacaatgactgagcccctctcctcacagaactgaagggcccttgctacctttaatctgggggttccagggtaacaggctgtggtccctctggaggcagccatgctgcaggctaaggaggggcgggggaggcacaaccctctcctgctttctcccaaggctctgtgctggcccggaacgtgtccacccggtcatgcccgccgcgcaccagccccgcagtggacttggaggaggaggaggaggagagctctgtggatggcaaagggtaggtgagggatgagtgggcagagagatacctggagggccccacggctgggtctcagatcagacattcaggaccagatgctctggcgccttcctcaagtaaggctgatgggcagacctcttcccacgcctgtggctgtcctgactccgggaagaggccacccagcctgggccagcctccagggtgcttgggatcctagcccacaccagaccaggtaccgttcgatgtgactcccgtgttggccaccagagggcgcacagccctatgcgggcctggccgggttgaatccacgcgggttacctgtcacctggggtgagccaagggcggggaggccacaggcccactcgccgcccacgctggcgagggccacccacacctccagcctctgccctcctcgcttccctgcagggaccggaagagcacaggcctgaaactctccaagaagaaagcaaggaggagacacacggatgtgaggagccccccagagccggcagatgcgggttccctacagcctgcgcccttccccgagcctgggccttcctccgggatgggggtggggaggtctgcatcccagggtgcagaggtctgggagatcgctggggttccctttcttgctggggttcccatccgagaccggagggtggggagggtggggaggagggttgggaaggagggtgggaaggagggtggggaggagggttgggaaggagggtgggaaggagggtggggaggagggcgggaatgagggcggtgaggagaagctcacagcccccacccccaccatcctcccaggacccaagcaaggaatgcttcactctgaaatttgacctgaatgtggacattgagacagagatcgtcccagccatgaagaagaagtcactggggtagggcttgatggggctcagggtggaagtgggactgggagtaggggtggccccatgttgcaggctccgggtctctgcaggtgtgacgtgtgtgtctgtgtggtggcccgtgagcgagcgcatccctgcgtgggcagacccgtgctggtgtgcacgccagtgtgagggagtgcggtggggtctgtgtacttgtgcattttaatcatgtatgcaggagccaggcctgcgtgtgggcaggcgtgtgacaggtctgccgtggtatgcagatgcgcctgtgtgagcacctctgcgggcaggtgtctgtggacctgcgtgtgatcccatgcgggcttcccttttccgttgggaaggtgggggcagctggggctgtgggtggggcgggggctcgtgggggcggggcccaagctgaagcgactggccgcctggttctaacacacatgcctcctgtcctgggggcagggaggtgctgctgcctgtatttgaaaggaagggcattgcgctgggcaaagtggacatctacctggaccagtccaacacacccctgtccctcaccttcgaggcctacaggttcgggggacactaccttcgtgtcaaaggtgagaagcagcctgggccaaatggggccgctgggactggcggagcctcctggagatgggcgcccttcccaggctcaggttcccattggtcgtgggcctgagcagcctcattaccatacaggtgtctctgctggatgctgctgggggaggggagggtgctggcagggcggggctgtcgggggagggcaggcaggccttggtgtggatcctccggggagagaggaccggggaccccctcctccaccagaccagggtactgaggatctctcgtggcccccacatgcagccccagccaagcctggagatgagggcaaggtggagcagggcatgaaggactccaagtccctgagtttgccgattctgcggccagctgggaccgggccccccgccctggagcgtgtggacgcccagagccgccgggagagcctggacatcttggtgaggaggagggggtgtgtcaggggagggggtgggaaggggcccaggctgggcccacagcccctcctcagaggcagtcaccctgggtctctcactgccccatcttggggttttaattgtcccttctggaaaatggggttggctgggagagtaggggaccctctctctctggatctagccatagcccaaggtgagggcttgtatctgagactcttctagtgccaggggtcagggaacctgtgtgtgcatgtgtgtgtgagagcacttgtacctggggctacagaccacccagagctgtgttccagagtgcatctgagtgtgtaactctgtgcttcatgcttgaagctgggggactgggggatgatagtctgggcgtatctgtgtctggaccttccagtctccagatatgtctgggtcccaggagaggggacaccccagggtagagatgcagagaccctcctccatcccaggctggcctgaggccctggaaacccgccctggggtggggccatgggggctggcagggggtcccggccctgaccacccttccctgaccaggcccctggccgccgccgcaagaacatgtcggagttcctgggggaggcgagcatccccgggcaggagccccccacgccctccagctgctctctgcccagcggcagcagtggcagcaccaacactggcgacagctggaagaaccgggcggccagtcgcttcagcggctttttcagctccggccccagcaccagcgcctttggccgggtatgtggccccatctgcccagggtcaggcagctggctggccatgacccctgaccctgaccagggtatctttccaggaggtagacaagatggagcagctggagggcaagctgcacacctacagcctcttcgggctgcccaggctgccccgggggctgcgcttcgaccatgactcctgggaggaggagtacgatgaagacgaggatgaggacaatgcctgcctgaggctggaggacagctggcgggagctcattgatgggcatgaggtgagtgcgggccacagtgctgctccctccttgtcccgaaaggaggacagccctcgggaggacccagtgatcagatgttccatgggacgccccaaagaggccactgttaccattagcccactttggagacactgaggctagatgaaaatggtgtgctgcttggctgttttaatggcagaggagggcccagatcttgggtgtcttaactgtgattactcatgtggtgtcaagggtgaccctgctcctcttgggacctccatgtccccattgggaaaatgagagttgcatgcaggttgcttatcctccccggccaccctaaggtgctccaggcctcgtgaatgacccatcctgccctccctctagaagctgacccggcggcagtgccaccagcaggaggcggtgtgggagctgctgcacacggaggcctcctacatcaggaaactgcgggtgatcatcaacgtgagtaggggctgcgctggtccccgtggccaccctgcccccctctttctgacagccctcagctgagtctgagcctttgcagaaggagcaggtgcctggcaatgaggtgggggcaggaaagtcagacaagggctgcgcccagggaggaggtgcctcctagaggaacctgggagggggcttcgggcaggtttgtcaggttcagctgaattagcacaggtgaggcctcattctttcactttcgttcagtggctgtttcccaacacttgctgtgtgctgggtgcccagcaggccacgccctggacgggacagagtgagctggcagtgtagggatttcggctcagggaggggagcacctaccctgggcttggagcttcctggagggaggaagcaccctcagaggtgaaatctggaggctaagccagggcagaggtggagaagggaattccaggcatggcttcaaagccagtctcccccgagcttccctccaggagggaccagggcagtgtgacctcgggagggctatgaggactgggtctttcctcagggtctggactacccaggtgcgaaggccaaagggtacagccttcttatccgtggctgctgtggggcctcctggaacggggaaggggaaggagtggcaggggagcctgaggctgggtggggccctagggctgagacagcctcccgaccccagtcacaccatcccctgatcccacagctgttcctgtgctgcctcctgaacctgcaagagtcagggctgctgtgtgaggtgcgctgggattcgggggcggcggcgggtgaggtaccaggaaggagggcgggacctggacctggggcggggctaacctggcggaggggcgtggccaaccgcacctcccgccgcgcccaggtggaggcggagcgcctgttcagcaacatcccggagatcgcgcagctgcaccgcaggctgtgggctagcgtgatggcgccggtgctggagaaggcgcggcgcacgcgagcgctgctacagcccggggacttcctcaaaggcttcaagatggtacgggcggggccgggcgcaggcgggggcactgaggcagggctggggcgccgaaaagcctccacggcccgatccggtctgcccagcatccccaacctcccccaggcccgtaaccgcacttgaccccttgtggccaagggtgaggaattacgaggcggtcgcccgggtttgagcctccacctgaccatctacccctgatccctggccacgggtggtcactttggctgaggctcagtttcctcatcaggaaacagggatcataagcttgctgcccccttggggtggtcgcccaagtgcagtaaggaagcgcttgcgcagcgcctggcgcgggccggcccgcagggagcgcgcggtaaccggcgccgtggttgttctgccccgggccagttcggctcgctcttcaagccctacatccgctactgcatggaggaggagggctgcatggagtacatgcgcggcctgctgcgcgacaacgacctcttccgggcctacatcacggtgagggcgcgcgtgccgtgggcgggggcgcaggaggacgggaccctggacggggccgggtggggcggggcctgccctgagcccgcccccactcccccaccgcagtgggcggagaagcacccacagtgccagaggctgaagctgagcgacatgctggccaaaccccaccagcggctcaccaagtacccgctgctgctcaagtcggtgctgaggaagaccgaggagccgcgcgccaaggaggccgtcgtcgccatggtaaccctgatggccagcgggagccgtcccccctgcgcggctctctgctccgtcatgaccctggacctgaagctccctcacctgcccctagatcggctccgtggagcgcttcatccaccacgtgaacgcgtgcatgcggcagcggcaggagcggcagcggctggcggccgtggtgagccgcatcgacgcctacgaggtggtggaaagcagcagcgacgaagtggacaaggtgggcgtgtgtgtctgcgggggttgccggctgggagagaggaaggcccagctggcaggcaggggctgtgctgggcatctcactgaggatgcctagctgagatgggagtcagtctctggcctcccctacgttcacgccatccgtccccagctcctgaaggaatttctgcacctggacttgacagcgcccatccctggcgcctccccggaggagacgcggcagctgctgctggaggggagcctgaggatgaaggaggggaaggacagcaaggtgattccagggccaccccacccctgtgccctgcccttcctagggacctcctgggccccagtcactggttctcagctctgcagtcccttcggtggttactcaagaaccagtgaccttgtcatagtgaatgacagttctctgcctgccattcacaaatccagcagtagggtcctagcccttgaaggcaccagttgtgcccatttgttggtgccacatgggttcctggtgggagggcagccatattccacaagtgggccaggaaccccagagccttgctactgtgccatggccccttcaggcatggggcaggctgagagcttgcacacggtgacttcaaagtcaccagtcttctttttaatgtaaacttgtattgagataagtcatcaacgtacatctcagtgaaagagaatcatcttcctcttcattttaattttacttgaaggttcatggtgggaggagtgtttgacaaaaaccgagtgctcccaggggaggctggtgccacagtccctggccctgaccctgctggcctctctggccaccccccctcctgccactgcagatggatgtgtactgcttcctcttcacggatctgctgttggtgaccaaagcagtgaagaaggcagagaggaccagggtcatcaggccacccctgctcgtggacaagattgtgtgccgggagctacgggaccctggtaaggagccctggtcccctgttcctggtcaggggctgtgatgggtgggggccatcgtctctgctgacactgacttgggccttccctaaccagggtccttcctccttatctacctgaatgagtttcacagtgctgtaggggcctacacgttccaggccagtggccaggccttgtgccgtggctgggtggacaccatttacaatgcccaggtgagtgcagagtagtgagtgggtgggcaaggcagattagggagatgctggtcacaacccattctgtcccatgtaccccaaccttgcctgcagaaccagctgcaacagctgcgtgcacaggagcccccaggcagtcagcagcccctgcagagcctggaagaggaggaggatgagcaggaggaggaagaggaggaggaggaggaggaggaggaaggcgaggacagtggcacttcagctgccagctcccctaccatcatgcggaaaagcagcggcagccccgactctcagcactggtacgtctgctcatgaccacccagcaggtcaaaccaggacaagtactctagcccaggactcctgaaggcccagccacgctcccttcctcccaatggcctcttgtcatgaacactgtgggagcggggctctgtctcccccagagtccgggtggggagggcagacacctttccatgtgctgccagccctgatccattcgtggtagctgcctggggtgctgtgctgaggatccttagggcagatccagccttggcagggaagagtgctgggctcgctactgaggtctgttgtgggcactggagctggaagatctgccacacctgccacatgctgccatctctgagcctccagccccaggagggcagagggtataaaccaccgtgcattgcccagcctggggctgcctcaggccatctaggtttcatggcctgggctgactctgctcctggccccacagtgcctcagatggctccacggagaccctggccatggttgtggtagagcctggggacacgctgtcctcccccgagttcgacagcggtcctttcagctcccagtctgatgagacctctctcagcaccactgcctcatctgccacgcccaccagtgagctgctgcccctgggtccggtggacggccgctcctgctccatggactctgcctacggcaccctctccccaacctccttacaagactttgtggccccaggcccaatggcagagctagtgcctcgggccccagagtccccacgagttccttcccctccaccctcgccccgtctccgccgccgcacccctgtccagctgttgagctgcccgccccacctgctcaagtctaagtccgaggccagcctcctccagctgctggcaggggctggcacccatgggacaccctctgcccccagccgcagcctgtcagagctctgcctggctgttccagccccaggtattaggactcagggctcccctcaggaagctgggcccagctgggattgccgaggggcccctagccctggcagcggtcctgggctagtcggctgcctggccggggaacctgcaggctcccacaggaagaggtgtggagacctgccctcgggggcctctcccagggtccagcctgagcccccaccaggggtctctgcccagcacaggaagctgaccctggcccagctctaccgaatcaggaccaccctgctgcttaactccacgctcactgcctcgtgagtggcctggactggggtagggcaggtggctcagggcactggcatgggggcccactcatgcctgggagcatcgcatttggggagggtcatggcggagggagcctgaaccctgcccagtgtctgggcgcagggggctgtggtgggcagcagtgaaggggcctgaggagtgccgtggggaagagagggtgaccagagccactctgaatggcgtcagccaaagaaggactctgtcccctccccaccctgtagggaggtctgagcagagggaggcccccaagagtgccattgaccaagagacagcagacagcctgcctcctggggcgtgccggcacctgcttcagctactgcctcctgtatgcatgagccggatgctgggcaggatccctgcctacgcccgggcccgatttgcgctttgccggactggatggagtggaggaggcccaggccacagtaccaccccacctgcccaggcagcccctcgtcacctactccccgaagttaccagctcagctcgagtcttcagggctgggctcctaggctgcccatcctacttctaccctcactggcctccagtgggattcactcctgccctgcccccaccttcccagtcccacaggccacccctggcttgggctgggttctgtgaagttacgtatttattgagcttttggttcttttataaagacttgtctagactccactgggaagagtcctttgctttggggcccagtgactcggggcacttgagttcagggcggcctccttgtgttcctgtgctcctccacttgccacggatgggccacggatggagcttgccatgggaagcactgggaagtaatggggtgtggggtgccaccagaccaacacccccagacttccccaccttcagccaccatcagagcctctccccaggtgccccccggggattcagggctgaatctgcccagttcccacactcaggccagccctcttgggaaggtgggtcctccatgggggtcccttcaggaactttttttttttttttaatacagagtctcactctgtcacctaggttggagtgcagtggtgtgatgtcggctcactgcaacctctgcctcccgggttcaaacgattctcctgccccagccactctagtagctggaactgcaggtgtgcaccaccacgccgggctagtttttgtattttaagtagagacggcatttcaccatattggtcaggctggtctcgaactcctgaccccaagtgttccgcccgcctctgcctcccatagtgctagaattacaggcctgagctactgcgcttggccccttgcggtacttttggcccaacctcctccatggctggggacgcggaggccgagagagaagtcacttgccctggctctaccttgaagtggttctcagggttggggcgagagtcggggtggggaccgagatgcagctctatcctgtgcccctggtcgcagcaggcagcccagcgcttcgcgtgttctacttggcctgtccgctgccgcctaatgagctcaggtctaggccgagcagagggggcacctggtcggactcggttgggctcgggcggccccgcctccccccgcccgccaggcgggcccttctcgacggcgcggggcgggccctgcgggcgcggggctgaaggcggaaccacgacgggcagagagcacggagccgggaagcccctgggcgcccgtcggagggctatggagcagcggccgc

SEQ ID NO: 13404 - DNA, 4725 bp, Homo sapiens
gcagaccgcggcttcctccggccgccatggggacaggacccggtgtctccggacgcctagcagcctccaggccgggcccggggctgcccctccgggactcggagccctcctgggccgggggtcgtgcccgcgacggtgatagccaggtatgtcaccacgccgactgccagcagctgcaccgccgggggcccctcaacctctgcgaggcctgtgacagcaagttccacagcaccatgcattatgatgggcatgtccgcttcgaccttcccccacaaggctctgtgctggcccggaacgtgtccacccggtcatgcccgccgcgcaccagccccgcagtggacttggaggaggaggaggaggagagctctgtggatggcaaaggggaccggaagagcacaggcctgaaactctccaagaagaaagcaaggaggagacacacggatgacccaagcaaggaatgcttcactctgaaatttgacctgaatgtggacattgagacagagatcgtcccagccatgaagaagaagtcactgggggaggtgctgctgcctgtatttgaaaggaagggcattgcgctgggcaaagtggacatctacctggaccagtccaacacacccctgtccctcaccttcgaggcctacaggttcgggggacactaccttcgtgtcaaagccccagccaagcctggagatgagggcaaggtggagcagggcatgaaggactccaagtccctgagtttgccgattctgcggccagctgggaccgggccccccgccctggagcgtgtggacgcccagagccgccgggagagcctggacatcttggcccctggccgccgccgcaagaacatgtcggagttcctgggggaggcgagcatccccgggcaggagccccccacgccctccagctgctctctgcccagcggcagcagtggcagcaccaacactggcgacagctggaagaaccgggcggccagtcgcttcagcggctttttcagctccggccccagcaccagcgcctttggccgggaggtagacaagatggagcagctggagggcaagctgcacacctacagcctcttcgggctgcccaggctgccccgggggctgcgcttcgaccatgactcctgggaggaggagtacgatgaagacgaggatgaggacaatgcctgcctgaggctggaggacagctggcgggagctcattgatgggcatgagaagctgacccggcggcagtgccaccagcaggaggcggtgtgggagctgctgcacacggaggcctcctacatcaggaaactgcgggtgatcatcaacctgttcctgtgctgcctcctgaacctgcaagagtcagggctgctgtgtgaggtggaggcggagcgcctgttcagcaacatcccggagatcgcgcagctgcaccgcaggctgtgggctagcgtgatggcgccggtgctggagaaggcgcggcgcacgcgagcgctgctacagcccggggacttcctcaaaggcttcaagatgttcggctcgctcttcaagccctacatccgctactgcatggaggaggagggctgcatggagtacatgcgcggcctgctgcgcgacaacgacctcttccgggcctacatcacgtgggcggagaagcacccacagtgccagaggctgaagctgagcgacatgctggccaaaccccaccagcggctcaccaagtacccgctgctgctcaagtcggtgctgaggaagaccgaggagccgcgcgccaaggaggccgtcgtcgccatgatcggctccgtggagcgcttcatccaccacgtgaacgcgtgcatgcggcagcggcaggagcggcagcggctggcggccgtggtgagccgcatcgacgcctacgaggtggtggaaagcagcagcgacgaagtggacaagctcctgaaggaatttctgcacctggacttgacagcgcccatccctggcgcctccccggaggagacgcggcagctgctgctggaggggagcctgaggatgaaggaggggaaggacagcaagatggatgtgtactgcttcctcttcacggatctgctgttggtgaccaaagcagtgaagaaggcagagaggaccagggtcatcaggccacccctgctcgtggacaagattgtgtgccgggagctacgggaccctgggtccttcctccttatctacctgaatgagtttcacagtgctgtaggggcctacacgttccaggccagtggccaggccttgtgccgtggctgggtggacaccatttacaatgcccagaaccagctgcaacagctgcgtgcacaggagcccccaggcagtcagcagcccctgcagagcctggaagaggaggaggatgagcaggaggaggaagaggaggaggaggaggaggaggaggaaggcgaggacagtggcacttcagctgccagctcccctaccatcatgcggaaaagcagcggcagccccgactctcagcactgtgcctcagatggctccacggagaccctggccatggttgtggtagagcctggggacacgctgtcctcccccgagttcgacagcggtcctttcagctcccagtctgatgagacctctctcagcaccactgcctcatctgccacgcccaccagtgagctgctgcccctgggtccggtggacggccgctcctgctccatggactctgcctacggcaccctctccccaacctccttacaagactttgtggccccaggcccaatggcagagctagtgcctcgggccccagagtccccacgagttccttcccctccaccctcgccccgtctccgccgccgcacccctgtccagctgttgagctgcccgccccacctgctcaagtctaagtccgaggccagcctcctccagctgctggcaggggctggcacccatgggacaccctctgcccccagccgcagcctgtcagagctctgcctggctgttccagccccaggtattaggactcagggctcccctcaggaagctgggcccagctgggattgccgaggggcccctagccctggcagcggtcctgggctagtcggctgcctggccggggaacctgcaggctcccacaggaagaggtgtggagacctgccctcgggggcctctcccagggtccagcctgagcccccaccaggggtctctgcccagcacaggaagctgaccctggcccagctctaccgaatcaggaccaccctgctgcttaactccacgctcactgcctcggaggtctgagcagagggaggcccccaagagtgccattgaccaagagacagcagacagcctgcctcctggggcgtgccggcacctgcttcagctactgcctcctgtatgcatgagccggatgctgggcaggatccctgcctacgcccgggcccgatttgcgctttgccggactggatggagtggaggaggcccaggccacagtaccaccccacctgcccaggcagcccctcgtcacctactccccgaagttaccagctcagctcgagtcttcagggctgggctcctaggctgcccatcctacttctaccctcactggcctccagtgggattcactcctgccctgcccccaccttcccagtcccacaggccacccctggcttgggctgggttctgtgaagttacgtatttattgagcttttggttcttttataaagacttgtctagactccactgggaagagtcctttgctttggggcccagtgactcggggcacttgagttcagggcggcctccttgtgttcctgtgctcctccacttgccacggatgggccacggatggagcttgccatgggaagcactgggaagtaatggggtgtggggtgccaccagaccaacacccccagacttccccaccttcagccaccatcagagcctctccccaggtgccccccggggattcagggctgaatctgcccagttcccacactcaggccagccctcttgggaaggtgggtcctccatgggggtcccttcaggaactttttttttttttttaatacagagtctcactctgtcacctaggttggagtgcagtggtgtgatgtcggctcactgcaacctctgcctcccgggttcaaacgattctcctgccccagccactctagtagctggaactgcaggtgtgcaccaccacgccgggctagtttttgtattttaagtagagacggcatttcaccatattggtcaggctggtctcgaactcctgaccccaagtgttccgcccgcctctgcctcccatagtgctagaattacaggcctgagctactgcgcttggccccttgcggtacttttggcccaacctcctccatggctggggacgcggaggccgagagagaagtcacttgccctggctctaccttgaagtggttctcagggttggggcgagagtcggggtggggaccgagatgcagctctatcctgtgcccctggtcgcagcaggcagcccagcgcttcgcgtgttctacttggcctgtccgctgccgcctaatgagctcaggtctaggccgagcagagggggcacctggtcggactcggttgggctcgggcggccccgcctccccccgcccgccaggcgggcccttctcgacggcgcggggcgggccctgcgggcgcggggctgaaggcggaaccacgacgggcagagagcacggagccgggaagcccctgggcgcccgtcggagggctatggagcagcggccgc

SEQ ID NO: 13405 - DNA, 4794 bp, Homo sapiens
accgcggtgcactccagcccccaggaagagaggcagcttggagggggccaaattcagggtcaaagatgagtcttggggaacgggggtcgccccagaccttcgggggctcctctgtctctaaagggagcgatgcagggcacgaccagagccccgctgaaaagaagggactgcgctgtcagaaccccgcctgcatggacaaggggcgggcggccaaggtatgtcaccacgccgactgccagcagctgcaccgccgggggcccctcaacctctgcgaggcctgtgacagcaagttccacagcaccatgcattatgatgggcatgtccgcttcgaccttcccccacaaggctctgtgctggcccggaacgtgtccacccggtcatgcccgccgcgcaccagccccgcagtggacttggaggaggaggaggaggagagctctgtggatggcaaaggggaccggaagagcacaggcctgaaactctccaagaagaaagcaaggaggagacacacggatgacccaagcaaggaatgcttcactctgaaatttgacctgaatgtggacattgagacagagatcgtcccagccatgaagaagaagtcactgggggaggtgctgctgcctgtatttgaaaggaagggcattgcgctgggcaaagtggacatctacctggaccagtccaacacacccctgtccctcaccttcgaggcctacaggttcgggggacactaccttcgtgtcaaagccccagccaagcctggagatgagggcaaggtggagcagggcatgaaggactccaagtccctgagtttgccgattctgcggccagctgggaccgggccccccgccctggagcgtgtggacgcccagagccgccgggagagcctggacatcttggcccctggccgccgccgcaagaacatgtcggagttcctgggggaggcgagcatccccgggcaggagccccccacgccctccagctgctctctgcccagcggcagcagtggcagcaccaacactggcgacagctggaagaaccgggcggccagtcgcttcagcggctttttcagctccggccccagcaccagcgcctttggccgggaggtagacaagatggagcagctggagggcaagctgcacacctacagcctcttcgggctgcccaggctgccccgggggctgcgcttcgaccatgactcctgggaggaggagtacgatgaagacgaggatgaggacaatgcctgcctgaggctggaggacagctggcgggagctcattgatgggcatgagaagctgacccggcggcagtgccaccagcaggaggcggtgtgggagctgctgcacacggaggcctcctacatcaggaaactgcgggtgatcatcaacctgttcctgtgctgcctcctgaacctgcaagagtcagggctgctgtgtgaggtggaggcggagcgcctgttcagcaacatcccggagatcgcgcagctgcaccgcaggctgtgggctagcgtgatggcgccggtgctggagaaggcgcggcgcacgcgagcgctgctacagcccggggacttcctcaaaggcttcaagatgttcggctcgctcttcaagccctacatccgctactgcatggaggaggagggctgcatggagtacatgcgcggcctgctgcgcgacaacgacctcttccgggcctacatcacgtgggcggagaagcacccacagtgccagaggctgaagctgagcgacatgctggccaaaccccaccagcggctcaccaagtacccgctgctgctcaagtcggtgctgaggaagaccgaggagccgcgcgccaaggaggccgtcgtcgccatgatcggctccgtggagcgcttcatccaccacgtgaacgcgtgcatgcggcagcggcaggagcggcagcggctggcggccgtggtgagccgcatcgacgcctacgaggtggtggaaagcagcagcgacgaagtggacaagctcctgaaggaatttctgcacctggacttgacagcgcccatccctggcgcctccccggaggagacgcggcagctgctgctggaggggagcctgaggatgaaggaggggaaggacagcaagatggatgtgtactgcttcctcttcacggatctgctgttggtgaccaaagcagtgaagaaggcagagaggaccagggtcatcaggccacccctgctcgtggacaagattgtgtgccgggagctacgggaccctgggtccttcctccttatctacctgaatgagtttcacagtgctgtaggggcctacacgttccaggccagtggccaggccttgtgccgtggctgggtggacaccatttacaatgcccagaaccagctgcaacagctgcgtgcacaggagcccccaggcagtcagcagcccctgcagagcctggaagaggaggaggatgagcaggaggaggaagaggaggaggaggaggaggaggaggaaggcgaggacagtggcacttcagctgccagctcccctaccatcatgcggaaaagcagcggcagccccgactctcagcactgtgcctcagatggctccacggagaccctggccatggttgtggtagagcctggggacacgctgtcctcccccgagttcgacagcggtcctttcagctcccagtctgatgagacctctctcagcaccactgcctcatctgccacgcccaccagtgagctgctgcccctgggtccggtggacggccgctcctgctccatggactctgcctacggcaccctctccccaacctccttacaagactttgtggccccaggcccaatggcagagctagtgcctcgggccccagagtccccacgagttccttcccctccaccctcgccccgtctccgccgccgcacccctgtccagctgttgagctgcccgccccacctgctcaagtctaagtccgaggccagcctcctccagctgctggcaggggctggcacccatgggacaccctctgcccccagccgcagcctgtcagagctctgcctggctgttccagccccaggtattaggactcagggctcccctcaggaagctgggcccagctgggattgccgaggggcccctagccctggcagcggtcctgggctagtcggctgcctggccggggaacctgcaggctcccacaggaagaggtgtggagacctgccctcgggggcctctcccagggtccagcctgagcccccaccaggggtctctgcccagcacaggaagctgaccctggcccagctctaccgaatcaggaccaccctgctgcttaactccacgctcactgcctcggaggtctgagcagagggaggcccccaagagtgccattgaccaagagacagcagacagcctgcctcctggggcgtgccggcacctgcttcagctactgcctcctgtatgcatgagccggatgctgggcaggatccctgcctacgcccgggcccgatttgcgctttgccggactggatggagtggaggaggcccaggccacagtaccaccccacctgcccaggcagcccctcgtcacctactccccgaagttaccagctcagctcgagtcttcagggctgggctcctaggctgcccatcctacttctaccctcactggcctccagtgggattcactcctgccctgcccccaccttcccagtcccacaggccacccctggcttgggctgggttctgtgaagttacgtatttattgagcttttggttcttttataaagacttgtctagactccactgggaagagtcctttgctttggggcccagtgactcggggcacttgagttcagggcggcctccttgtgttcctgtgctcctccacttgccacggatgggccacggatggagcttgccatgggaagcactgggaagtaatggggtgtggggtgccaccagaccaacacccccagacttccccaccttcagccaccatcagagcctctccccaggtgccccccggggattcagggctgaatctgcccagttcccacactcaggccagccctcttgggaaggtgggtcctccatgggggtcccttcaggaactttttttttttttttaatacagagtctcactctgtcacctaggttggagtgcagtggtgtgatgtcggctcactgcaacctctgcctcccgggttcaaacgattctcctgccccagccactctagtagctggaactgcaggtgtgcaccaccacgccgggctagtttttgtattttaagtagagacggcatttcaccatattggtcaggctggtctcgaactcctgaccccaagtgttccgcccgcctctgcctcccatagtgctagaattacaggcctgagctactgcgcttggccccttgcggtacttttggcccaacctcctccatggctggggacgcggaggccgagagagaagtcacttgccctggctctaccttgaagtggttctcagggttggggcgagagtcggggtggggaccgagatgcagctctatcctgtgcccctggtcgcagcaggcagcccagcgcttcgcgtgttctacttggcctgtccgctgccgcctaatgagctcaggtctaggccgagcagagggggcacctggtcggactcggttgggctcgggcggccccgcctccccccgcccgccaggcgggcccttctcgacggcgcggggcgggccctgcgggcgcggggctgaaggcggaaccacgacgggcagagagcacggagccgggaagcccctgggcgcccgtcggagggctatggagcagcggccgc

SEQ ID NO: 13406 - DNA, 4375 bp, Homo sapiens
atgtttctctactggaggaagcggggcacctacgagctggaggccctgcccggcgacctggccgagctggagctggggacggtggagcgtttctcgtggagctccaccctggacatcatcgaggacctcggggacgaccagagccccgctgaaaagaagggactgcgctgtcagaaccccgcctgcatggacaaggggcgggcggccaaggtatgtcaccacgccgactgccagcagctgcaccgccgggggcccctcaacctctgcgaggcctgtgacagcaagttccacagcaccatgcattatgatgggcatgtccgcttcgaccttcccccacaaggctctgtgctggcccggaacgtgtccacccggtcatgcccgccgcgcaccagccccgcagtggacttggaggaggaggaggaggagagctctgtggatggcaaaggggaccggaagagcacaggcctgaaactctccaagaagaaagcaaggaggagacacacggatgacccaagcaaggaatgcttcactctgaaatttgacctgaatgtggacattgagacagagatcgtcccagccatgaagaagaagtcactgggggaggtgctgctgcctgtatttgaaaggaagggcattgcgctgggcaaagtggacatctacctggaccagtccaacacacccctgtccctcaccttcgaggcctacaggttcgggggacactaccttcgtgtcaaagccccagccaagcctggagatgagggcaaggtggagcagggcatgaaggactccaagtccctgagtttgccgattctgcggccagctgggaccgggccccccgccctggagcgtgtggacgcccagagccgccgggagagcctggacatcttggcccctggccgccgccgcaagaacatgtcggagttcctgggggaggcgagcatccccgggcaggagccccccacgccctccagctgctctctgcccagcggcagcagtggcagcaccaacactggcgacagctggaagaaccgggcggccagtcgcttcagcggctttttcagctccggccccagcaccagcgcctttggccgggaggtagacaagatggagcagctggagggcaagctgcacacctacagcctcttcgggctgcccaggctgccccgggggctgcgcttcgaccatgactcctgggaggaggagtacgatgaagacgaggatgaggacaatgcctgcctgaggctggaggacagctggcgggagctcattgatgggcatgagaagctgacccggcggcagtgccaccagcaggaggcggtgtgggagctgctgcacacggaggcctcctacatcaggaaactgcgggtgatcatcaacctgttcctgtgctgcctcctgaacctgcaagagtcagggctgctgtgtgaggtggaggcggagcgcctgttcagcaacatcccggagatcgcgcagctgcaccgcaggctgtgggctagcgtgatggcgccggtgctggagaaggcgcggcgcacgcgagcgctgctacagcccggggacttcctcaaaggcttcaagatgttcggctcgctcttcaagccctacatccgctactgcatggaggaggagggctgcatggagtacatgcgcggcctgctgcgcgacaacgacctcttccgggcctacatcacgtgggcggagaagcacccacagtgccagaggctgaagctgagcgacatgctggccaaaccccaccagcggctcaccaagtacccgctgctgctcaagtcggtgctgaggaagaccgaggagccgcgcgccaaggaggccgtcgtcgccatgatcggctccgtggagcgcttcatccaccacgtgaacgcgtgcatgcggcagcggcaggagcggcagcggctggcggccgtggtgagccgcatcgacgcctacgaggtggtggaaagcagcagcgacgaagtggacaagctcctgaaggaatttctgcacctggacttgacagcgcccatccctggcgcctccccggaggagacgcggcagctgctgctggaggggagcctgaggatgaaggaggggaaggacagcaagatggatgtgtactgcttcctcttcacggatctgctgttggtgaccaaagcagtgaagaaggcagagaggaccagggtcatcaggccacccctgctcgtggacaagattgtgtgccgggagctacgggaccctgggtccttcctccttatctacctgaatgagtttcacagtgctgtaggggcctacacgttccaggccagtggccaggccttgtgccgtggctgggtggacaccatttacaatgcccagaaccagctgcaacagctgcgtgcacaggagcccccaggcagtcagcagcccctgcagagcctggaagaggaggaggatgagcaggaggaggaagaggaggaggaggaggaggaggaggaaggcgaggacagtggcacttcagctgccagctcccctaccatcatgcggaaaagcagcggcagccccgactctcagcactgtgcctcagatggctccacggagaccctggccatggttgtggtagagcctggggacacgctgtcctcccccgagttcgacagcggtcctttcagctcccagtctgatgagacctctctcagcaccactgcctcatctgccacgcccaccagtgagctgctgcccctgggtccggtggacggccgctcctgctccatggactctgcctacggcaccctctccccaacctccttacaagactttgtggccccaggcccaatggcagagctagtgcctcgggccccagagtccccacgagttccttcccctccaccctcgccccgtctccgccgccgcacccctgtccagctgttgagctgcccgccccacctgctcaagtctaagtccgaggccagcctcctccagctgctggcaggggctggcacccatgggacaccctctgcccccagccgcagcctgtcagagctctgcctggctgttccagccccaggtattaggactcagggctcccctcaggaagctgggcccagctgggattgccgaggggcccctagccctggcagcggtcctgggctagtcggctgcctggccggggaacctgcaggctcccacaggaagaggtgtggagacctgccctcgggggcctctcccagggtccagcctgagcccccaccaggggtctctgcccagcacaggaagctgaccctggcccagctctaccgaatcaggaccaccctgctgcttaactccacgctcactgcctcggaggtctgagcagagggaggcccccaagagtgccattgaccaagagacagcagacagcctgcctcctggggcgtgccggcacctgcttcagctactgcctcctgtatgcatgagccggatgctgggcaggatccctgcctacgcccgggcccgatttgcgctttgccggactggatggagtggaggaggcccaggccacagtaccaccccacctgcccaggcagcccctcgtcacctactccccgaagttaccagctcagctcgagtcttcagggctgggctcctaggctgcccatcctacttctaccctcactggcctccagtgggattcactcctgccctgcccccaccttcccagtcccacaggccacccctggcttgggctgggttctgtgaagttacgtatttattgagcttttggttcttttataaagacttgtctagactccactgggaagagtcctttgctttggggcccagtgactcggggcacttgagttcagggcggcctccttgtgttcctgtgctcctccacttgccacggatgggccacggatggagcttgccatgggaagcactgggaagtaatggggtgtggggtgccaccagaccaacacccccagacttccccaccttcagccaccatcagagcctctccccaggtgccccccggggattcagggctgaatctgcccagttcccacactcaggccagccctcttgggaaggtgggtcctccatgggggtcccttcaggaactttttttttttttttaatacagagtctcactctgtcacctaggttggagtgcagtggtgtgatgtcggctcactgcaacctctgcctcccgggttcaaacgattctcctgccccagccactctagtagctggaactgcaggtgtgcaccaccacgccgggctagtttttgtattttaagtagagacggcatttcaccatattggtcaggctggtctcgaactcctgaccccaagtgttccgcccgcctctgcctcccatagtgctagaattacaggcctgagctactgcgcttggccccttgcggta

SEQ ID NO: 13407 - DNA, 6706 bp, Homo sapiens
tggcaaatccttccttccccggggtagaagtccagggtgagaaattggttccgaactcaaaggaacccagtgccgggccacagccgggtcacgtggccggcggccccccatgacgtgctggctgcggggcgtcacggcgacgttcgggcgacctgccgagtggccaggctacctcagtcacctgtgtggtcgcagtgctgccatggacctgggacccatgcgcaagagttaccgcggggaccgagaggtgccgccgctagggccaggcctcctgcaggggcgggggaaaaggggtccccggagtcatctacagcggggaggggagtagtaggagcccctcggggcttctggggccacccggtggggcaaggaggtttgaggatcaccccccgtgggaaaagggggcttcaaagacatcccaccaggggaggagttccggggaaacgcaaatgaagatgggttcaaaaggcagcctttcgtaatgggtaagagctcgaactttggagcctgcctgggttggaatgtttaatgtatctgggcctcagtttcctcatctgggaagtgatagtatctgcctcacggggatgttatggtctaagatgtttgtaaagtgcttagaaccctgctactcgacaggtagcaaggtcaaataacttgctcagtcccacagctagtgatgaatgaatcggggtttcatgtgatggatgtcaggactgtgctgggcctccctcaagggcgggggaagaggggtcctcggagtcatctactggggggaggggagtaggaggaaacagcccctcagggcttctggggccaccccctggggcaaggagatttgggggtcacccaaacctccttgtgccaggtgggcatggtcatgggcccctctttaggtgggtacagtgacaaacagcttacaaactgtttgacaaaaaagtaagtggaatatgggggaaggggactagctcggggaggaggggaggagaaagctcttagcttactgccttcagtactttctgctgaccactgggaagttcttttccttttcgctcctcaggaggggaaccaagagaaccttttaggaattggggtccagggccctggttgccaaatctggttgcatgtgggcatttctagaaacgcttgtttaaaatgcagtttttccagcctgggcaacatagtgagaccctgtctctacaaaaaattaaaattagtcgagcatgttggagcgtgcctgtaattccagctacttgggaggatgaggttggaggattgcttgagctcaggaagttgagactgcagtaagccgagatcacaccaccgcactccagcctaggtgacagagtgagaccctgtctaaaataaataaataaataaataaaaatgcagtttttgatgaagcctcagacctgctgaatgagaaattttgggggtggagcccagaaagttttttttatgctccccaggtgattctgatgcacagacagttttgacacccatgacatgtaaccctgatttatccatcactagctgtgggacagcaagttgtctgagtttttatgcctgtttcctcacctgtaaaatggggcacagaatcttcttactgcatactatttcttattttaaggtcattgtcatgaggactaaatgagttgatttttgaaaagtgactagaacagtgccaggtccatagtaagcactatatatgtttattaaatgaaataaatctcctttcctaggcatttgaggagactcatctgacctcccttgacccagtgaaacagtttgctgcctggtttgaggaggctgttcagtgtcctgacataggggaagccaatgccatgtgtctggctacctgcaccaggtgggcatggctgtgggcccctctttgggtggatacatatgaactaggaagcttatgaagctctctactctggatgccaattttatggttccagctctgttattaacatgctctgtggctttaggcaagatacttgtcctctctgggcctgtgtccttacctataaaccaaagaccaggccacaaaattacatttcagtgataaaaatgcagtgccttgttcatttctgcccttgatacatccacacacaaccccttgcctccctcatctccccatctacccaagccccgtctgccattcaggagctacttctcctggtgaagctctgtctctctctcgaaatctagcacagtgcttgactatatcattcctttgacaatcatatgccctttgagacatcacttgtattagcctgttattcaattctcctcgataaagtgtaaggccttgtagccagtgctcttgtactgtgcgagtggatatctcccagagctctgagcagaggggctgatctcatagcaccactgtgatcccgaagcattggatgattgcattattgttagtccctgcccttagggtcttatgaatttgctagggctgtcttaacaaaatactgtagactggatagcttaaacaacaggagtttatttccttatagttctggtggctggaagtccaagatcaaggtgccatcaggggtggtttctgatgaggcctctgcttggggtttgcagacagctactttttaccatgtcctcacactgcctttcgtgtgtgtgtgtgtgtgtgtgtgtgtgtgtgtgtgttgtggagggcaagggaggtggttctgaagtgtctcttctcttacagtgacaccagtcctactggattagggccccacccctatgaccttacttaaccttaattacctccataaggtccccttctccaaatacagtcacattggggtttaaggctttaacataggggtttggggtgacacaattcagcccataacagggccccaggctgtggtgtcatacctctaggacaaatccccaggagcacatgggacggggtagcctgacagcccaataaagggggtgcagctggagggggtgctgagacatcctttggggagagggactatagccagaacattgaagcagactctgaccacagtgctctgctctttgctcctagagatggaaaaccctctgctcgcatgttgctgctgaagggcttcgggaaagatggcttccgcttcttcactaacttcgagagtcgaaaaggaaaagagctggtgggtgaaaagagctagtaatctttcccagggcctgcagggtttggctcttgcttcctcagtcaccttcttatgccaccccacccccccagtctacttgctctctgtgtgcaggtgccctcctgccatgaggccttggcacttgctgtgctctttgccataaatgaatgaatgcactttctaaccagcctcaccccatcagccatgacctgttccttcagatctcagcccacatgttacctcctcaggaaggccttccttgactctcactcagactcagcccctcatgctgtttgctgccattataacttgcaactttcttttttgtcttcttcttcagtttgtaactgagcatttgtttgggtgattatgtaactgatatttgtctcctctgctcaacagtaagctctgtaggagtggaggctgctctgttttatctctgctgtatcccccgcacgtctcctgttgtcagacccagagtgggcacttcgcgtgcattcaatgaatgaatccaaaatgagtaaacctccctgagtccatgccagccaagcatgcatttctcaagactcacaaatctgtgggtgagagaaatcacccagtctcactttggagtccgactggcttaaacttagctccaccacttcctgcaggaacttgggcacgtgacttagcctgtctctgtgtctgtgacaataggcctacttttgagggtttaaatgagctcttacggtgggtgcatctgctgtgggcctgcgcactacagctctcctgccttttccctgcatgccggaggcctcctctccctgtcctgatggctggctgtggattctcttttacttctaggactctaatccctttgcttcccttgtcttctactgggagccacttaaccgtcaggtgagtgaattttcccaggacagcctgggatgggctgggttggcagggcctgagtttatggctacgtctagcgaaggtccccagactgggcaaacatcccagctgggcactctgcctctaaaatagccctcagttagttggagccaagagtggtggggcagccgatcgaacagagaggaacggggcctgtgctggtagggagggcaggtggcatttaatgccattcacccagagccatccctgagcaggtgcgtgtggaaggccctgtgaagaaactgcctgaggaggaggctgagtgctacttccactcccgccccaagagcagccagattggggctgtggtcagccaccagagttctgtgatccctgatcgggaggtgagtggagctccgctgtagtcctccaggtggtggaggctttggcttatccccagaagctgtccccaggagatgccaggagatgtccccaggagatgtcctctctctccagcccagtgaaaacagtgaaaaggacagtgagaagggaaagtgggggtagggagaggggaaataggcctcctctgtccatctggccatcctgttgactgctcctggaggacagaggccagtctgctctgctcacccatgtccccagcacatatccccaggaagtccttgttaatgaatcattgactgggcctggcccttcttctaactcttccccctggacagtatctgagaaagaaaaatgaggaactggaacagctctaccaggatcaagaggtgcccaagccaaaatcctggtgagtgacatctggtagtcctctagaaagggacaccaggcccctgtgtttacttgaagccacctgcctggggaatcacagatctcctcctccctggccacccttgtcagatgcatcccagcaacttccttcaagaggccctgggatgaggggtgagggtgggagagtgacctggctagaaaactccacagagcactgaaacctctgcttctccttataggggtggctatgtcctgtaccctcaggtgatggagttctggcaaggtcaaaccaaccgcctgcatgaccggatagtctttcggcggggcctacccacaggagattcccctttggggcccatgacccaccgcggggaggaagactggctctatgagagacttgcaccttaactctgggacctgctggcccagagtggagctagggctaggtgtcaagagagggtgtgggattgggacccaggcccttctttctaaactcaacccatttccctccctaccccttatcttcaggactcttcagagctaatcctctaagttctctgtactcagttggttctcagttagctggtcaagtggagtgtaatggtggcgtagagaatcacaaatggaaaataattccataattatttttttgaccttgcctatgattgattaggatagctccctctaggggtagcagccggtgtgactccctttctggtgacagacagggccccagcagccctgtctgttaccatgtgagtcatactggccaaagcttagtcctagcatatgcacctgagccaacctggccaatcagattgttttgtcaataatttgaaatttgaactggagagatccagaaccttgggagtcattaaagccaagtcattcatagcagccaggaaacaataggaaccaaaagcctctgcctgctgctattgcaattcccaggatctctccttccctggatccctccctcccaggtctgggctgtgcagttcctccccctgccttaaaacaccccactatctctgtaaagtctctctctctcttttttttttttttacttaatctagctagaatctatttctgttgattacaacttaactaactcatttacggataggacttttttttttctttttttcttttttcttttcttttttttttttgagatggagtctcactctgtcacccaggctggagtgcagtggtgtgatcttggctcactgcaacctctgcctcccaggttcaagcaattctcctgcctcagcctcccaagtagctgggactacaggcacacgccaccacacccaactaatttttgtatttttagtagagatggggtttcaccatgttggccaggattgtctccatctcttgaccttgtgatccacccacctcagcctcccaaagtgctgggattacaggcatgagccaccacacccagcgagacggggtttcattatgttggccaggctggtctccaactcctgacctaaagtgatctgcccgccttggcctcccaaagtgctgggattacagacatgagccaccacgcttggccgggatagtatatttttatagcacttcccctactgattgctgccttctctgtggctacaagggacccacagaattacagggaagttacagggaagcaggtttcatctcaatattgggagagatttcaaacaatcacacctgcctgagaaggagtgggctgtcactaggaatttttattcccagtccgtcaggaattttgtagaagggcttcatgtgctggtaccaataggacaggaagattttaatcagctttactatctatgtttttttatggaaactgtgtgtatgtatacatacattttccaaaaagaaaaattaaatgattatagaga

SEQ ID NO: 13408 - DNA, 2256 bp, Homo sapiens
tggcaaatccttccttccccggggtagaagtccagggtgagaaattggttccgaactcaaaggaacccagtgccgggccacagccgggtcacgtggccggcggccccccatgacgtgctggctgcggggcgtcacggcgacgttcgggcgacctgccgagtggccaggctacctcagtcacctgtgtggtcgcagtgctgccatggacctgggacccatgcgcaagagttaccgcggggaccgagaggcatttgaggagactcatctgacctcccttgacccagtgaaacagtttgctgcctggtttgaggaggctgttcagtgtcctgacataggggaagccaatgccatgtgtctggctacctgcaccagagatggaaaaccctctgctcgcatgttgctgctgaagggcttcgggaaagatggcttccgcttcttcactaacttcgagagtcgaaaaggaaaagagctggactctaatccctttgcttcccttgtcttctactgggagccacttaaccgtcagtatctgagaaagaaaaatgaggaactggaacagctctaccaggatcaagaggtgcccaagccaaaatcctggggtggctatgtcctgtaccctcaggtgatggagttctggcaaggtcaaaccaaccgcctgcatgaccggatagtctttcggcggggcctacccacaggagattcccctttggggcccatgacccaccgcggggaggaagactggctctatgagagacttgcaccttaactctgggacctgctggcccagagtggagctagggctaggtgtcaagagagggtgtgggattgggacccaggcccttctttctaaactcaacccatttccctccctaccccttatcttcaggactcttcagagctaatcctctaagttctctgtactcagttggttctcagttagctggtcaagtggagtgtaatggtggcgtagagaatcacaaatggaaaataattccataattatttttttgaccttgcctatgattgattaggatagctccctctaggggtagcagccggtgtgactccctttctggtgacagacagggccccagcagccctgtctgttaccatgtgagtcatactggccaaagcttagtcctagcatatgcacctgagccaacctggccaatcagattgttttgtcaataatttgaaatttgaactggagagatccagaaccttgggagtcattaaagccaagtcattcatagcagccaggaaacaataggaaccaaaagcctctgcctgctgctattgcaattcccaggatctctccttccctggatccctccctcccaggtctgggctgtgcagttcctccccctgccttaaaacaccccactatctctgtaaagtctctctctctcttttttttttttttacttaatctagctagaatctatttctgttgattacaacttaactaactcatttacggataggacttttttttttctttttttcttttttcttttcttttttttttttgagatggagtctcactctgtcacccaggctggagtgcagtggtgtgatcttggctcactgcaacctctgcctcccaggttcaagcaattctcctgcctcagcctcccaagtagctgggactacaggcacacgccaccacacccaactaatttttgtatttttagtagagatggggtttcaccatgttggccaggattgtctccatctcttgaccttgtgatccacccacctcagcctcccaaagtgctgggattacaggcatgagccaccacacccagcgagacggggtttcattatgttggccaggctggtctccaactcctgacctaaagtgatctgcccgccttggcctcccaaagtgctgggattacagacatgagccaccacgcttggccgggatagtatatttttatagcacttcccctactgattgctgccttctctgtggctacaagggacccacagaattacagggaagttacagggaagcaggtttcatctcaatattgggagagatttcaaacaatcacacctgcctgagaaggagtgggctgtcactaggaatttttattcccagtccgtcaggaattttgtagaagggcttcatgtgctggtaccaataggacaggaagattttaatcagctttactatctatgtttttttatggaaactgtgtgtatgtatacatacattttccaaaaagaaaaattaaatgattatagaga

SEQ ID NO: 13409 - DNA, 5571 bp, Homo sapiens
aaatccttccttccccggggtagaagtccagggtgagaaattggttccgaactcaaaggaacccagtgccgggccacagccgggtcacgtggccggcggccccccatgacgtgctggctgcggggcgtcacggcgacgttcgggcgacctgccgagtggccaggctacctcagtcacctgtgtggtcgcagtgctgccatggacctgggacccatgcgcaagagttaccgcggggaccgagaggtgccgccgctagggccaggcctcctgcaggggcgggggaaaaggggtccccggagtcatctacagcggggaggggagtagtaggagcccctcggggcttctggggccacccggtggggcaaggaggtttgaggatcaccccccgtgggaaaagggggcttcaaagacatcccaccaggggaggagttccggggaaacgcaaatgaagatgggttcaaaaggcagcctttcgtaatgggtaagagctcgaactttggagcctgcctgggttggaatgtttaatgtatctgggcctcagtttcctcatctgggaagtgatagtatctgcctcacggggatgttatggtctaagatgtttgtaaagtgcttagaaccctgctactcgacaggtagcaaggtcaaataacttgctcagtcccacagctagtgatgaatgaatcggggtttcatgtgatggatgtcaggactgtgctgggcctccctcaagggcgggggaagaggggtcctcggagtcatctactggggggaggggagtaggaggaaacagcccctcagggcttctggggccaccccctggggcaaggagatttgggggtcacccaaacctccttgtgccaggtgggcatggtcatgggcccctctttaggtgggtacagtgacaaacagcttacaaactgtttgacaaaaaagtaagtggaatatgggggaaggggactagctcggggaggaggggaggagaaagctcttagcttactgccttcagtactttctgctgaccactgggaagttcttttccttttcgctcctcaggaggggaaccaagagaaccttttaggaattggggtccagggccctggttgccaaatctggttgcatgtgggcatttctagaaacgcttgtttaaaatgcagtttttccagcctgggcaacatagtgagaccctgtctctacaaaaaattaaaattagtcgagcatgttggagcgtgcctgtaattccagctacttgggaggatgaggttggaggattgcttgagctcaggaagttgagactgcagtaagccgagatcacaccaccgcactccagcctaggtgacagagtgagaccctgtctaaaataaataaataaataaataaaaatgcagtttttgatgaagcctcagacctgctgaatgagaaattttgggggtggagcccagaaagttttttttatgctccccaggtgattctgatgcacagacagttttgacacccatgacatgtaaccctgatttatccatcactagctgtgggacagcaagttgtctgagtttttatgcctgtttcctcacctgtaaaatggggcacagaatcttcttactgcatactatttcttattttaaggtcattgtcatgaggactaaatgagttgatttttgaaaagtgactagaacagtgccaggtccatagtaagcactatatatgtttattaaatgaaataaatctcctttcctaggcatttgaggagactcatctgacctcccttgacccagtgaaacagtttgctgcctggtttgaggaggctgttcagtgtcctgacataggggaagccaatgccatgtgtctggctacctgcaccaggtgggcatggctgtgggcccctctttgggtggatacatatgaactaggaagcttatgaagctctctactctggatgccaattttatggttccagctctgttattaacatgctctgtggctttaggcaagatacttgtcctctctgggcctgtgtccttacctataaaccaaagaccaggccacaaaattacatttcagtgataaaaatgcagtgccttgttcatttctgcccttgatacatccacacacaaccccttgcctccctcatctccccatctacccaagccccgtctgccattcaggagctacttctcctggtgaagctctgtctctctctcgaaatctagcacagtgcttgactatatcattcctttgacaatcatatgccctttgagacatcacttgtattagcctgttattcaattctcctcgataaagtgtaaggccttgtagccagtgctcttgtactgtgcgagtggatatctcccagagctctgagcagaggggctgatctcatagcaccactgtgatcccgaagcattggatgattgcattattgttagtccctgcccttagggtcttatgaatttgctagggctgtcttaacaaaatactgtagactggatagcttaaacaacaggagtttatttccttatagttctggtggctggaagtccaagatcaaggtgccatcaggggtggtttctgatgaggcctctgcttggggtttgcagacagctactttttaccatgtcctcacactgcctttcgtgtgtgtgtgtgtgtgtgtgtgtgtgtgtgtgtgttgtggagggcaagggaggtggttctgaagtgtctcttctcttacagtgacaccagtcctactggattagggccccacccctatgaccttacttaaccttaattacctccataaggtccccttctccaaatacagtcacattggggtttaaggctttaacataggggtttggggtgacacaattcagcccataacagggccccaggctgtggtgtcatacctctaggacaaatccccaggagcacatgggacggggtagcctgacagcccaataaagggggtgcagctggagggggtgctgagacatcctttggggagagggactatagccagaacattgaagcagactctgaccacagtgctctgctctttgctcctagagatggaaaaccctctgctcgcatgttgctgctgaagggcttcgggaaagatggcttccgcttcttcactaacttcgagagtcgaaaaggaaaagagctggtgggtgaaaagagctagtaatctttcccagggcctgcagggtttggctcttgcttcctcagtcaccttcttatgccaccccacccccccagtctacttgctctctgtgtgcaggtgccctcctgccatgaggccttggcacttgctgtgctctttgccataaatgaatgaatgcactttctaaccagcctcaccccatcagccatgacctgttccttcagatctcagcccacatgttacctcctcaggaaggccttccttgactctcactcagactcagcccctcatgctgtttgctgccattataacttgcaactttcttttttgtcttcttcttcagtttgtaactgagcatttgtttgggtgattatgtaactgatatttgtctcctctgctcaacagtaagctctgtaggagtggaggctgctctgttttatctctgctgtatcccccgcacgtctcctgttgtcagacccagagtgggcacttcgcgtgcattcaatgaatgaatccaaaatgagtaaacctccctgagtccatgccagccaagcatgcatttctcaagactcacaaatctgtgggtgagagaaatcacccagtctcactttggagtccgactggcttaaacttagctccaccacttcctgcaggaacttgggcacgtgacttagcctgtctctgtgtctgtgacaataggcctacttttgagggtttaaatgagctcttacggtgggtgcatctgctgtgggcctgcgcactacagctctcctgccttttccctgcatgccggaggcctcctctccctgtcctgatggctggctgtggattctcttttacttctaggactctaatccctttgcttcccttgtcttctactgggagccacttaaccgtcaggtgagtgaattttcccaggacagcctgggatgggctgggttggcagggcctgagtttatggctacgtctagcgaaggtccccagactgggcaaacatcccagctgggcactctgcctctaaaatagccctcagttagttggagccaagagtggtggggcagccgatcgaacagagaggaacggggcctgtgctggtagggagggcaggtggcatttaatgccattcacccagagccatccctgagcaggtgcgtgtggaaggccctgtgaagaaactgcctgaggaggaggctgagtgctacttccactcccgccccaagagcagccagattggggctgtggtcagccaccagagttctgtgatccctgatcgggaggtgagtggagctccgctgtagtcctccaggtggtggaggctttggcttatccccagaagctgtccccaggagatgccaggagatgtccccaggagatgtcctctctctccagcccagtgaaaacagtgaaaaggacagtgagaagggaaagtgggggtagggagaggggaaataggcctcctctgtccatctggccatcctgttgactgctcctggaggacagaggccagtctgctctgctcacccatgtccccagcacatatccccaggaagtccttgttaatgaatcattgactgggcctggcccttcttctaactcttccccctggacagtatctgagaaagaaaaatgaggaactggaacagctctaccaggatcaagaggtgcccaagccaaaatcctggtgagtgacatctggtagtcctctagaaagggacaccaggcccctgtgtttacttgaagccacctgcctggggaatcacagatctcctcctccctggccacccttgtcagatgcatcccagcaacttccttcaagaggccctgggatgaggggtgagggtgggagagtgacctggctagaaaactccacagagcactgaaacctctgcttctccttataggggtggctatgtcctgtaccctcaggtgatggagttctggcaaggtcaaaccaaccgcctgcatgaccggatagtctttcggcggggcctacccacaggagattcccctttggggcccatgacccaccgcggggaggaagactggctctatgagagacttgcaccttaactctgggacctgctggcccagagtggagctagggctaggtgtcaagagagggtgtgggattgggacccaggcccttctttctaaactcaacccatttccctccctaccccttatcttcaggactcttcagagctaatcctctaagttctctgtactcagttggttctcagttagctggtcaagtggagtgtaatggtggcgtagagaatcacaaatggaaaataattccataattatttttttgaccttgcctatgattgattaggatagctccctctaggggtagcagccggtgtgactccctttctggtgacagacagggccccagcagccctgtctgttaccatgtgagtcatact

SEQ ID NO: 13410 - DNA, 1196 bp, Homo sapiens
aaatccttccttccccggggtagaagtccagggtgagaaattggttccgaactcaaaggaacccagtgccgggccacagccgggtcacgtggccggcggccccccatgacgtgctggctgcggggcgtcacggcgacgttcgggcgacctgccgagtggccaggctacctcagtcacctgtgtggtcgcagtgctgccatggacctgggacccatgcgcaagagttaccgcggggaccgagaggcatttgaggagactcatctgacctcccttgacccagtgaaacagtttgctgcctggtttgaggaggctgttcagtgtcctgacataggggaagccaatgccatgtgtctggctacctgcaccagagatggaaaaccctctgctcgcatgttgctgctgaagggcttcgggaaagatggcttccgcttcttcactaacttcgagagtcgaaaaggaaaagagctggtgcgtgtggaaggccctgtgaagaaactgcctgaggaggaggctgagtgctacttccactcccgccccaagagcagccagattggggctgtggtcagccaccagagttctgtgatccctgatcgggagtatctgagaaagaaaaatgaggaactggaacagctctaccaggatcaagaggtgcccaagccaaaatcctggggtggctatgtcctgtaccctcaggtgatggagttctggcaaggtcaaaccaaccgcctgcatgaccggatagtctttcggcggggcctacccacaggagattcccctttggggcccatgacccaccgcggggaggaagactggctctatgagagacttgcaccttaactctgggacctgctggcccagagtggagctagggctaggtgtcaagagagggtgtgggattgggacccaggcccttctttctaaactcaacccatttccctccctaccccttatcttcaggactcttcagagctaatcctctaagttctctgtactcagttggttctcagttagctggtcaagtggagtgtaatggtggcgtagagaatcacaaatggaaaataattccataattatttttttgaccttgcctatgattgattaggatagctccctctaggggtagcagccggtgtgactccctttctggtgacagacagggccccagcagccctgtctgttaccatgtgagtcatact

SEQ ID NO: 13411 - DNA, 5818 bp, Homo sapiens
gtccagggtgagaaattggttccgaactcaaaggaacccagtgccgggccacagccgggtcacgtggccggcggccccccatgacgtgctggctgcggggcgtcacggcgacgttcgggcgacctgccgagtggccaggctacctcagtcacctgtgtggtcgcagtgctgccatggacctgggacccatgcgcaagagttaccgcggggaccgagaggtgccgccgctagggccaggcctcctgcaggggcgggggaaaaggggtccccggagtcatctacagcggggaggggagtagtaggagcccctcggggcttctggggccacccggtggggcaaggaggtttgaggatcaccccccgtgggaaaagggggcttcaaagacatcccaccaggggaggagttccggggaaacgcaaatgaagatgggttcaaaaggcagcctttcgtaatgggtaagagctcgaactttggagcctgcctgggttggaatgtttaatgtatctgggcctcagtttcctcatctgggaagtgatagtatctgcctcacggggatgttatggtctaagatgtttgtaaagtgcttagaaccctgctactcgacaggtagcaaggtcaaataacttgctcagtcccacagctagtgatgaatgaatcggggtttcatgtgatggatgtcaggactgtgctgggcctccctcaagggcgggggaagaggggtcctcggagtcatctactggggggaggggagtaggaggaaacagcccctcagggcttctggggccaccccctggggcaaggagatttgggggtcacccaaacctccttgtgccaggtgggcatggtcatgggcccctctttaggtgggtacagtgacaaacagcttacaaactgtttgacaaaaaagtaagtggaatatgggggaaggggactagctcggggaggaggggaggagaaagctcttagcttactgccttcagtactttctgctgaccactgggaagttcttttccttttcgctcctcaggaggggaaccaagagaaccttttaggaattggggtccagggccctggttgccaaatctggttgcatgtgggcatttctagaaacgcttgtttaaaatgcagtttttccagcctgggcaacatagtgagaccctgtctctacaaaaaattaaaattagtcgagcatgttggagcgtgcctgtaattccagctacttgggaggatgaggttggaggattgcttgagctcaggaagttgagactgcagtaagccgagatcacaccaccgcactccagcctaggtgacagagtgagaccctgtctaaaataaataaataaataaataaaaatgcagtttttgatgaagcctcagacctgctgaatgagaaattttgggggtggagcccagaaagttttttttatgctccccaggtgattctgatgcacagacagttttgacacccatgacatgtaaccctgatttatccatcactagctgtgggacagcaagttgtctgagtttttatgcctgtttcctcacctgtaaaatggggcacagaatcttcttactgcatactatttcttattttaaggtcattgtcatgaggactaaatgagttgatttttgaaaagtgactagaacagtgccaggtccatagtaagcactatatatgtttattaaatgaaataaatctcctttcctaggcatttgaggagactcatctgacctcccttgacccagtgaaacagtttgctgcctggtttgaggaggctgttcagtgtcctgacataggggaagccaatgccatgtgtctggctacctgcaccaggtgggcatggctgtgggcccctctttgggtggatacatatgaactaggaagcttatgaagctctctactctggatgccaattttatggttccagctctgttattaacatgctctgtggctttaggcaagatacttgtcctctctgggcctgtgtccttacctataaaccaaagaccaggccacaaaattacatttcagtgataaaaatgcagtgccttgttcatttctgcccttgatacatccacacacaaccccttgcctccctcatctccccatctacccaagccccgtctgccattcaggagctacttctcctggtgaagctctgtctctctctcgaaatctagcacagtgcttgactatatcattcctttgacaatcatatgccctttgagacatcacttgtattagcctgttattcaattctcctcgataaagtgtaaggccttgtagccagtgctcttgtactgtgcgagtggatatctcccagagctctgagcagaggggctgatctcatagcaccactgtgatcccgaagcattggatgattgcattattgttagtccctgcccttagggtcttatgaatttgctagggctgtcttaacaaaatactgtagactggatagcttaaacaacaggagtttatttccttatagttctggtggctggaagtccaagatcaaggtgccatcaggggtggtttctgatgaggcctctgcttggggtttgcagacagctactttttaccatgtcctcacactgcctttcgtgtgtgtgtgtgtgtgtgtgtgtgtgtgtgtgtgttgtggagggcaagggaggtggttctgaagtgtctcttctcttacagtgacaccagtcctactggattagggccccacccctatgaccttacttaaccttaattacctccataaggtccccttctccaaatacagtcacattggggtttaaggctttaacataggggtttggggtgacacaattcagcccataacagggccccaggctgtggtgtcatacctctaggacaaatccccaggagcacatgggacggggtagcctgacagcccaataaagggggtgcagctggagggggtgctgagacatcctttggggagagggactatagccagaacattgaagcagactctgaccacagtgctctgctctttgctcctagagatggaaaaccctctgctcgcatgttgctgctgaagggcttcgggaaagatggcttccgcttcttcactaacttcgagagtcgaaaaggaaaagagctggtgggtgaaaagagctagtaatctttcccagggcctgcagggtttggctcttgcttcctcagtcaccttcttatgccaccccacccccccagtctacttgctctctgtgtgcaggtgccctcctgccatgaggccttggcacttgctgtgctctttgccataaatgaatgaatgcactttctaaccagcctcaccccatcagccatgacctgttccttcagatctcagcccacatgttacctcctcaggaaggccttccttgactctcactcagactcagcccctcatgctgtttgctgccattataacttgcaactttcttttttgtcttcttcttcagtttgtaactgagcatttgtttgggtgattatgtaactgatatttgtctcctctgctcaacagtaagctctgtaggagtggaggctgctctgttttatctctgctgtatcccccgcacgtctcctgttgtcagacccagagtgggcacttcgcgtgcattcaatgaatgaatccaaaatgagtaaacctccctgagtccatgccagccaagcatgcatttctcaagactcacaaatctgtgggtgagagaaatcacccagtctcactttggagtccgactggcttaaacttagctccaccacttcctgcaggaacttgggcacgtgacttagcctgtctctgtgtctgtgacaataggcctacttttgagggtttaaatgagctcttacggtgggtgcatctgctgtgggcctgcgcactacagctctcctgccttttccctgcatgccggaggcctcctctccctgtcctgatggctggctgtggattctcttttacttctaggactctaatccctttgcttcccttgtcttctactgggagccacttaaccgtcaggtgagtgaattttcccaggacagcctgggatgggctgggttggcagggcctgagtttatggctacgtctagcgaaggtccccagactgggcaaacatcccagctgggcactctgcctctaaaatagccctcagttagttggagccaagagtggtggggcagccgatcgaacagagaggaacggggcctgtgctggtagggagggcaggtggcatttaatgccattcacccagagccatccctgagcaggtgcgtgtggaaggccctgtgaagaaactgcctgaggaggaggctgagtgctacttccactcccgccccaagagcagccagattggggctgtggtcagccaccagagttctgtgatccctgatcgggaggtgagtggagctccgctgtagtcctccaggtggtggaggctttggcttatccccagaagctgtccccaggagatgccaggagatgtccccaggagatgtcctctctctccagcccagtgaaaacagtgaaaaggacagtgagaagggaaagtgggggtagggagaggggaaataggcctcctctgtccatctggccatcctgttgactgctcctggaggacagaggccagtctgctctgctcacccatgtccccagcacatatccccaggaagtccttgttaatgaatcattgactgggcctggcccttcttctaactcttccccctggacagtatctgagaaagaaaaatgaggaactggaacagctctaccaggatcaagaggtgcccaagccaaaatcctggtgagtgacatctggtagtcctctagaaagggacaccaggcccctgtgtttacttgaagccacctgcctggggaatcacagatctcctcctccctggccacccttgtcagatgcatcccagcaacttccttcaagaggccctgggatgaggggtgagggtgggagagtgacctggctagaaaactccacagagcactgaaacctctgcttctccttataggggtggctatgtcctgtaccctcaggtgatggagttctggcaaggtcaaaccaaccgcctgcatgaccggatagtctttcggcggggcctacccacaggagattcccctttggggcccatgacccaccgcggggaggaagactggctctatgagagacttgcaccttaactctgggacctgctggcccagagtggagctagggctaggtgtcaagagagggtgtgggattgggacccaggcccttctttctaaactcaacccatttccctccctaccccttatcttcaggactcttcagagctaatcctctaagttctctgtactcagttggttctcagttagctggtcaagtggagtgtaatggtggcgtagagaatcacaaatggaaaataattccataattatttttttgaccttgcctatgattgattaggatagctccctctaggggtagcagccggtgtgactccctttctggtgacagacagggccccagcagccctgtctgttaccatgtgagtcatactggccaaagcttagtcctagcatatgcacctgagccaacctggccaatcagattgttttgtcaataatttgaaatttgaactggagagatccagaaccttgggagtcattaaagccaagtcattcatagcagccaggaaacaataggaaccaaaagcctctgcctgctgctattgcaattcccaggatctctccttccctggatccctccctcccaggtctgggctgtgcagttcctccccctgccttaaaacaccccactatctctgtaaag

SEQ ID NO: 13412 - DNA, 1372 bp, Homo sapiens
gtccagggtgagaaattggttccgaactcaaaggaacccagtgccgggccacagccgggtcacgtggccggcggccccccatgacgtgctggctgcggggcgtcacggcgacgttcgggcgacctgccgagtggccaggctacctcagtcacctgtgtggtcgcagtgctgccatggacctgggacccatgcgcaagagttaccgcggggaccgagagagatggaaaaccctctgctcgcatgttgctgctgaagggcttcgggaaagatggcttccgcttcttcactaacttcgagagtcgaaaaggaaaagagctggactctaatccctttgcttcccttgtcttctactgggagccacttaaccgtcaggtgcgtgtggaaggccctgtgaagaaactgcctgaggaggaggctgagtgctacttccactcccgccccaagagcagccagattggggctgtggtcagccaccagagttctgtgatccctgatcgggagtatctgagaaagaaaaatgaggaactggaacagctctaccaggatcaagaggtgcccaagccaaaatcctggggtggctatgtcctgtaccctcaggtgatggagttctggcaaggtcaaaccaaccgcctgcatgaccggatagtctttcggcggggcctacccacaggagattcccctttggggcccatgacccaccgcggggaggaagactggctctatgagagacttgcaccttaactctgggacctgctggcccagagtggagctagggctaggtgtcaagagagggtgtgggattgggacccaggcccttctttctaaactcaacccatttccctccctaccccttatcttcaggactcttcagagctaatcctctaagttctctgtactcagttggttctcagttagctggtcaagtggagtgtaatggtggcgtagagaatcacaaatggaaaataattccataattatttttttgaccttgcctatgattgattaggatagctccctctaggggtagcagccggtgtgactccctttctggtgacagacagggccccagcagccctgtctgttaccatgtgagtcatactggccaaagcttagtcctagcatatgcacctgagccaacctggccaatcagattgttttgtcaataatttgaaatttgaactggagagatccagaaccttgggagtcattaaagccaagtcattcatagcagccaggaaacaataggaaccaaaagcctctgcctgctgctattgcaattcccaggatctctccttccctggatccctccctcccaggtctgggctgtgcagttcctccccctgccttaaaacaccccactatctctgtaaag

SEQ ID NO: 13413 - DNA, 4282 bp, Homo sapiens
gttcgggcgacctgccgagtggccaggctacctcagtcacctgtgtggtcgcagtgctgccatggacctgggacccatgcgcaagagttaccgcggggaccgagaggtgccgccgctagggccaggcctcctgcaggggcgggggaaaaggggtccccggagtcatctacagcggggaggggagtagtaggagcccctcggggcttctggggccacccggtggggcaaggaggtttgaggatcaccccccgtgggaaaagggggcttcaaagacatcccaccaggggaggagttccggggaaacgcaaatgaagatgggttcaaaaggcagcctttcgtaatgggtaagagctcgaactttggagcctgcctgggttggaatgtttaatgtatctgggcctcagtttcctcatctgggaagtgatagtatctgcctcacggggatgttatggtctaagatgtttgtaaagtgcttagaaccctgctactcgacaggtagcaaggtcaaataacttgctcagtcccacagctagtgatgaatgaatcggggtttcatgtgatggatgtcaggactgtgctgggcctccctcaagggcgggggaagaggggtcctcggagtcatctactggggggaggggagtaggaggaaacagcccctcagggcttctggggccaccccctggggcaaggagatttgggggtcacccaaacctccttgtgccaggtgggcatggtcatgggcccctctttaggtgggtacagtgacaaacagcttacaaactgtttgacaaaaaagtaagtggaatatgggggaaggggactagctcggggaggaggggaggagaaagctcttagcttactgccttcagtactttctgctgaccactgggaagttcttttccttttcgctcctcaggaggggaaccaagagaaccttttaggaattggggtccagggccctggttgccaaatctggttgcatgtgggcatttctagaaacgcttgtttaaaatgcagtttttccagcctgggcaacatagtgagaccctgtctctacaaaaaattaaaattagtcgagcatgttggagcgtgcctgtaattccagctacttgggaggatgaggttggaggattgcttgagctcaggaagttgagactgcagtaagccgagatcacaccaccgcactccagcctaggtgacagagtgagaccctgtctaaaataaataaataaataaataaaaatgcagtttttgatgaagcctcagacctgctgaatgagaaattttgggggtggagcccagaaagttttttttatgctccccaggtgattctgatgcacagacagttttgacacccatgacatgtaaccctgatttatccatcactagctgtgggacagcaagttgtctgagtttttatgcctgtttcctcacctgtaaaatggggcacagaatcttcttactgcatactatttcttattttaaggtcattgtcatgaggactaaatgagttgatttttgaaaagtgactagaacagtgccaggtccatagtaagcactatatatgtttattaaatgaaataaatctcctttcctaggcatttgaggagactcatctgacctcccttgacccagtgaaacagtttgctgcctggtttgaggaggctgttcagtgtcctgacataggggaagccaatgccatgtgtctggctacctgcaccaggtgggcatggctgtgggcccctctttgggtggatacatatgaactaggaagcttatgaagctctctactctggatgccaattttatggttccagctctgttattaacatgctctgtggctttaggcaagatacttgtcctctctgggcctgtgtccttacctataaaccaaagaccaggccacaaaattacatttcagtgataaaaatgcagtgccttgttcatttctgcccttgatacatccacacacaaccccttgcctccctcatctccccatctacccaagccccgtctgccattcaggagctacttctcctggtgaagctctgtctctctctcgaaatctagcacagtgcttgactatatcattcctttgacaatcatatgccctttgagacatcacttgtattagcctgttattcaattctcctcgataaagtgtaaggccttgtagccagtgctcttgtactgtgcgagtggatatctcccagagctctgagcagaggggctgatctcatagcaccactgtgatcccgaagcattggatgattgcattattgttagtccctgcccttagggtcttatgaatttgctagggctgtcttaacaaaatactgtagactggatagcttaaacaacaggagtttatttccttatagttctggtggctggaagtccaagatcaaggtgccatcaggggtggtttctgatgaggcctctgcttggggtttgcagacagctactttttaccatgtcctcacactgcctttcgtgtgtgtgtgtgtgtgtgtgtgtgtgtgtgtgtgttgtggagggcaagggaggtggttctgaagtgtctcttctcttacagtgacaccagtcctactggattagggccccacccctatgaccttacttaaccttaattacctccataaggtccccttctccaaatacagtcacattggggtttaaggctttaacataggggtttggggtgacacaattcagcccataacagggccccaggctgtggtgtcatacctctaggacaaatccccaggagcacatgggacggggtagcctgacagcccaataaagggggtgcagctggagggggtgctgagacatcctttggggagagggactatagccagaacattgaagcagactctgaccacagtgctctgctctttgctcctagagatggaaaaccctctgctcgcatgttgctgctgaagggcttcgggaaagatggcttccgcttcttcactaacttcgagagtcgaaaaggaaaagagctggtgggtgaaaagagctagtaatctttcccagggcctgcagggtttggctcttgcttcctcagtcaccttcttatgccaccccacccccccagtctacttgctctctgtgtgcaggtgccctcctgccatgaggccttggcacttgctgtgctctttgccataaatgaatgaatgcactttctaaccagcctcaccccatcagccatgacctgttccttcagatctcagcccacatgttacctcctcaggaaggccttccttgactctcactcagactcagcccctcatgctgtttgctgccattataacttgcaactttcttttttgtcttcttcttcagtttgtaactgagcatttgtttgggtgattatgtaactgatatttgtctcctctgctcaacagtaagctctgtaggagtggaggctgctctgttttatctctgctgtatcccccgcacgtctcctgttgtcagacccagagtgggcacttcgcgtgcattcaatgaatgaatccaaaatgagtaaacctccctgagtccatgccagccaagcatgcatttctcaagactcacaaatctgtgggtgagagaaatcacccagtctcactttggagtccgactggcttaaacttagctccaccacttcctgcaggaacttgggcacgtgacttagcctgtctctgtgtctgtgacaataggcctacttttgagggtttaaatgagctcttacggtgggtgcatctgctgtgggcctgcgcactacagctctcctgccttttccctgcatgccggaggcctcctctccctgtcctgatggctggctgtggattctcttttacttctaggactctaatccctttgcttcccttgtcttctactgggagccacttaaccgtcaggtgagtgaattttcccaggacagcctgggatgggctgggttggcagggcctgagtttatggctacgtctagcgaaggtccccagactgggcaaacatcccagctgggcactctgcctctaaaatagccctcagttagttggagccaagagtggtggggcagccgatcgaacagagaggaacggggcctgtgctggtagggagggcaggtggcatttaatgccattcacccagagccatccctgagcaggtgcgtgtggaaggccctgtgaagaaactgcctgaggaggaggctgagtgctacttccactcccgccccaagagcagccagattggggctgtggtcagccaccagagttctgtgatccctgatcgggag

SEQ ID NO: 13414 - DNA, 518 bp, Homo sapiens
gttcgggcgacctgccgagtggccaggctacctcagtcacctgtgtggtcgcagtgctgccatggacctgggacccatgcgcaagagttaccgcggggaccgagaggcatttgaggagactcatctgacctcccttgacccagtgaaacagtttgctgcctggtttgaggaggctgttcagtgtcctgacataggggaagccaatgccatgtgtctggctacctgcaccagagatggaaaaccctctgctcgcatgttgctgctgaagggcttcgggaaagatggcttccgcttcttcactaacttcgagagtcgaaaaggaaaagagctggactctaatccctttgcttcccttgtcttctactgggagccacttaaccgtcaggtgagtgcgtgtggaaggccctgtgaagaaactgcctgaggaggaggctgagtgctacttccactcccgccccaagagcagccagattggggctgtggtcagccaccagagttctgtgatccctgatcgggag

SEQ ID NO: 13415 - DNA, 5228 bp, Homo sapiens
ctccgatcctggaaactcattggctccgaggacttaggacctgttagcttggttgggcgactggcaaatccttccttccccggggtagaagtccagggtgagaaattggttccgaactcaaaggaacccagtgccgggccacagccgggtcacgtggccggcggccccccatgacgtgctggctgcggggcgtcacggcgacgttcgggcgacctgccgagtggccaggctacctcagtcacctgtgtggtcgcagtgctgccatggacctgggacccatgcgcaagagttaccgcggggaccgagaggtgccgccgctagggccaggcctcctgcaggggcgggggaaaaggggtccccggagtcatctacagcggggaggggagtagtaggagcccctcggggcttctggggccacccggtggggcaaggaggtttgaggatcaccccccgtgggaaaagggggcttcaaagacatcccaccaggggaggagttccggggaaacgcaaatgaagatgggttcaaaaggcagcctttcgtaatgggtaagagctcgaactttggagcctgcctgggttggaatgtttaatgtatctgggcctcagtttcctcatctgggaagtgatagtatctgcctcacggggatgttatggtctaagatgtttgtaaagtgcttagaaccctgctactcgacaggtagcaaggtcaaataacttgctcagtcccacagctagtgatgaatgaatcggggtttcatgtgatggatgtcaggactgtgctgggcctccctcaagggcgggggaagaggggtcctcggagtcatctactggggggaggggagtaggaggaaacagcccctcagggcttctggggccaccccctggggcaaggagatttgggggtcacccaaacctccttgtgccaggtgggcatggtcatgggcccctctttaggtgggtacagtgacaaacagcttacaaactgtttgacaaaaaagtaagtggaatatgggggaaggggactagctcggggaggaggggaggagaaagctcttagcttactgccttcagtactttctgctgaccactgggaagttcttttccttttcgctcctcaggaggggaaccaagagaaccttttaggaattggggtccagggccctggttgccaaatctggttgcatgtgggcatttctagaaacgcttgtttaaaatgcagtttttccagcctgggcaacatagtgagaccctgtctctacaaaaaattaaaattagtcgagcatgttggagcgtgcctgtaattccagctacttgggaggatgaggttggaggattgcttgagctcaggaagttgagactgcagtaagccgagatcacaccaccgcactccagcctaggtgacagagtgagaccctgtctaaaataaataaataaataaataaaaatgcagtttttgatgaagcctcagacctgctgaatgagaaattttgggggtggagcccagaaagttttttttatgctccccaggtgattctgatgcacagacagttttgacacccatgacatgtaaccctgatttatccatcactagctgtgggacagcaagttgtctgagtttttatgcctgtttcctcacctgtaaaatggggcacagaatcttcttactgcatactatttcttattttaaggtcattgtcatgaggactaaatgagttgatttttgaaaagtgactagaacagtgccaggtccatagtaagcactatatatgtttattaaatgaaataaatctcctttcctaggcatttgaggagactcatctgacctcccttgacccagtgaaacagtttgctgcctggtttgaggaggctgttcagtgtcctgacataggggaagccaatgccatgtgtctggctacctgcaccaggtgggcatggctgtgggcccctctttgggtggatacatatgaactaggaagcttatgaagctctctactctggatgccaattttatggttccagctctgttattaacatgctctgtggctttaggcaagatacttgtcctctctgggcctgtgtccttacctataaaccaaagaccaggccacaaaattacatttcagtgataaaaatgcagtgccttgttcatttctgcccttgatacatccacacacaaccccttgcctccctcatctccccatctacccaagccccgtctgccattcaggagctacttctcctggtgaagctctgtctctctctcgaaatctagcacagtgcttgactatatcattcctttgacaatcatatgccctttgagacatcacttgtattagcctgttattcaattctcctcgataaagtgtaaggccttgtagccagtgctcttgtactgtgcgagtggatatctcccagagctctgagcagaggggctgatctcatagcaccactgtgatcccgaagcattggatgattgcattattgttagtccctgcccttagggtcttatgaatttgctagggctgtcttaacaaaatactgtagactggatagcttaaacaacaggagtttatttccttatagttctggtggctggaagtccaagatcaaggtgccatcaggggtggtttctgatgaggcctctgcttggggtttgcagacagctactttttaccatgtcctcacactgcctttcgtgtgtgtgtgtgtgtgtgtgtgtgtgtgtgtgtgttgtggagggcaagggaggtggttctgaagtgtctcttctcttacagtgacaccagtcctactggattagggccccacccctatgaccttacttaaccttaattacctccataaggtccccttctccaaatacagtcacattggggtttaaggctttaacataggggtttggggtgacacaattcagcccataacagggccccaggctgtggtgtcatacctctaggacaaatccccaggagcacatgggacggggtagcctgacagcccaataaagggggtgcagctggagggggtgctgagacatcctttggggagagggactatagccagaacattgaagcagactctgaccacagtgctctgctctttgctcctagagatggaaaaccctctgctcgcatgttgctgctgaagggcttcgggaaagatggcttccgcttcttcactaacttcgagagtcgaaaaggaaaagagctggtgggtgaaaagagctagtaatctttcccagggcctgcagggtttggctcttgcttcctcagtcaccttcttatgccaccccacccccccagtctacttgctctctgtgtgcaggtgccctcctgccatgaggccttggcacttgctgtgctctttgccataaatgaatgaatgcactttctaaccagcctcaccccatcagccatgacctgttccttcagatctcagcccacatgttacctcctcaggaaggccttccttgactctcactcagactcagcccctcatgctgtttgctgccattataacttgcaactttcttttttgtcttcttcttcagtttgtaactgagcatttgtttgggtgattatgtaactgatatttgtctcctctgctcaacagtaagctctgtaggagtggaggctgctctgttttatctctgctgtatcccccgcacgtctcctgttgtcagacccagagtgggcacttcgcgtgcattcaatgaatgaatccaaaatgagtaaacctccctgagtccatgccagccaagcatgcatttctcaagactcacaaatctgtgggtgagagaaatcacccagtctcactttggagtccgactggcttaaacttagctccaccacttcctgcaggaacttgggcacgtgacttagcctgtctctgtgtctgtgacaataggcctacttttgagggtttaaatgagctcttacggtgggtgcatctgctgtgggcctgcgcactacagctctcctgccttttccctgcatgccggaggcctcctctccctgtcctgatggctggctgtggattctcttttacttctaggactctaatccctttgcttcccttgtcttctactgggagccacttaaccgtcaggtgagtgaattttcccaggacagcctgggatgggctgggttggcagggcctgagtttatggctacgtctagcgaaggtccccagactgggcaaacatcccagctgggcactctgcctctaaaatagccctcagttagttggagccaagagtggtggggcagccgatcgaacagagaggaacggggcctgtgctggtagggagggcaggtggcatttaatgccattcacccagagccatccctgagcaggtgcgtgtggaaggccctgtgaagaaactgcctgaggaggaggctgagtgctacttccactcccgccccaagagcagccagattggggctgtggtcagccaccagagttctgtgatccctgatcgggaggtgagtggagctccgctgtagtcctccaggtggtggaggctttggcttatccccagaagctgtccccaggagatgccaggagatgtccccaggagatgtcctctctctccagcccagtgaaaacagtgaaaaggacagtgagaagggaaagtgggggtagggagaggggaaataggcctcctctgtccatctggccatcctgttgactgctcctggaggacagaggccagtctgctctgctcacccatgtccccagcacatatccccaggaagtccttgttaatgaatcattgactgggcctggcccttcttctaactcttccccctggacagtatctgagaaagaaaaatgaggaactggaacagctctaccaggatcaagaggtgcccaagccaaaatcctggtgagtgacatctggtagtcctctagaaagggacaccaggcccctgtgtttacttgaagccacctgcctggggaatcacagatctcctcctccctggccacccttgtcagatgcatcccagcaacttccttcaagaggccctgggatgaggggtgagggtgggagagtgacctggctagaaaactccacagagcactgaaacctctgcttctccttataggggtggctatgtcctgtaccctcaggtgatggagttctggcaaggtcaaaccaaccgcctgcatgaccggatagtctttcggcggggcctacccacaggagattcccctttggggcccat

SEQ ID NO: 13416 - DNA, 696 bp, Homo sapiens
ctccgatcctggaaactcattggctccgaggacttaggacctgttagcttggttgggcgactggcaaatccttccttccccggggtagaagtccagggcatttgaggagactcatctgacctcccttgacccagtgaaacagtttgctgcctggtttgaggaggctgttcagtgtcctgacataggggaagccaatgccatgtgtctggctacctgcaccagagatggaaaaccctctgctcgcatgttgctgctgaagggcttcgggaaagatggcttccgcttcttcactaacttcgagagtcgaaaaggaaaagagctggactctaatccctttgcttcccttgtcttctactgggagccacttaaccgtcaggtgcgtgtggaaggccctgtgaagaaactgcctgaggaggaggctgagtgctacttccactcccgccccaagagcagccagattggggctgtggtcagccaccagagttctgtgatccctgatcgggagtatctgagaaagaaaaatgaggaactggaacagctctaccaggatcaagaggtgcccaagccaaaatcctggggtggctatgtcctgtaccctcaggtgatggagttctggcaaggtcaaaccaaccgcctgcatgaccggatagtctttcggcggggcctacccacaggagattcccctttggggcccat

SEQ ID NO: 13417 - DNA, 5083 bp, Homo sapiens
acgttcgggcgacctgccgagtggccaggctacctcagtcacctgtgtggtcgcagtgctgccatggacctgggacccatgcgcaagagttaccgcggggaccgagaggtgccgccgctagggccaggcctcctgcaggggcgggggaaaaggggtccccggagtcatctacagcggggaggggagtagtaggagcccctcggggcttctggggccacccggtggggcaaggaggtttgaggatcaccccccgtgggaaaagggggcttcaaagacatcccaccaggggaggagttccggggaaacgcaaatgaagatgggttcaaaaggcagcctttcgtaatgggtaagagctcgaactttggagcctgcctgggttggaatgtttaatgtatctgggcctcagtttcctcatctgggaagtgatagtatctgcctcacggggatgttatggtctaagatgtttgtaaagtgcttagaaccctgctactcgacaggtagcaaggtcaaataacttgctcagtcccacagctagtgatgaatgaatcggggtttcatgtgatggatgtcaggactgtgctgggcctccctcaagggcgggggaagaggggtcctcggagtcatctactggggggaggggagtaggaggaaacagcccctcagggcttctggggccaccccctggggcaaggagatttgggggtcacccaaacctccttgtgccaggtgggcatggtcatgggcccctctttaggtgggtacagtgacaaacagcttacaaactgtttgacaaaaaagtaagtggaatatgggggaaggggactagctcggggaggaggggaggagaaagctcttagcttactgccttcagtactttctgctgaccactgggaagttcttttccttttcgctcctcaggaggggaaccaagagaaccttttaggaattggggtccagggccctggttgccaaatctggttgcatgtgggcatttctagaaacgcttgtttaaaatgcagtttttccagcctgggcaacatagtgagaccctgtctctacaaaaaattaaaattagtcgagcatgttggagcgtgcctgtaattccagctacttgggaggatgaggttggaggattgcttgagctcaggaagttgagactgcagtaagccgagatcacaccaccgcactccagcctaggtgacagagtgagaccctgtctaaaataaataaataaataaataaaaatgcagtttttgatgaagcctcagacctgctgaatgagaaattttgggggtggagcccagaaagttttttttatgctccccaggtgattctgatgcacagacagttttgacacccatgacatgtaaccctgatttatccatcactagctgtgggacagcaagttgtctgagtttttatgcctgtttcctcacctgtaaaatggggcacagaatcttcttactgcatactatttcttattttaaggtcattgtcatgaggactaaatgagttgatttttgaaaagtgactagaacagtgccaggtccatagtaagcactatatatgtttattaaatgaaataaatctcctttcctaggcatttgaggagactcatctgacctcccttgacccagtgaaacagtttgctgcctggtttgaggaggctgttcagtgtcctgacataggggaagccaatgccatgtgtctggctacctgcaccaggtgggcatggctgtgggcccctctttgggtggatacatatgaactaggaagcttatgaagctctctactctggatgccaattttatggttccagctctgttattaacatgctctgtggctttaggcaagatacttgtcctctctgggcctgtgtccttacctataaaccaaagaccaggccacaaaattacatttcagtgataaaaatgcagtgccttgttcatttctgcccttgatacatccacacacaaccccttgcctccctcatctccccatctacccaagccccgtctgccattcaggagctacttctcctggtgaagctctgtctctctctcgaaatctagcacagtgcttgactatatcattcctttgacaatcatatgccctttgagacatcacttgtattagcctgttattcaattctcctcgataaagtgtaaggccttgtagccagtgctcttgtactgtgcgagtggatatctcccagagctctgagcagaggggctgatctcatagcaccactgtgatcccgaagcattggatgattgcattattgttagtccctgcccttagggtcttatgaatttgctagggctgtcttaacaaaatactgtagactggatagcttaaacaacaggagtttatttccttatagttctggtggctggaagtccaagatcaaggtgccatcaggggtggtttctgatgaggcctctgcttggggtttgcagacagctactttttaccatgtcctcacactgcctttcgtgtgtgtgtgtgtgtgtgtgtgtgtgtgtgtgtgttgtggagggcaagggaggtggttctgaagtgtctcttctcttacagtgacaccagtcctactggattagggccccacccctatgaccttacttaaccttaattacctccataaggtccccttctccaaatacagtcacattggggtttaaggctttaacataggggtttggggtgacacaattcagcccataacagggccccaggctgtggtgtcatacctctaggacaaatccccaggagcacatgggacggggtagcctgacagcccaataaagggggtgcagctggagggggtgctgagacatcctttggggagagggactatagccagaacattgaagcagactctgaccacagtgctctgctctttgctcctagagatggaaaaccctctgctcgcatgttgctgctgaagggcttcgggaaagatggcttccgcttcttcactaacttcgagagtcgaaaaggaaaagagctggtgggtgaaaagagctagtaatctttcccagggcctgcagggtttggctcttgcttcctcagtcaccttcttatgccaccccacccccccagtctacttgctctctgtgtgcaggtgccctcctgccatgaggccttggcacttgctgtgctctttgccataaatgaatgaatgcactttctaaccagcctcaccccatcagccatgacctgttccttcagatctcagcccacatgttacctcctcaggaaggccttccttgactctcactcagactcagcccctcatgctgtttgctgccattataacttgcaactttcttttttgtcttcttcttcagtttgtaactgagcatttgtttgggtgattatgtaactgatatttgtctcctctgctcaacagtaagctctgtaggagtggaggctgctctgttttatctctgctgtatcccccgcacgtctcctgttgtcagacccagagtgggcacttcgcgtgcattcaatgaatgaatccaaaatgagtaaacctccctgagtccatgccagccaagcatgcatttctcaagactcacaaatctgtgggtgagagaaatcacccagtctcactttggagtccgactggcttaaacttagctccaccacttcctgcaggaacttgggcacgtgacttagcctgtctctgtgtctgtgacaataggcctacttttgagggtttaaatgagctcttacggtgggtgcatctgctgtgggcctgcgcactacagctctcctgccttttccctgcatgccggaggcctcctctccctgtcctgatggctggctgtggattctcttttacttctaggactctaatccctttgcttcccttgtcttctactgggagccacttaaccgtcaggtgagtgaattttcccaggacagcctgggatgggctgggttggcagggcctgagtttatggctacgtctagcgaaggtccccagactgggcaaacatcccagctgggcactctgcctctaaaatagccctcagttagttggagccaagagtggtggggcagccgatcgaacagagaggaacggggcctgtgctggtagggagggcaggtggcatttaatgccattcacccagagccatccctgagcaggtgcgtgtggaaggccctgtgaagaaactgcctgaggaggaggctgagtgctacttccactcccgccccaagagcagccagattggggctgtggtcagccaccagagttctgtgatccctgatcgggaggtgagtggagctccgctgtagtcctccaggtggtggaggctttggcttatccccagaagctgtccccaggagatgccaggagatgtccccaggagatgtcctctctctccagcccagtgaaaacagtgaaaaggacagtgagaagggaaagtgggggtagggagaggggaaataggcctcctctgtccatctggccatcctgttgactgctcctggaggacagaggccagtctgctctgctcacccatgtccccagcacatatccccaggaagtccttgttaatgaatcattgactgggcctggcccttcttctaactcttccccctggacagtatctgagaaagaaaaatgaggaactggaacagctctaccaggatcaagaggtgcccaagccaaaatcctggtgagtgacatctggtagtcctctagaaagggacaccaggcccctgtgtttacttgaagccacctgcctggggaatcacagatctcctcctccctggccacccttgtcagatgcatcccagcaacttccttcaagaggccctgggatgaggggtgagggtgggagagtgacctggctagaaaactccacagagcactgaaacctctgcttctccttataggggtggctatgtcctgtaccctcaggtgatggagttctggcaaggtcaaaccaaccgcctgcatgaccggatagtctttcggcggggcctacccacaggagattcccctttggggcccatgacccaccgcggggaggaagactggctctatgagagacttgcaccttaactctgg

SEQ ID NO: 13418 - DNA, 723 bp, Homo sapiens
acgttcgggcgacctgccgagtggccaggctacctcagtcacctgtgtggtcgcagtgctgccatggacctgggacccatgcgcaagagttaccgcggggaccgagaggcatttgaggagactcatctgacctcccttgacccagtgaaacagtttgctgcctggtttgaggaggctgttcagtgtcctgacataggggaagccaatgccatgtgtctggctacctgcaccagagatggaaaaccctctgctcgcatgttgctgctgaagggcttcgggaaagatggcttccgcttcttcactaacttcgagagtcgaaaaggaaaagagctgccacttaaccgtcaggtgcgtgtggaaggccctgtgaagaaactgcctgaggaggaggctgagtgctacttccactcccgccccaagagcagccagattggggctgtggtcagccaccagagttctgtgatccctgatcgggagtatctgagaaagaaaaatgaggaactggaacagctctaccaggatcaagaggtgcccaagccaaaatcctggggtggctatgtcctgtaccctcaggtgatggagttctggcaaggtcaaaccaaccgcctgcatgaccggatagtctttcggcggggcctacccacaggagattcccctttggggcccatgacccaccgcggggaggaagactggctctatgagagacttgcaccttaactctgg

SEQ ID NO: 13419 - DNA, 3870 bp, Homo sapiens
gtctgtgacaataggcctacttttgagggtttaaatgagctcttacggtgggtgcatctgctgtgggcctgcgcactacagctctcctgccttttccctgcatgccggaggcctcctctccctgtcctgatggctggctgtggattctcttttacttctaggactctaatccctttgcttcccttgtcttctactgggagccacttaaccgtcaggtgagtgaattttcccaggacagcctgggatgggctgggttggcagggcctgagtttatggctacgtctagcgaaggtccccagactgggcaaacatcccagctgggcactctgcctctaaaatagccctcagttagttggagccaagagtggtggggcagccgatcgaacagagaggaacggggcctgtgctggtagggagggcaggtggcatttaatgccattcacccagagccatccctgagcaggtgcgtgtggaaggccctgtgaagaaactgcctgaggaggaggctgagtgctacttccactcccgccccaagagcagccagattggggctgtggtcagccaccagagttctgtgatccctgatcgggaggtgagtggagctccgctgtagtcctccaggtggtggaggctttggcttatccccagaagctgtccccaggagatgccaggagatgtccccaggagatgtcctctctctccagcccagtgaaaacagtgaaaaggacagtgagaagggaaagtgggggtagggagaggggaaataggcctcctctgtccatctggccatcctgttgactgctcctggaggacagaggccagtctgctctgctcacccatgtccccagcacatatccccaggaagtccttgttaatgaatcattgactgggcctggcccttcttctaactcttccccctggacagtatctgagaaagaaaaatgaggaactggaacagctctaccaggatcaagaggtgcccaagccaaaatcctggtgagtgacatctggtagtcctctagaaagggacaccaggcccctgtgtttacttgaagccacctgcctggggaatcacagatctcctcctccctggccacccttgtcagatgcatcccagcaacttccttcaagaggccctgggatgaggggtgagggtgggagagtgacctggctagaaaactccacagagcactgaaacctctgcttctccttataggggtggctatgtcctgtaccctcaggtgatggagttctggcaaggtcaaaccaaccgcctgcatgaccggatagtctttcggcggggcctacccacaggagattcccctttggggcccatgacccaccgcggggaggaagactggctctatgagagacttgcaccttaactctgggacctgctggcccagagtggagctagggctaggtgtcaagagagggtgtgggattgggacccaggcccttctttctaaactcaacccatttccctccctaccccttatcttcaggactcttcagagctaatcctctaagttctctgtactcagttggttctcagttagctggtcaagtggagtgtaatggtggcgtagagaatcacaaatggaaaataattccataattatttttttgaccttgcctatgattgattaggatagctccctctaggggtagcagccggtgtgactccctttctggtgacagacagggccccagcagccctgtctgttaccatgtgagtcatactggccaaagcttagtcctagcatatgcacctgagccaacctggccaatcagattgttttgtcaataatttgaaatttgaactggagagatccagaaccttgggagtcattaaagccaagtcattcatagcagccaggaaacaataggaaccaaaagcctctgcctgctgctattgcaattcccaggatctctccttccctggatccctccctcccaggtctgggctgtgcagttcctccccctgccttaaaacaccccactatctctgtaaagtctctctctctcttttttttttttttacttaatctagctagaatctatttctgttgattacaacttaactaactcatttacggataggacttttttttttctttttttcttttttcttttcttttttttttttgagatggagtctcactctgtcacccaggctggagtgcagtggtgtgatcttggctcactgcaacctctgcctcccaggttcaagcaattctcctgcctcagcctcccaagtagctgggactacaggcacacgccaccacacccaactaatttttgtatttttagtagagatggggtttcaccatgttggccaggattgtctccatctcttgaccttgtgatccacccacctcagcctcccaaagtgctgggattacaggcatgagccaccacacccagcgagacggggtttcattatgttggccaggctggtctccaactcctgacctaaagtgatctgcccgccttggcctcccaaagtgctgggattacagacatgagccaccacgcttggccgggatagtatatttttatagcacttcccctactgattgctgccttctctgtggctacaagggacccacagaattacagggaagttacagggaagcaggtttcatctcaatattgggagagatttcaaacaatcacacctgcctgagaaggagtgggctgtcactaggaatttttattcccagtccgtcaggaattttgtagaagggcttcatgtgctggtaccaataggacaggaagattttaatcagctttactatctatgtttttttatggaaactgtgtgtatgtatacatacattttccaaaaagaaaaattaaatgattatagagattatgtttttcagactactcacgtatctgcttttcttactccccacctctgctgataattcctagttcattggtttttcccccacactggaattacctggggagcttaaaaaaccctgatgcctgggtcccaccctcagagatgattgaaccagcctggccagcatggcaaaaccctgtctctactatgatatgaatgcagcctgggcactgggaaatttaaaaactccccagataattctgtgcagccaaggttgagacctcctagtctagagctttgctatacacagggtggtccacaagccaggagcatcagcatcacttggcagcgccttagagattcagaccccagacccactgaatctgaccctgcattttcactagaccccaggtgatcagctgcactagactcaacctctaaaccaagacctcccaccctcacagtctatgatcctttagtgaccctcagctgagtcctgtgctgaactgtgtttgttctccttgagcacatgcccgctaaccagggacagactggatgagcaagcaacctgctggctatggagaagagccaggctgggtaaatgtttgctgtgactaagccaggatcaaagaactgcctgttgcttgcactggctggcactgagcttgccactctgtgaactgtgcttccttcccctgcatggacctgtgcctcagtcactattatccgcaggccttctccaagggcagccctctccttgtttatccctcttaagcctgcgtgcaggaaggcacattaaccctgtggccccctgcaggcaggagggtgttgggtgcccttacctaccttgccctttttcttgtaccgtaggctgtgccgtttatgagtaagtgatgtgtgtctgtgtgtgtgtctagaagtgctgcactcaccttgtgttattggaggttgtgtaaccccctagctttgagcctggtctcagatgttccttttccgttctctgtccagccgttacc

SEQ ID NO: 13420 - DNA, 2940 bp, Homo sapiens
gtctgtgacaataggcctacttttgagggtttaaatgagctcttacggtgggtgcatctgctgtgggcctgcgcactacagctctcctgccttttccctgcatgccggaggcctcctctccctgtcctgatggctggctgtggattctcttttacttctaggactctaatccctttgcttcccttgtcttctactgggagccacttaaccgtcagtatctgagaaagaaaaatgaggaactggaacagctctaccaggatcaagaggtgcccaagccaaaatcctggggtggctatgtcctgtaccctcaggtgatggagttctggcaaggtcaaaccaaccgcctgcatgaccggatagtctttcggcggggcctacccacaggagattcccctttggggcccatgacccaccgcggggaggaagactggctctatgagagacttgcaccttaactctgggacctgctggcccagagtggagctagggctaggtgtcaagagagggtgtgggattgggacccaggcccttctttctaaactcaacccatttccctccctaccccttatcttcaggactcttcagagctaatcctctaagttctctgtactcagttggttctcagttagctggtcaagtggagtgtaatggtggcgtagagaatcacaaatggaaaataattccataattatttttttgaccttgcctatgattgattaggatagctccctctaggggtagcagccggtgtgactccctttctggtgacagacagggccccagcagccctgtctgttaccatgtgagtcatactggccaaagcttagtcctagcatatgcacctgagccaacctggccaatcagattgttttgtcaataatttgaaatttgaactggagagatccagaaccttgggagtcattaaagccaagtcattcatagcagccaggaaacaataggaaccaaaagcctctgcctgctgctattgcaattcccaggatctctccttccctggatccctccctcccaggtctgggctgtgcagttcctccccctgccttaaaacaccccactatctctgtaaagtctctctctctcttttttttttttttacttaatctagctagaatctatttctgttgattacaacttaactaactcatttacggataggacttttttttttctttttttcttttttcttttcttttttttttttgagatggagtctcactctgtcacccaggctggagtgcagtggtgtgatcttggctcactgcaacctctgcctcccaggttcaagcaattctcctgcctcagcctcccaagtagctgggactacaggcacacgccaccacacccaactaatttttgtatttttagtagagatggggtttcaccatgttggccaggattgtctccatctcttgaccttgtgatccacccacctcagcctcccaaagtgctgggattacaggcatgagccaccacacccagcgagacggggtttcattatgttggccaggctggtctccaactcctgacctaaagtgatctgcccgccttggcctcccaaagtgctgggattacagacatgagccaccacgcttggccgggatagtatatttttatagcacttcccctactgattgctgccttctctgtggctacaagggacccacagaattacagggaagttacagggaagcaggtttcatctcaatattgggagagatttcaaacaatcacacctgcctgagaaggagtgggctgtcactaggaatttttattcccagtccgtcaggaattttgtagaagggcttcatgtgctggtaccaataggacaggaagattttaatcagctttactatctatgtttttttatggaaactgtgtgtatgtatacatacattttccaaaaagaaaaattaaatgattatagagattatgtttttcagactactcacgtatctgcttttcttactccccacctctgctgataattcctagttcattggtttttcccccacactggaattacctggggagcttaaaaaaccctgatgcctgggtcccaccctcagagatgattgaaccagcctggccagcatggcaaaaccctgtctctactatgatatgaatgcagcctgggcactgggaaatttaaaaactccccagataattctgtgcagccaaggttgagacctcctagtctagagctttgctatacacagggtggtccacaagccaggagcatcagcatcacttggcagcgccttagagattcagaccccagacccactgaatctgaccctgcattttcactagaccccaggtgatcagctgcactagactcaacctctaaaccaagacctcccaccctcacagtctatgatcctttagtgaccctcagctgagtcctgtgctgaactgtgtttgttctccttgagcacatgcccgctaaccagggacagactggatgagcaagcaacctgctggctatggagaagagccaggctgggtaaatgtttgctgtgactaagccaggatcaaagaactgcctgttgcttgcactggctggcactgagcttgccactctgtgaactgtgcttccttcccctgcatggacctgtgcctcagtcactattatccgcaggccttctccaagggcagccctctccttgtttatccctcttaagcctgcgtgcaggaaggcacattaaccctgtggccccctgcaggcaggagggtgttgggtgcccttacctaccttgccctttttcttgtaccgtaggctgtgccgtttatgagtaagtgatgtgtgtctgtgtgtgtgtctagaagtgctgcactcaccttgtgttattggaggttgtgtaaccccctagctttgagcctggtctcagatgttccttttccgttctctgtccagccgttacc

SEQ ID NO: 13421 - DNA, 5132 bp, Homo sapiens
cgaactcaaaggaacccagtgccgggccacagccgggtcacgtggccggcggccccccatgacgtgctggctgcggggcgtcacggcgacgttcgggcgacctgccgagtggccaggctacctcagtcacctgtgtggtcgcagtgctgccatggacctgggacccatgcgcaagagttaccgcggggaccgagaggtgccgccgctagggccaggcctcctgcaggggcgggggaaaaggggtccccggagtcatctacagcggggaggggagtagtaggagcccctcggggcttctggggccacccggtggggcaaggaggtttgaggatcaccccccgtgggaaaagggggcttcaaagacatcccaccaggggaggagttccggggaaacgcaaatgaagatgggttcaaaaggcagcctttcgtaatgggtaagagctcgaactttggagcctgcctgggttggaatgtttaatgtatctgggcctcagtttcctcatctgggaagtgatagtatctgcctcacggggatgttatggtctaagatgtttgtaaagtgcttagaaccctgctactcgacaggtagcaaggtcaaataacttgctcagtcccacagctagtgatgaatgaatcggggtttcatgtgatggatgtcaggactgtgctgggcctccctcaagggcgggggaagaggggtcctcggagtcatctactggggggaggggagtaggaggaaacagcccctcagggcttctggggccaccccctggggcaaggagatttgggggtcacccaaacctccttgtgccaggtgggcatggtcatgggcccctctttaggtgggtacagtgacaaacagcttacaaactgtttgacaaaaaagtaagtggaatatgggggaaggggactagctcggggaggaggggaggagaaagctcttagcttactgccttcagtactttctgctgaccactgggaagttcttttccttttcgctcctcaggaggggaaccaagagaaccttttaggaattggggtccagggccctggttgccaaatctggttgcatgtgggcatttctagaaacgcttgtttaaaatgcagtttttccagcctgggcaacatagtgagaccctgtctctacaaaaaattaaaattagtcgagcatgttggagcgtgcctgtaattccagctacttgggaggatgaggttggaggattgcttgagctcaggaagttgagactgcagtaagccgagatcacaccaccgcactccagcctaggtgacagagtgagaccctgtctaaaataaataaataaataaataaaaatgcagtttttgatgaagcctcagacctgctgaatgagaaattttgggggtggagcccagaaagttttttttatgctccccaggtgattctgatgcacagacagttttgacacccatgacatgtaaccctgatttatccatcactagctgtgggacagcaagttgtctgagtttttatgcctgtttcctcacctgtaaaatggggcacagaatcttcttactgcatactatttcttattttaaggtcattgtcatgaggactaaatgagttgatttttgaaaagtgactagaacagtgccaggtccatagtaagcactatatatgtttattaaatgaaataaatctcctttcctaggcatttgaggagactcatctgacctcccttgacccagtgaaacagtttgctgcctggtttgaggaggctgttcagtgtcctgacataggggaagccaatgccatgtgtctggctacctgcaccaggtgggcatggctgtgggcccctctttgggtggatacatatgaactaggaagcttatgaagctctctactctggatgccaattttatggttccagctctgttattaacatgctctgtggctttaggcaagatacttgtcctctctgggcctgtgtccttacctataaaccaaagaccaggccacaaaattacatttcagtgataaaaatgcagtgccttgttcatttctgcccttgatacatccacacacaaccccttgcctccctcatctccccatctacccaagccccgtctgccattcaggagctacttctcctggtgaagctctgtctctctctcgaaatctagcacagtgcttgactatatcattcctttgacaatcatatgccctttgagacatcacttgtattagcctgttattcaattctcctcgataaagtgtaaggccttgtagccagtgctcttgtactgtgcgagtggatatctcccagagctctgagcagaggggctgatctcatagcaccactgtgatcccgaagcattggatgattgcattattgttagtccctgcccttagggtcttatgaatttgctagggctgtcttaacaaaatactgtagactggatagcttaaacaacaggagtttatttccttatagttctggtggctggaagtccaagatcaaggtgccatcaggggtggtttctgatgaggcctctgcttggggtttgcagacagctactttttaccatgtcctcacactgcctttcgtgtgtgtgtgtgtgtgtgtgtgtgtgtgtgtgtgttgtggagggcaagggaggtggttctgaagtgtctcttctcttacagtgacaccagtcctactggattagggccccacccctatgaccttacttaaccttaattacctccataaggtccccttctccaaatacagtcacattggggtttaaggctttaacataggggtttggggtgacacaattcagcccataacagggccccaggctgtggtgtcatacctctaggacaaatccccaggagcacatgggacggggtagcctgacagcccaataaagggggtgcagctggagggggtgctgagacatcctttggggagagggactatagccagaacattgaagcagactctgaccacagtgctctgctctttgctcctagagatggaaaaccctctgctcgcatgttgctgctgaagggcttcgggaaagatggcttccgcttcttcactaacttcgagagtcgaaaaggaaaagagctggtgggtgaaaagagctagtaatctttcccagggcctgcagggtttggctcttgcttcctcagtcaccttcttatgccaccccacccccccagtctacttgctctctgtgtgcaggtgccctcctgccatgaggccttggcacttgctgtgctctttgccataaatgaatgaatgcactttctaaccagcctcaccccatcagccatgacctgttccttcagatctcagcccacatgttacctcctcaggaaggccttccttgactctcactcagactcagcccctcatgctgtttgctgccattataacttgcaactttcttttttgtcttcttcttcagtttgtaactgagcatttgtttgggtgattatgtaactgatatttgtctcctctgctcaacagtaagctctgtaggagtggaggctgctctgttttatctctgctgtatcccccgcacgtctcctgttgtcagacccagagtgggcacttcgcgtgcattcaatgaatgaatccaaaatgagtaaacctccctgagtccatgccagccaagcatgcatttctcaagactcacaaatctgtgggtgagagaaatcacccagtctcactttggagtccgactggcttaaacttagctccaccacttcctgcaggaacttgggcacgtgacttagcctgtctctgtgtctgtgacaataggcctacttttgagggtttaaatgagctcttacggtgggtgcatctgctgtgggcctgcgcactacagctctcctgccttttccctgcatgccggaggcctcctctccctgtcctgatggctggctgtggattctcttttacttctaggactctaatccctttgcttcccttgtcttctactgggagccacttaaccgtcaggtgagtgaattttcccaggacagcctgggatgggctgggttggcagggcctgagtttatggctacgtctagcgaaggtccccagactgggcaaacatcccagctgggcactctgcctctaaaatagccctcagttagttggagccaagagtggtggggcagccgatcgaacagagaggaacggggcctgtgctggtagggagggcaggtggcatttaatgccattcacccagagccatccctgagcaggtgcgtgtggaaggccctgtgaagaaactgcctgaggaggaggctgagtgctacttccactcccgccccaagagcagccagattggggctgtggtcagccaccagagttctgtgatccctgatcgggaggtgagtggagctccgctgtagtcctccaggtggtggaggctttggcttatccccagaagctgtccccaggagatgccaggagatgtccccaggagatgtcctctctctccagcccagtgaaaacagtgaaaaggacagtgagaagggaaagtgggggtagggagaggggaaataggcctcctctgtccatctggccatcctgttgactgctcctggaggacagaggccagtctgctctgctcacccatgtccccagcacatatccccaggaagtccttgttaatgaatcattgactgggcctggcccttcttctaactcttccccctggacagtatctgagaaagaaaaatgaggaactggaacagctctaccaggatcaagaggtgcccaagccaaaatcctggtgagtgacatctggtagtcctctagaaagggacaccaggcccctgtgtttacttgaagccacctgcctggggaatcacagatctcctcctccctggccacccttgtcagatgcatcccagcaacttccttcaagaggccctgggatgaggggtgagggtgggagagtgacctggctagaaaactccacagagcactgaaacctctgcttctccttataggggtggctatgtcctgtaccctcaggtgatggagttctggcaaggtcaaaccaaccgcctgcatgaccggatagtctttcggcggggcctacccacaggagattcccctttggggcccatgacccaccgcggggag

SEQ ID NO: 13422 - DNA, 503 bp, Homo sapiens
cgaactcaaaggaacccagtgccgggccacagccgggtcacgtggccggcggccccccatgacgtgctggctgcggggcgtcacggcgacgttcgggcgacctgccgagtggccaggctacctcagtcacctgtgtggtcgcagtgctgccatggacctgggacccatgcgcaagagttaccgcggggaccgagagagatggaaaaccctctgctcgcatgttgctgctgaagggcttcgggaaagatggcttccgcttcttcactaacttcgagagtcgaaaaggaaaagagctgtatctgagaaagaaaaatgaggaactggaacagctctaccaggatcaagaggtgcccaagccaaaatcctggggtggctatgtcctgtaccctcaggtgatggagttctggcaaggtcaaaccaaccgcctgcatgaccggatagtctttcggcggggcctacccacaggagattcccctttggggcccatgacccaccgcggggag

SEQ ID NO: 13423 - DNA, 4696 bp, Homo sapiens
aacgcaaatgaagatgggttcaaaaggcagcctttcgtaatgggtaagagctcgaactttggagcctgcctgggttggaatgtttaatgtatctgggcctcagtttcctcatctgggaagtgatagtatctgcctcacggggatgttatggtctaagatgtttgtaaagtgcttagaaccctgctactcgacaggtagcaaggtcaaataacttgctcagtcccacagctagtgatgaatgaatcggggtttcatgtgatggatgtcaggactgtgctgggcctccctcaagggcgggggaagaggggtcctcggagtcatctactggggggaggggagtaggaggaaacagcccctcagggcttctggggccaccccctggggcaaggagatttgggggtcacccaaacctccttgtgccaggtgggcatggtcatgggcccctctttaggtgggtacagtgacaaacagcttacaaactgtttgacaaaaaagtaagtggaatatgggggaaggggactagctcggggaggaggggaggagaaagctcttagcttactgccttcagtactttctgctgaccactgggaagttcttttccttttcgctcctcaggaggggaaccaagagaaccttttaggaattggggtccagggccctggttgccaaatctggttgcatgtgggcatttctagaaacgcttgtttaaaatgcagtttttccagcctgggcaacatagtgagaccctgtctctacaaaaaattaaaattagtcgagcatgttggagcgtgcctgtaattccagctacttgggaggatgaggttggaggattgcttgagctcaggaagttgagactgcagtaagccgagatcacaccaccgcactccagcctaggtgacagagtgagaccctgtctaaaataaataaataaataaataaaaatgcagtttttgatgaagcctcagacctgctgaatgagaaattttgggggtggagcccagaaagttttttttatgctccccaggtgattctgatgcacagacagttttgacacccatgacatgtaaccctgatttatccatcactagctgtgggacagcaagttgtctgagtttttatgcctgtttcctcacctgtaaaatggggcacagaatcttcttactgcatactatttcttattttaaggtcattgtcatgaggactaaatgagttgatttttgaaaagtgactagaacagtgccaggtccatagtaagcactatatatgtttattaaatgaaataaatctcctttcctaggcatttgaggagactcatctgacctcccttgacccagtgaaacagtttgctgcctggtttgaggaggctgttcagtgtcctgacataggggaagccaatgccatgtgtctggctacctgcaccaggtgggcatggctgtgggcccctctttgggtggatacatatgaactaggaagcttatgaagctctctactctggatgccaattttatggttccagctctgttattaacatgctctgtggctttaggcaagatacttgtcctctctgggcctgtgtccttacctataaaccaaagaccaggccacaaaattacatttcagtgataaaaatgcagtgccttgttcatttctgcccttgatacatccacacacaaccccttgcctccctcatctccccatctacccaagccccgtctgccattcaggagctacttctcctggtgaagctctgtctctctctcgaaatctagcacagtgcttgactatatcattcctttgacaatcatatgccctttgagacatcacttgtattagcctgttattcaattctcctcgataaagtgtaaggccttgtagccagtgctcttgtactgtgcgagtggatatctcccagagctctgagcagaggggctgatctcatagcaccactgtgatcccgaagcattggatgattgcattattgttagtccctgcccttagggtcttatgaatttgctagggctgtcttaacaaaatactgtagactggatagcttaaacaacaggagtttatttccttatagttctggtggctggaagtccaagatcaaggtgccatcaggggtggtttctgatgaggcctctgcttggggtttgcagacagctactttttaccatgtcctcacactgcctttcgtgtgtgtgtgtgtgtgtgtgtgtgtgtgtgtgtgttgtggagggcaagggaggtggttctgaagtgtctcttctcttacagtgacaccagtcctactggattagggccccacccctatgaccttacttaaccttaattacctccataaggtccccttctccaaatacagtcacattggggtttaaggctttaacataggggtttggggtgacacaattcagcccataacagggccccaggctgtggtgtcatacctctaggacaaatccccaggagcacatgggacggggtagcctgacagcccaataaagggggtgcagctggagggggtgctgagacatcctttggggagagggactatagccagaacattgaagcagactctgaccacagtgctctgctctttgctcctagagatggaaaaccctctgctcgcatgttgctgctgaagggcttcgggaaagatggcttccgcttcttcactaacttcgagagtcgaaaaggaaaagagctggtgggtgaaaagagctagtaatctttcccagggcctgcagggtttggctcttgcttcctcagtcaccttcttatgccaccccacccccccagtctacttgctctctgtgtgcaggtgccctcctgccatgaggccttggcacttgctgtgctctttgccataaatgaatgaatgcactttctaaccagcctcaccccatcagccatgacctgttccttcagatctcagcccacatgttacctcctcaggaaggccttccttgactctcactcagactcagcccctcatgctgtttgctgccattataacttgcaactttcttttttgtcttcttcttcagtttgtaactgagcatttgtttgggtgattatgtaactgatatttgtctcctctgctcaacagtaagctctgtaggagtggaggctgctctgttttatctctgctgtatcccccgcacgtctcctgttgtcagacccagagtgggcacttcgcgtgcattcaatgaatgaatccaaaatgagtaaacctccctgagtccatgccagccaagcatgcatttctcaagactcacaaatctgtgggtgagagaaatcacccagtctcactttggagtccgactggcttaaacttagctccaccacttcctgcaggaacttgggcacgtgacttagcctgtctctgtgtctgtgacaataggcctacttttgagggtttaaatgagctcttacggtgggtgcatctgctgtgggcctgcgcactacagctctcctgccttttccctgcatgccggaggcctcctctccctgtcctgatggctggctgtggattctcttttacttctaggactctaatccctttgcttcccttgtcttctactgggagccacttaaccgtcaggtgagtgaattttcccaggacagcctgggatgggctgggttggcagggcctgagtttatggctacgtctagcgaaggtccccagactgggcaaacatcccagctgggcactctgcctctaaaatagccctcagttagttggagccaagagtggtggggcagccgatcgaacagagaggaacggggcctgtgctggtagggagggcaggtggcatttaatgccattcacccagagccatccctgagcaggtgcgtgtggaaggccctgtgaagaaactgcctgaggaggaggctgagtgctacttccactcccgccccaagagcagccagattggggctgtggtcagccaccagagttctgtgatccctgatcgggaggtgagtggagctccgctgtagtcctccaggtggtggaggctttggcttatccccagaagctgtccccaggagatgccaggagatgtccccaggagatgtcctctctctccagcccagtgaaaacagtgaaaaggacagtgagaagggaaagtgggggtagggagaggggaaataggcctcctctgtccatctggccatcctgttgactgctcctggaggacagaggccagtctgctctgctcacccatgtccccagcacatatccccaggaagtccttgttaatgaatcattgactgggcctggcccttcttctaactcttccccctggacagtatctgagaaagaaaaatgaggaactggaacagctctaccaggatcaagaggtgcccaagccaaaatcctggtgagtgacatctggtagtcctctagaaagggacaccaggcccctgtgtttacttgaagccacctgcctggggaatcacagatctcctcctccctggccacccttgtcagatgcatcccagcaacttccttcaagaggccctgggatgaggggtgagggtgggagagtgacctggctagaaaactccacagagcactgaaacctctgcttctccttataggggtggctatgtcctgtaccctcaggtgatggagttctggcaaggtcaaaccaaccgcctgcatgaccggatagtctttcggcggggccta

SEQ ID NO: 13424 - DNA, 488 bp, Homo sapiens
aacgcaaatgaagatgggttcaaaaggcagcctttcgtaatggagatggaaaaccctctgctcgcatgttgctgctgaagggcttcgggaaagatggcttccgcttcttcactaacttcgagagtcgaaaaggaaaagagctggactctaatccctttgcttcccttgtcttctactgggagccacttaaccgtcaggtgcgtgtggaaggccctgtgaagaaactgcctgaggaggaggctgagtgctacttccactcccgccccaagagcagccagattggggctgtggtcagccaccagagttctgtgatccctgatcgggagtatctgagaaagaaaaatgaggaactggaacagctctaccaggatcaagaggtgcccaagccaaaatcctggggtggctatgtcctgtaccctcaggtgatggagttctggcaaggtcaaaccaaccgcctgcatgaccggatagtctttcggcggggccta

SEQ ID NO: 13425 - DNA, 6212 bp, Homo sapiens
gggtgagaaattggttccgaactcaaaggaacccagtgccgggccacagccgggtcacgtggccggcggccccccatgacgtgctggctgcggggcgtcacggcgacgttcgggcgacctgccgagtggccaggctacctcagtcacctgtgtggtcgcagtgctgccatggacctgggacccatgcgcaagagttaccgcggggaccgagaggtgccgccgctagggccaggcctcctgcaggggcgggggaaaaggggtccccggagtcatctacagcggggaggggagtagtaggagcccctcggggcttctggggccacccggtggggcaaggaggtttgaggatcaccccccgtgggaaaagggggcttcaaagacatcccaccaggggaggagttccggggaaacgcaaatgaagatgggttcaaaaggcagcctttcgtaatgggtaagagctcgaactttggagcctgcctgggttggaatgtttaatgtatctgggcctcagtttcctcatctgggaagtgatagtatctgcctcacggggatgttatggtctaagatgtttgtaaagtgcttagaaccctgctactcgacaggtagcaaggtcaaataacttgctcagtcccacagctagtgatgaatgaatcggggtttcatgtgatggatgtcaggactgtgctgggcctccctcaagggcgggggaagaggggtcctcggagtcatctactggggggaggggagtaggaggaaacagcccctcagggcttctggggccaccccctggggcaaggagatttgggggtcacccaaacctccttgtgccaggtgggcatggtcatgggcccctctttaggtgggtacagtgacaaacagcttacaaactgtttgacaaaaaagtaagtggaatatgggggaaggggactagctcggggaggaggggaggagaaagctcttagcttactgccttcagtactttctgctgaccactgggaagttcttttccttttcgctcctcaggaggggaaccaagagaaccttttaggaattggggtccagggccctggttgccaaatctggttgcatgtgggcatttctagaaacgcttgtttaaaatgcagtttttccagcctgggcaacatagtgagaccctgtctctacaaaaaattaaaattagtcgagcatgttggagcgtgcctgtaattccagctacttgggaggatgaggttggaggattgcttgagctcaggaagttgagactgcagtaagccgagatcacaccaccgcactccagcctaggtgacagagtgagaccctgtctaaaataaataaataaataaataaaaatgcagtttttgatgaagcctcagacctgctgaatgagaaattttgggggtggagcccagaaagttttttttatgctccccaggtgattctgatgcacagacagttttgacacccatgacatgtaaccctgatttatccatcactagctgtgggacagcaagttgtctgagtttttatgcctgtttcctcacctgtaaaatggggcacagaatcttcttactgcatactatttcttattttaaggtcattgtcatgaggactaaatgagttgatttttgaaaagtgactagaacagtgccaggtccatagtaagcactatatatgtttattaaatgaaataaatctcctttcctaggcatttgaggagactcatctgacctcccttgacccagtgaaacagtttgctgcctggtttgaggaggctgttcagtgtcctgacataggggaagccaatgccatgtgtctggctacctgcaccaggtgggcatggctgtgggcccctctttgggtggatacatatgaactaggaagcttatgaagctctctactctggatgccaattttatggttccagctctgttattaacatgctctgtggctttaggcaagatacttgtcctctctgggcctgtgtccttacctataaaccaaagaccaggccacaaaattacatttcagtgataaaaatgcagtgccttgttcatttctgcccttgatacatccacacacaaccccttgcctccctcatctccccatctacccaagccccgtctgccattcaggagctacttctcctggtgaagctctgtctctctctcgaaatctagcacagtgcttgactatatcattcctttgacaatcatatgccctttgagacatcacttgtattagcctgttattcaattctcctcgataaagtgtaaggccttgtagccagtgctcttgtactgtgcgagtggatatctcccagagctctgagcagaggggctgatctcatagcaccactgtgatcccgaagcattggatgattgcattattgttagtccctgcccttagggtcttatgaatttgctagggctgtcttaacaaaatactgtagactggatagcttaaacaacaggagtttatttccttatagttctggtggctggaagtccaagatcaaggtgccatcaggggtggtttctgatgaggcctctgcttggggtttgcagacagctactttttaccatgtcctcacactgcctttcgtgtgtgtgtgtgtgtgtgtgtgtgtgtgtgtgtgttgtggagggcaagggaggtggttctgaagtgtctcttctcttacagtgacaccagtcctactggattagggccccacccctatgaccttacttaaccttaattacctccataaggtccccttctccaaatacagtcacattggggtttaaggctttaacataggggtttggggtgacacaattcagcccataacagggccccaggctgtggtgtcatacctctaggacaaatccccaggagcacatgggacggggtagcctgacagcccaataaagggggtgcagctggagggggtgctgagacatcctttggggagagggactatagccagaacattgaagcagactctgaccacagtgctctgctctttgctcctagagatggaaaaccctctgctcgcatgttgctgctgaagggcttcgggaaagatggcttccgcttcttcactaacttcgagagtcgaaaaggaaaagagctggtgggtgaaaagagctagtaatctttcccagggcctgcagggtttggctcttgcttcctcagtcaccttcttatgccaccccacccccccagtctacttgctctctgtgtgcaggtgccctcctgccatgaggccttggcacttgctgtgctctttgccataaatgaatgaatgcactttctaaccagcctcaccccatcagccatgacctgttccttcagatctcagcccacatgttacctcctcaggaaggccttccttgactctcactcagactcagcccctcatgctgtttgctgccattataacttgcaactttcttttttgtcttcttcttcagtttgtaactgagcatttgtttgggtgattatgtaactgatatttgtctcctctgctcaacagtaagctctgtaggagtggaggctgctctgttttatctctgctgtatcccccgcacgtctcctgttgtcagacccagagtgggcacttcgcgtgcattcaatgaatgaatccaaaatgagtaaacctccctgagtccatgccagccaagcatgcatttctcaagactcacaaatctgtgggtgagagaaatcacccagtctcactttggagtccgactggcttaaacttagctccaccacttcctgcaggaacttgggcacgtgacttagcctgtctctgtgtctgtgacaataggcctacttttgagggtttaaatgagctcttacggtgggtgcatctgctgtgggcctgcgcactacagctctcctgccttttccctgcatgccggaggcctcctctccctgtcctgatggctggctgtggattctcttttacttctaggactctaatccctttgcttcccttgtcttctactgggagccacttaaccgtcaggtgagtgaattttcccaggacagcctgggatgggctgggttggcagggcctgagtttatggctacgtctagcgaaggtccccagactgggcaaacatcccagctgggcactctgcctctaaaatagccctcagttagttggagccaagagtggtggggcagccgatcgaacagagaggaacggggcctgtgctggtagggagggcaggtggcatttaatgccattcacccagagccatccctgagcaggtgcgtgtggaaggccctgtgaagaaactgcctgaggaggaggctgagtgctacttccactcccgccccaagagcagccagattggggctgtggtcagccaccagagttctgtgatccctgatcgggaggtgagtggagctccgctgtagtcctccaggtggtggaggctttggcttatccccagaagctgtccccaggagatgccaggagatgtccccaggagatgtcctctctctccagcccagtgaaaacagtgaaaaggacagtgagaagggaaagtgggggtagggagaggggaaataggcctcctctgtccatctggccatcctgttgactgctcctggaggacagaggccagtctgctctgctcacccatgtccccagcacatatccccaggaagtccttgttaatgaatcattgactgggcctggcccttcttctaactcttccccctggacagtatctgagaaagaaaaatgaggaactggaacagctctaccaggatcaagaggtgcccaagccaaaatcctggtgagtgacatctggtagtcctctagaaagggacaccaggcccctgtgtttacttgaagccacctgcctggggaatcacagatctcctcctccctggccacccttgtcagatgcatcccagcaacttccttcaagaggccctgggatgaggggtgagggtgggagagtgacctggctagaaaactccacagagcactgaaacctctgcttctccttataggggtggctatgtcctgtaccctcaggtgatggagttctggcaaggtcaaaccaaccgcctgcatgaccggatagtctttcggcggggcctacccacaggagattcccctttggggcccatgacccaccgcggggaggaagactggctctatgagagacttgcaccttaactctgggacctgctggcccagagtggagctagggctaggtgtcaagagagggtgtgggattgggacccaggcccttctttctaaactcaacccatttccctccctaccccttatcttcaggactcttcagagctaatcctctaagttctctgtactcagttggttctcagttagctggtcaagtggagtgtaatggtggcgtagagaatcacaaatggaaaataattccataattatttttttgaccttgcctatgattgattaggatagctccctctaggggtagcagccggtgtgactccctttctggtgacagacagggccccagcagccctgtctgttaccatgtgagtcatactggccaaagcttagtcctagcatatgcacctgagccaacctggccaatcagattgttttgtcaataatttgaaatttgaactggagagatccagaaccttgggagtcattaaagccaagtcattcatagcagccaggaaacaataggaaccaaaagcctctgcctgctgctattgcaattcccaggatctctccttccctggatccctccctcccaggtctgggctgtgcagttcctccccctgccttaaaacaccccactatctctgtaaagtctctctctctcttttttttttttttacttaatctagctagaatctatttctgttgattacaacttaactaactcatttacggataggacttttttttttctttttttcttttttcttttcttttttttttttgagatggagtctcactctgtcacccaggctggagtgcagtggtgtgatcttggctcactgcaacctctgcctcccaggttcaagcaattctcctgcctcagcctcccaagtagctgggactacaggcacacgccaccacacccaactaatttttgtatttttagtagagatggggtttcaccatgttggccaggattgtctccatctcttgaccttgtgatccacccacctcagcctcccaaagtgctgggattacaggcatgagc

SEQ ID NO: 13426 - DNA, 3315 bp, Homo sapiens
gggtgagaaattggttccgaactcaaaggaacccagtgccgggccacagccgggtcacgtggccggcggccccccatgacgtgctggctgcggggcgtcacggcgacgttcgggcgacctgccgagtggccaggctacctcagtcacctgtgtggtcgcagtgctgccatggacctgggacccatgcgcaagagttaccgcggggaccgagaggcatttgaggagactcatctgacctcccttgacccagtgaaacagtttgctgcctggtttgaggaggctgttcagtgtcctgacataggggaagccaatgccatgtgtctggctacctgcaccagagatggaaaaccctctgctcgcatgttgctgctgaagggcttcgggaaagatggcttccgcttcttcactaacttcgagagtcgaaaaggaaaagagctggtgggtgaaaagagctagtaatctttcccagggcctgcagggtttggctcttgcttcctcagtcaccttcttatgccaccccacccccccagtctacttgctctctgtgtgcaggtgccctcctgccatgaggccttggcacttgctgtgctctttgccataaatgaatgaatgcactttctaaccagcctcaccccatcagccatgacctgttccttcagatctcagcccacatgttacctcctcaggaaggccttccttgactctcactcagactcagcccctcatgctgtttgctgccattataacttgcaactttcttttttgtcttcttcttcagtttgtaactgagcatttgtttgggtgattatgtaactgatatttgtctcctctgctcaacagtaagctctgtaggagtggaggctgctctgttttatctctgctgtatcccccgcacgtctcctgttgtcagacccagagtgggcacttcgcgtgcattcaatgaatgaatccaaaatgagtaaacctccctgagtccatgccagccaagcatgcatttctcaagactcacaaatctgtgggtgagagaaatcacccagtctcactttggagtccgactggcttaaacttagctccaccacttcctgcaggaacttgggcacgtgacttagcctgtctctgtgtctgtgacaataggcctacttttgagggtttaaatgagctcttacggtgggtgcatctgctgtgggcctgcgcactacagctctcctgccttttccctgcatgccggaggcctcctctccctgtcctgatggctggctgtggattctcttttacttctaggactctaatccctttgcttcccttgtcttctactgggagccacttaaccgtcaggtgagtgaattttcccaggacagcctgggatgggctgggttggcagggcctgagtttatggctacgtctagcgaaggtccccagactgggcaaacatcccagctgggcactctgcctctaaaatagccctcagttagttggagccaagagtggtggggcagccgatcgaacagagaggaacggggcctgtgctggtagggagggcaggtggcatttaatgccattcacccagagccatccctgagcaggtgcgtgtggaaggccctgtgaagaaactgcctgaggaggaggctgagtgctacttccactcccgccccaagagcagccagattggggctgtggtcagccaccagagttctgtgatccctgatcgggaggtgagtggagctccgctgtagtcctccaggtggtggaggctttggcttatccccagaagctgtccccaggagatgccaggagatgtccccaggagatgtcctctctctccagcccagtgaaaacagtgaaaaggacagtgagaagggaaagtgggggtagggagaggggaaataggcctcctctgtccatctggccatcctgttgactgctcctggaggacagaggccagtctgctctgctcacccatgtccccagcacatatccccaggaagtccttgttaatgaatcattgactgggcctggcccttcttctaactcttccccctggacagtatctgagaaagaaaaatgaggaactggaacagctctaccaggatcaagaggtgcccaagccaaaatcctggggtggctatgtcctgtaccctcaggtgatggagttctggcaaggtcaaaccaaccgcctgcatgaccggatagtctttcggcggggcctacccacaggagattcccctttggggcccatgacccaccgcggggaggaagactggctctatgagagacttgcaccttaactctgggacctgctggcccagagtggagctagggctaggtgtcaagagagggtgtgggattgggacccaggcccttctttctaaactcaacccatttccctccctaccccttatcttcaggactcttcagagctaatcctctaagttctctgtactcagttggttctcagttagctggtcaagtggagtgtaatggtggcgtagagaatcacaaatggaaaataattccataattatttttttgaccttgcctatgattgattaggatagctccctctaggggtagcagccggtgtgactccctttctggtgacagacagggccccagcagccctgtctgttaccatgtgagtcatactggccaaagcttagtcctagcatatgcacctgagccaacctggccaatcagattgttttgtcaataatttgaaatttgaactggagagatccagaaccttgggagtcattaaagccaagtcattcatagcagccaggaaacaataggaaccaaaagcctctgcctgctgctattgcaattcccaggatctctccttccctggatccctccctcccaggtctgggctgtgcagttcctccccctgccttaaaacaccccactatctctgtaaagtctctctctctcttttttttttttttacttaatctagctagaatctatttctgttgattacaacttaactaactcatttacggataggacttttttttttctttttttcttttttcttttcttttttttttttgagatggagtctcactctgtcacccaggctggagtgcagtggtgtgatcttggctcactgcaacctctgcctcccaggttcaagcaattctcctgcctcagcctcccaagtagctgggactacaggcacacgccaccacacccaactaatttttgtatttttagtagagatggggtttcaccatgttggccaggattgtctccatctcttgaccttgtgatccacccacctcagcctcccaaagtgctgggattacaggcatgagc

SEQ ID NO: 13427 - DNA, 7740 bp, Homo sapiens
gttagcttggttgggcgactggcaaatccttccttccccggggtagaagtccagggtgagaaattggttccgaactcaaaggaacccagtgccgggccacagccgggtcacgtggccggcggccccccatgacgtgctggctgcggggcgtcacggcgacgttcgggcgacctgccgagtggccaggctacctcagtcacctgtgtggtcgcagtgctgccatggacctgggacccatgcgcaagagttaccgcggggaccgagaggtgccgccgctagggccaggcctcctgcaggggcgggggaaaaggggtccccggagtcatctacagcggggaggggagtagtaggagcccctcggggcttctggggccacccggtggggcaaggaggtttgaggatcaccccccgtgggaaaagggggcttcaaagacatcccaccaggggaggagttccggggaaacgcaaatgaagatgggttcaaaaggcagcctttcgtaatgggtaagagctcgaactttggagcctgcctgggttggaatgtttaatgtatctgggcctcagtttcctcatctgggaagtgatagtatctgcctcacggggatgttatggtctaagatgtttgtaaagtgcttagaaccctgctactcgacaggtagcaaggtcaaataacttgctcagtcccacagctagtgatgaatgaatcggggtttcatgtgatggatgtcaggactgtgctgggcctccctcaagggcgggggaagaggggtcctcggagtcatctactggggggaggggagtaggaggaaacagcccctcagggcttctggggccaccccctggggcaaggagatttgggggtcacccaaacctccttgtgccaggtgggcatggtcatgggcccctctttaggtgggtacagtgacaaacagcttacaaactgtttgacaaaaaagtaagtggaatatgggggaaggggactagctcggggaggaggggaggagaaagctcttagcttactgccttcagtactttctgctgaccactgggaagttcttttccttttcgctcctcaggaggggaaccaagagaaccttttaggaattggggtccagggccctggttgccaaatctggttgcatgtgggcatttctagaaacgcttgtttaaaatgcagtttttccagcctgggcaacatagtgagaccctgtctctacaaaaaattaaaattagtcgagcatgttggagcgtgcctgtaattccagctacttgggaggatgaggttggaggattgcttgagctcaggaagttgagactgcagtaagccgagatcacaccaccgcactccagcctaggtgacagagtgagaccctgtctaaaataaataaataaataaataaaaatgcagtttttgatgaagcctcagacctgctgaatgagaaattttgggggtggagcccagaaagttttttttatgctccccaggtgattctgatgcacagacagttttgacacccatgacatgtaaccctgatttatccatcactagctgtgggacagcaagttgtctgagtttttatgcctgtttcctcacctgtaaaatggggcacagaatcttcttactgcatactatttcttattttaaggtcattgtcatgaggactaaatgagttgatttttgaaaagtgactagaacagtgccaggtccatagtaagcactatatatgtttattaaatgaaataaatctcctttcctaggcatttgaggagactcatctgacctcccttgacccagtgaaacagtttgctgcctggtttgaggaggctgttcagtgtcctgacataggggaagccaatgccatgtgtctggctacctgcaccaggtgggcatggctgtgggcccctctttgggtggatacatatgaactaggaagcttatgaagctctctactctggatgccaattttatggttccagctctgttattaacatgctctgtggctttaggcaagatacttgtcctctctgggcctgtgtccttacctataaaccaaagaccaggccacaaaattacatttcagtgataaaaatgcagtgccttgttcatttctgcccttgatacatccacacacaaccccttgcctccctcatctccccatctacccaagccccgtctgccattcaggagctacttctcctggtgaagctctgtctctctctcgaaatctagcacagtgcttgactatatcattcctttgacaatcatatgccctttgagacatcacttgtattagcctgttattcaattctcctcgataaagtgtaaggccttgtagccagtgctcttgtactgtgcgagtggatatctcccagagctctgagcagaggggctgatctcatagcaccactgtgatcccgaagcattggatgattgcattattgttagtccctgcccttagggtcttatgaatttgctagggctgtcttaacaaaatactgtagactggatagcttaaacaacaggagtttatttccttatagttctggtggctggaagtccaagatcaaggtgccatcaggggtggtttctgatgaggcctctgcttggggtttgcagacagctactttttaccatgtcctcacactgcctttcgtgtgtgtgtgtgtgtgtgtgtgtgtgtgtgtgtgttgtggagggcaagggaggtggttctgaagtgtctcttctcttacagtgacaccagtcctactggattagggccccacccctatgaccttacttaaccttaattacctccataaggtccccttctccaaatacagtcacattggggtttaaggctttaacataggggtttggggtgacacaattcagcccataacagggccccaggctgtggtgtcatacctctaggacaaatccccaggagcacatgggacggggtagcctgacagcccaataaagggggtgcagctggagggggtgctgagacatcctttggggagagggactatagccagaacattgaagcagactctgaccacagtgctctgctctttgctcctagagatggaaaaccctctgctcgcatgttgctgctgaagggcttcgggaaagatggcttccgcttcttcactaacttcgagagtcgaaaaggaaaagagctggtgggtgaaaagagctagtaatctttcccagggcctgcagggtttggctcttgcttcctcagtcaccttcttatgccaccccacccccccagtctacttgctctctgtgtgcaggtgccctcctgccatgaggccttggcacttgctgtgctctttgccataaatgaatgaatgcactttctaaccagcctcaccccatcagccatgacctgttccttcagatctcagcccacatgttacctcctcaggaaggccttccttgactctcactcagactcagcccctcatgctgtttgctgccattataacttgcaactttcttttttgtcttcttcttcagtttgtaactgagcatttgtttgggtgattatgtaactgatatttgtctcctctgctcaacagtaagctctgtaggagtggaggctgctctgttttatctctgctgtatcccccgcacgtctcctgttgtcagacccagagtgggcacttcgcgtgcattcaatgaatgaatccaaaatgagtaaacctccctgagtccatgccagccaagcatgcatttctcaagactcacaaatctgtgggtgagagaaatcacccagtctcactttggagtccgactggcttaaacttagctccaccacttcctgcaggaacttgggcacgtgacttagcctgtctctgtgtctgtgacaataggcctacttttgagggtttaaatgagctcttacggtgggtgcatctgctgtgggcctgcgcactacagctctcctgccttttccctgcatgccggaggcctcctctccctgtcctgatggctggctgtggattctcttttacttctaggactctaatccctttgcttcccttgtcttctactgggagccacttaaccgtcaggtgagtgaattttcccaggacagcctgggatgggctgggttggcagggcctgagtttatggctacgtctagcgaaggtccccagactgggcaaacatcccagctgggcactctgcctctaaaatagccctcagttagttggagccaagagtggtggggcagccgatcgaacagagaggaacggggcctgtgctggtagggagggcaggtggcatttaatgccattcacccagagccatccctgagcaggtgcgtgtggaaggccctgtgaagaaactgcctgaggaggaggctgagtgctacttccactcccgccccaagagcagccagattggggctgtggtcagccaccagagttctgtgatccctgatcgggaggtgagtggagctccgctgtagtcctccaggtggtggaggctttggcttatccccagaagctgtccccaggagatgccaggagatgtccccaggagatgtcctctctctccagcccagtgaaaacagtgaaaaggacagtgagaagggaaagtgggggtagggagaggggaaataggcctcctctgtccatctggccatcctgttgactgctcctggaggacagaggccagtctgctctgctcacccatgtccccagcacatatccccaggaagtccttgttaatgaatcattgactgggcctggcccttcttctaactcttccccctggacagtatctgagaaagaaaaatgaggaactggaacagctctaccaggatcaagaggtgcccaagccaaaatcctggtgagtgacatctggtagtcctctagaaagggacaccaggcccctgtgtttacttgaagccacctgcctggggaatcacagatctcctcctccctggccacccttgtcagatgcatcccagcaacttccttcaagaggccctgggatgaggggtgagggtgggagagtgacctggctagaaaactccacagagcactgaaacctctgcttctccttataggggtggctatgtcctgtaccctcaggtgatggagttctggcaaggtcaaaccaaccgcctgcatgaccggatagtctttcggcggggcctacccacaggagattcccctttggggcccatgacccaccgcggggaggaagactggctctatgagagacttgcaccttaactctgggacctgctggcccagagtggagctagggctaggtgtcaagagagggtgtgggattgggacccaggcccttctttctaaactcaacccatttccctccctaccccttatcttcaggactcttcagagctaatcctctaagttctctgtactcagttggttctcagttagctggtcaagtggagtgtaatggtggcgtagagaatcacaaatggaaaataattccataattatttttttgaccttgcctatgattgattaggatagctccctctaggggtagcagccggtgtgactccctttctggtgacagacagggccccagcagccctgtctgttaccatgtgagtcatactggccaaagcttagtcctagcatatgcacctgagccaacctggccaatcagattgttttgtcaataatttgaaatttgaactggagagatccagaaccttgggagtcattaaagccaagtcattcatagcagccaggaaacaataggaaccaaaagcctctgcctgctgctattgcaattcccaggatctctccttccctggatccctccctcccaggtctgggctgtgcagttcctccccctgccttaaaacaccccactatctctgtaaagtctctctctctcttttttttttttttacttaatctagctagaatctatttctgttgattacaacttaactaactcatttacggataggacttttttttttctttttttcttttttcttttcttttttttttttgagatggagtctcactctgtcacccaggctggagtgcagtggtgtgatcttggctcactgcaacctctgcctcccaggttcaagcaattctcctgcctcagcctcccaagtagctgggactacaggcacacgccaccacacccaactaatttttgtatttttagtagagatggggtttcaccatgttggccaggattgtctccatctcttgaccttgtgatccacccacctcagcctcccaaagtgctgggattacaggcatgagccaccacacccagcgagacggggtttcattatgttggccaggctggtctccaactcctgacctaaagtgatctgcccgccttggcctcccaaagtgctgggattacagacatgagccaccacgcttggccgggatagtatatttttatagcacttcccctactgattgctgccttctctgtggctacaagggacccacagaattacagggaagttacagggaagcaggtttcatctcaatattgggagagatttcaaacaatcacacctgcctgagaaggagtgggctgtcactaggaatttttattcccagtccgtcaggaattttgtagaagggcttcatgtgctggtaccaataggacaggaagattttaatcagctttactatctatgtttttttatggaaactgtgtgtatgtatacatacattttccaaaaagaaaaattaaatgattatagagattatgtttttcagactactcacgtatctgcttttcttactccccacctctgctgataattcctagttcattggtttttcccccacactggaattacctggggagcttaaaaaaccctgatgcctgggtcccaccctcagagatgattgaaccagcctggccagcatggcaaaaccctgtctctactatgatatgaatgcagcctgggcactgggaaatttaaaaactccccagataattctgtgcagccaaggttgagacctcctagtctagagctttgctatacacagggtggtccacaagccaggagcatcagcatcacttggcagcgccttagagattcagaccccagacccactgaatctgaccctgcattttcactagaccccaggtgatcagctgcactagactcaacctctaaaccaagacctcccaccctcacagtctatgatcctttagtgaccctcagctgagtcctgtgctgaactgtgtttgttctccttgagcacatgcccgctaaccagggacagactggatgagcaagcaacctgctggctatggagaagagccaggctgggtaaatgtttgctgtgactaagccaggatcaaagaactgcctgttgcttgcactggctggcactgagcttgccactctgtgaactgtgcttccttcccctgcatggacctgtgcctcagtcactattatccgcaggccttctccaagggcagccctctccttgtttatccctcttaagcctgcgtgcaggaaggcacattaaccctgtggccccctgcaggcaggagggtgttgggtgcccttacctaccttgccctttttcttgtaccgtaggctgtgccgtttatgagtaagtgatgtgtgtctgtgtgtgtgtctagaagtgctgcactcaccttgtgttattggaggttgtgtaaccccctagctttgagcctggtctcagatgttccttttccgttctctgtccagccgttaccgcccccagtctgtaataaaa

SEQ ID NO: 13428 - DNA, 3657 bp, Homo sapiens
gttagcttggttgggcgactggcaaatccttccttccccggggtagaagtccagggtgagaaattggttccgaactcaaaggaacccagtgccgggccacagccgggtcacgtggccggcggccccccatgacgtgctggctgcggggcgtcacggcgacgttcgggcgacctgccgagtggccaggctacctcagtcacctgtgtggtcgcagtgctgccatggacctgggacccatgcgcaagagttaccgcggggaccgagaggtgccgccgctagggccaggcctcctgcaggggcgggggaaaaggggtccccggagtcatctacagcggggaggggagtagtaggagcccctcggggcttctggggccacccggtggggcaaggaggtttgaggatcaccccccgtgggaaaagggggcttcaaagacatcccaccaggggaggagttccggggaaacgcaaatgaagatgggttcaaaaggcagcctttcgtaatgggcatttgaggagactcatctgacctcccttgacccagtgaaacagtttgctgcctggtttgaggaggctgttcagtgtcctgacataggggaagccaatgccatgtgtctggctacctgcaccagagatggaaaaccctctgctcgcatgttgctgctgaagggcttcgggaaagatggcttccgcttcttcactaacttcgagagtcgaaaaggaaaagagctggactctaatccctttgcttcccttgtcttctactgggagccacttaaccgtcaggtgcgtgtggaaggccctgtgaagaaactgcctgaggaggaggctgagtgctacttccactcccgccccaagagcagccagattggggctgtggtcagccaccagagttctgtgatccctgatcgggagtatctgagaaagaaaaatgaggaactggaacagctctaccaggatcaagaggtgcccaagccaaaatcctggggtggctatgtcctgtaccctcaggtgatggagttctggcaaggtcaaaccaaccgcctgcatgaccggatagtctttcggcggggcctacccacaggagattcccctttggggcccatgacccaccgcggggaggaagactggctctatgagagacttgcaccttaactctgggacctgctggcccagagtggagctagggctaggtgtcaagagagggtgtgggattgggacccaggcccttctttctaaactcaacccatttccctccctaccccttatcttcaggactcttcagagctaatcctctaagttctctgtactcagttggttctcagttagctggtcaagtggagtgtaatggtggcgtagagaatcacaaatggaaaataattccataattatttttttgaccttgcctatgattgattaggatagctccctctaggggtagcagccggtgtgactccctttctggtgacagacagggccccagcagccctgtctgttaccatgtgagtcatactggccaaagcttagtcctagcatatgcacctgagccaacctggccaatcagattgttttgtcaataatttgaaatttgaactggagagatccagaaccttgggagtcattaaagccaagtcattcatagcagccaggaaacaataggaaccaaaagcctctgcctgctgctattgcaattcccaggatctctccttccctggatccctccctcccaggtctgggctgtgcagttcctccccctgccttaaaacaccccactatctctgtaaagtctctctctctcttttttttttttttacttaatctagctagaatctatttctgttgattacaacttaactaactcatttacggataggacttttttttttctttttttcttttttcttttcttttttttttttgagatggagtctcactctgtcacccaggctggagtgcagtggtgtgatcttggctcactgcaacctctgcctcccaggttcaagcaattctcctgcctcagcctcccaagtagctgggactacaggcacacgccaccacacccaactaatttttgtatttttagtagagatggggtttcaccatgttggccaggattgtctccatctcttgaccttgtgatccacccacctcagcctcccaaagtgctgggattacaggcatgagccaccacacccagcgagacggggtttcattatgttggccaggctggtctccaactcctgacctaaagtgatctgcccgccttggcctcccaaagtgctgggattacagacatgagccaccacgcttggccgggatagtatatttttatagcacttcccctactgattgctgccttctctgtggctacaagggacccacagaattacagggaagttacagggaagcaggtttcatctcaatattgggagagatttcaaacaatcacacctgcctgagaaggagtgggctgtcactaggaatttttattcccagtccgtcaggaattttgtagaagggcttcatgtgctggtaccaataggacaggaagattttaatcagctttactatctatgtttttttatggaaactgtgtgtatgtatacatacattttccaaaaagaaaaattaaatgattatagagattatgtttttcagactactcacgtatctgcttttcttactccccacctctgctgataattcctagttcattggtttttcccccacactggaattacctggggagcttaaaaaaccctgatgcctgggtcccaccctcagagatgattgaaccagcctggccagcatggcaaaaccctgtctctactatgatatgaatgcagcctgggcactgggaaatttaaaaactccccagataattctgtgcagccaaggttgagacctcctagtctagagctttgctatacacagggtggtccacaagccaggagcatcagcatcacttggcagcgccttagagattcagaccccagacccactgaatctgaccctgcattttcactagaccccaggtgatcagctgcactagactcaacctctaaaccaagacctcccaccctcacagtctatgatcctttagtgaccctcagctgagtcctgtgctgaactgtgtttgttctccttgagcacatgcccgctaaccagggacagactggatgagcaagcaacctgctggctatggagaagagccaggctgggtaaatgtttgctgtgactaagccaggatcaaagaactgcctgttgcttgcactggctggcactgagcttgccactctgtgaactgtgcttccttcccctgcatggacctgtgcctcagtcactattatccgcaggccttctccaagggcagccctctccttgtttatccctcttaagcctgcgtgcaggaaggcacattaaccctgtggccccctgcaggcaggagggtgttgggtgcccttacctaccttgccctttttcttgtaccgtaggctgtgccgtttatgagtaagtgatgtgtgtctgtgtgtgtgtctagaagtgctgcactcaccttgtgttattggaggttgtgtaaccccctagctttgagcctggtctcagatgttccttttccgttctctgtccagccgttaccgcccccagtctgtaataaaa

SEQ ID NO: 13429 - DNA, 5412 bp, Homo sapiens
ggagttccggggaaacgcaaatgaagatgggttcaaaaggcagcctttcgtaatgggtaagagctcgaactttggagcctgcctgggttggaatgtttaatgtatctgggcctcagtttcctcatctgggaagtgatagtatctgcctcacggggatgttatggtctaagatgtttgtaaagtgcttagaaccctgctactcgacaggtagcaaggtcaaataacttgctcagtcccacagctagtgatgaatgaatcggggtttcatgtgatggatgtcaggactgtgctgggcctccctcaagggcgggggaagaggggtcctcggagtcatctactggggggaggggagtaggaggaaacagcccctcagggcttctggggccaccccctggggcaaggagatttgggggtcacccaaacctccttgtgccaggtgggcatggtcatgggcccctctttaggtgggtacagtgacaaacagcttacaaactgtttgacaaaaaagtaagtggaatatgggggaaggggactagctcggggaggaggggaggagaaagctcttagcttactgccttcagtactttctgctgaccactgggaagttcttttccttttcgctcctcaggaggggaaccaagagaaccttttaggaattggggtccagggccctggttgccaaatctggttgcatgtgggcatttctagaaacgcttgtttaaaatgcagtttttccagcctgggcaacatagtgagaccctgtctctacaaaaaattaaaattagtcgagcatgttggagcgtgcctgtaattccagctacttgggaggatgaggttggaggattgcttgagctcaggaagttgagactgcagtaagccgagatcacaccaccgcactccagcctaggtgacagagtgagaccctgtctaaaataaataaataaataaataaaaatgcagtttttgatgaagcctcagacctgctgaatgagaaattttgggggtggagcccagaaagttttttttatgctccccaggtgattctgatgcacagacagttttgacacccatgacatgtaaccctgatttatccatcactagctgtgggacagcaagttgtctgagtttttatgcctgtttcctcacctgtaaaatggggcacagaatcttcttactgcatactatttcttattttaaggtcattgtcatgaggactaaatgagttgatttttgaaaagtgactagaacagtgccaggtccatagtaagcactatatatgtttattaaatgaaataaatctcctttcctaggcatttgaggagactcatctgacctcccttgacccagtgaaacagtttgctgcctggtttgaggaggctgttcagtgtcctgacataggggaagccaatgccatgtgtctggctacctgcaccaggtgggcatggctgtgggcccctctttgggtggatacatatgaactaggaagcttatgaagctctctactctggatgccaattttatggttccagctctgttattaacatgctctgtggctttaggcaagatacttgtcctctctgggcctgtgtccttacctataaaccaaagaccaggccacaaaattacatttcagtgataaaaatgcagtgccttgttcatttctgcccttgatacatccacacacaaccccttgcctccctcatctccccatctacccaagccccgtctgccattcaggagctacttctcctggtgaagctctgtctctctctcgaaatctagcacagtgcttgactatatcattcctttgacaatcatatgccctttgagacatcacttgtattagcctgttattcaattctcctcgataaagtgtaaggccttgtagccagtgctcttgtactgtgcgagtggatatctcccagagctctgagcagaggggctgatctcatagcaccactgtgatcccgaagcattggatgattgcattattgttagtccctgcccttagggtcttatgaatttgctagggctgtcttaacaaaatactgtagactggatagcttaaacaacaggagtttatttccttatagttctggtggctggaagtccaagatcaaggtgccatcaggggtggtttctgatgaggcctctgcttggggtttgcagacagctactttttaccatgtcctcacactgcctttcgtgtgtgtgtgtgtgtgtgtgtgtgtgtgtgtgtgttgtggagggcaagggaggtggttctgaagtgtctcttctcttacagtgacaccagtcctactggattagggccccacccctatgaccttacttaaccttaattacctccataaggtccccttctccaaatacagtcacattggggtttaaggctttaacataggggtttggggtgacacaattcagcccataacagggccccaggctgtggtgtcatacctctaggacaaatccccaggagcacatgggacggggtagcctgacagcccaataaagggggtgcagctggagggggtgctgagacatcctttggggagagggactatagccagaacattgaagcagactctgaccacagtgctctgctctttgctcctagagatggaaaaccctctgctcgcatgttgctgctgaagggcttcgggaaagatggcttccgcttcttcactaacttcgagagtcgaaaaggaaaagagctggtgggtgaaaagagctagtaatctttcccagggcctgcagggtttggctcttgcttcctcagtcaccttcttatgccaccccacccccccagtctacttgctctctgtgtgcaggtgccctcctgccatgaggccttggcacttgctgtgctctttgccataaatgaatgaatgcactttctaaccagcctcaccccatcagccatgacctgttccttcagatctcagcccacatgttacctcctcaggaaggccttccttgactctcactcagactcagcccctcatgctgtttgctgccattataacttgcaactttcttttttgtcttcttcttcagtttgtaactgagcatttgtttgggtgattatgtaactgatatttgtctcctctgctcaacagtaagctctgtaggagtggaggctgctctgttttatctctgctgtatcccccgcacgtctcctgttgtcagacccagagtgggcacttcgcgtgcattcaatgaatgaatccaaaatgagtaaacctccctgagtccatgccagccaagcatgcatttctcaagactcacaaatctgtgggtgagagaaatcacccagtctcactttggagtccgactggcttaaacttagctccaccacttcctgcaggaacttgggcacgtgacttagcctgtctctgtgtctgtgacaataggcctacttttgagggtttaaatgagctcttacggtgggtgcatctgctgtgggcctgcgcactacagctctcctgccttttccctgcatgccggaggcctcctctccctgtcctgatggctggctgtggattctcttttacttctaggactctaatccctttgcttcccttgtcttctactgggagccacttaaccgtcaggtgagtgaattttcccaggacagcctgggatgggctgggttggcagggcctgagtttatggctacgtctagcgaaggtccccagactgggcaaacatcccagctgggcactctgcctctaaaatagccctcagttagttggagccaagagtggtggggcagccgatcgaacagagaggaacggggcctgtgctggtagggagggcaggtggcatttaatgccattcacccagagccatccctgagcaggtgcgtgtggaaggccctgtgaagaaactgcctgaggaggaggctgagtgctacttccactcccgccccaagagcagccagattggggctgtggtcagccaccagagttctgtgatccctgatcgggaggtgagtggagctccgctgtagtcctccaggtggtggaggctttggcttatccccagaagctgtccccaggagatgccaggagatgtccccaggagatgtcctctctctccagcccagtgaaaacagtgaaaaggacagtgagaagggaaagtgggggtagggagaggggaaataggcctcctctgtccatctggccatcctgttgactgctcctggaggacagaggccagtctgctctgctcacccatgtccccagcacatatccccaggaagtccttgttaatgaatcattgactgggcctggcccttcttctaactcttccccctggacagtatctgagaaagaaaaatgaggaactggaacagctctaccaggatcaagaggtgcccaagccaaaatcctggtgagtgacatctggtagtcctctagaaagggacaccaggcccctgtgtttacttgaagccacctgcctggggaatcacagatctcctcctccctggccacccttgtcagatgcatcccagcaacttccttcaagaggccctgggatgaggggtgagggtgggagagtgacctggctagaaaactccacagagcactgaaacctctgcttctccttataggggtggctatgtcctgtaccctcaggtgatggagttctggcaaggtcaaaccaaccgcctgcatgaccggatagtctttcggcggggcctacccacaggagattcccctttggggcccatgacccaccgcggggaggaagactggctctatgagagacttgcaccttaactctgggacctgctggcccagagtggagctagggctaggtgtcaagagagggtgtgggattgggacccaggcccttctttctaaactcaacccatttccctccctaccccttatcttcaggactcttcagagctaatcctctaagttctctgtactcagttggttctcagttagctggtcaagtggagtgtaatggtggcgtagagaatcacaaatggaaaataattccataattatttttttgaccttgcctatgattgattaggatagctccctctaggggtagcagccggtgtgactccctttctggtgacagacagggccccagcagccctgtctgttaccatgtgagtcatactggccaaagcttagtcctagcatatgcacctgagccaacctggccaatcagattgttttgtcaataatttgaaatttgaactggagagatccagaaccttgggagtcattaaagccaagtcattcatagcagccaggaaacaataggaaccaaaagcctctgcctgctgctattgcaattcccaggatctctccttccctggatccctccctcccaggtctgggctgtgcagttcctccccctgccttaaaacaccccactatctct

SEQ ID NO: 13430 - DNA, 1411 bp, Homo sapiens
ggagttccggggaaacgcaaatgaagatgggttcaaaaggcagcctttcgtaatgggtaagagctcgaactttggagcctgcctgggttggaatgtttaatgtatctgggcctcagtttcctcatctgggaagtgatagcatttgaggagactcatctgacctcccttgacccagtgaaacagtttgctgcctggtttgaggaggctgttcagtgtcctgacataggggaagccaatgccatgtgtctggctacctgcaccagagatggaaaaccctctgctcgcatgttgctgctgaagggcttcgggaaagatggcttccgcttcttcactaacttcgagagtcgaaaaggaaaagagctggactctaatccctttgcttcccttgtcttctactgggagccacttaaccgtcaggtgcgtgtggaaggccctgtgaagaaactgcctgaggaggaggctgagtgctacttccactcccgccccaagagcagccagattggggctgtggtcagccaccagagttctgtgatccctgatcgggagtatctgagaaagaaaaatgaggaactggaacagctctaccaggatcaagaggtgcccaagccaaaatcctggggtggctatgtcctgtaccctcaggtgatggagttctggcaaggtcaaaccaaccgcctgcatgaccggatagtctttcggcggggcctacccacaggagattcccctttggggcccatgacccaccgcggggaggaagactggctctatgagagacttgcaccttaactctgggacctgctggcccagagtggagctagggctaggtgtcaagagagggtgtgggattgggacccaggcccttctttctaaactcaacccatttccctccctaccccttatcttcaggactcttcagagctaatcctctaagttctctgtactcagttggttctcagttagctggtcaagtggagtgtaatggtggcgtagagaatcacaaatggaaaataattccataattatttttttgaccttgcctatgattgattaggatagctccctctaggggtagcagccggtgtgactccctttctggtgacagacagggccccagcagccctgtctgttaccatgtgagtcatactggccaaagcttagtcctagcatatgcacctgagccaacctggccaatcagattgttttgtcaataatttgaaatttgaactggagagatccagaaccttgggagtcattaaagccaagtcattcatagcagccaggaaacaataggaaccaaaagcctctgcctgctgctattgcaattcccaggatctctccttccctggatccctccctcccaggtctgggctgtgcagttcctccccctgccttaaaacaccccactatctct

SEQ ID NO: 13431 - DNA, 4957 bp, Homo sapiens
gtgctgccatggacctgggacccatgcgcaagagttaccgcggggaccgagaggtgccgccgctagggccaggcctcctgcaggggcgggggaaaaggggtccccggagtcatctacagcggggaggggagtagtaggagcccctcggggcttctggggccacccggtggggcaaggaggtttgaggatcaccccccgtgggaaaagggggcttcaaagacatcccaccaggggaggagttccggggaaacgcaaatgaagatgggttcaaaaggcagcctttcgtaatgggtaagagctcgaactttggagcctgcctgggttggaatgtttaatgtatctgggcctcagtttcctcatctgggaagtgatagtatctgcctcacggggatgttatggtctaagatgtttgtaaagtgcttagaaccctgctactcgacaggtagcaaggtcaaataacttgctcagtcccacagctagtgatgaatgaatcggggtttcatgtgatggatgtcaggactgtgctgggcctccctcaagggcgggggaagaggggtcctcggagtcatctactggggggaggggagtaggaggaaacagcccctcagggcttctggggccaccccctggggcaaggagatttgggggtcacccaaacctccttgtgccaggtgggcatggtcatgggcccctctttaggtgggtacagtgacaaacagcttacaaactgtttgacaaaaaagtaagtggaatatgggggaaggggactagctcggggaggaggggaggagaaagctcttagcttactgccttcagtactttctgctgaccactgggaagttcttttccttttcgctcctcaggaggggaaccaagagaaccttttaggaattggggtccagggccctggttgccaaatctggttgcatgtgggcatttctagaaacgcttgtttaaaatgcagtttttccagcctgggcaacatagtgagaccctgtctctacaaaaaattaaaattagtcgagcatgttggagcgtgcctgtaattccagctacttgggaggatgaggttggaggattgcttgagctcaggaagttgagactgcagtaagccgagatcacaccaccgcactccagcctaggtgacagagtgagaccctgtctaaaataaataaataaataaataaaaatgcagtttttgatgaagcctcagacctgctgaatgagaaattttgggggtggagcccagaaagttttttttatgctccccaggtgattctgatgcacagacagttttgacacccatgacatgtaaccctgatttatccatcactagctgtgggacagcaagttgtctgagtttttatgcctgtttcctcacctgtaaaatggggcacagaatcttcttactgcatactatttcttattttaaggtcattgtcatgaggactaaatgagttgatttttgaaaagtgactagaacagtgccaggtccatagtaagcactatatatgtttattaaatgaaataaatctcctttcctaggcatttgaggagactcatctgacctcccttgacccagtgaaacagtttgctgcctggtttgaggaggctgttcagtgtcctgacataggggaagccaatgccatgtgtctggctacctgcaccaggtgggcatggctgtgggcccctctttgggtggatacatatgaactaggaagcttatgaagctctctactctggatgccaattttatggttccagctctgttattaacatgctctgtggctttaggcaagatacttgtcctctctgggcctgtgtccttacctataaaccaaagaccaggccacaaaattacatttcagtgataaaaatgcagtgccttgttcatttctgcccttgatacatccacacacaaccccttgcctccctcatctccccatctacccaagccccgtctgccattcaggagctacttctcctggtgaagctctgtctctctctcgaaatctagcacagtgcttgactatatcattcctttgacaatcatatgccctttgagacatcacttgtattagcctgttattcaattctcctcgataaagtgtaaggccttgtagccagtgctcttgtactgtgcgagtggatatctcccagagctctgagcagaggggctgatctcatagcaccactgtgatcccgaagcattggatgattgcattattgttagtccctgcccttagggtcttatgaatttgctagggctgtcttaacaaaatactgtagactggatagcttaaacaacaggagtttatttccttatagttctggtggctggaagtccaagatcaaggtgccatcaggggtggtttctgatgaggcctctgcttggggtttgcagacagctactttttaccatgtcctcacactgcctttcgtgtgtgtgtgtgtgtgtgtgtgtgtgtgtgtgtgttgtggagggcaagggaggtggttctgaagtgtctcttctcttacagtgacaccagtcctactggattagggccccacccctatgaccttacttaaccttaattacctccataaggtccccttctccaaatacagtcacattggggtttaaggctttaacataggggtttggggtgacacaattcagcccataacagggccccaggctgtggtgtcatacctctaggacaaatccccaggagcacatgggacggggtagcctgacagcccaataaagggggtgcagctggagggggtgctgagacatcctttggggagagggactatagccagaacattgaagcagactctgaccacagtgctctgctctttgctcctagagatggaaaaccctctgctcgcatgttgctgctgaagggcttcgggaaagatggcttccgcttcttcactaacttcgagagtcgaaaaggaaaagagctggtgggtgaaaagagctagtaatctttcccagggcctgcagggtttggctcttgcttcctcagtcaccttcttatgccaccccacccccccagtctacttgctctctgtgtgcaggtgccctcctgccatgaggccttggcacttgctgtgctctttgccataaatgaatgaatgcactttctaaccagcctcaccccatcagccatgacctgttccttcagatctcagcccacatgttacctcctcaggaaggccttccttgactctcactcagactcagcccctcatgctgtttgctgccattataacttgcaactttcttttttgtcttcttcttcagtttgtaactgagcatttgtttgggtgattatgtaactgatatttgtctcctctgctcaacagtaagctctgtaggagtggaggctgctctgttttatctctgctgtatcccccgcacgtctcctgttgtcagacccagagtgggcacttcgcgtgcattcaatgaatgaatccaaaatgagtaaacctccctgagtccatgccagccaagcatgcatttctcaagactcacaaatctgtgggtgagagaaatcacccagtctcactttggagtccgactggcttaaacttagctccaccacttcctgcaggaacttgggcacgtgacttagcctgtctctgtgtctgtgacaataggcctacttttgagggtttaaatgagctcttacggtgggtgcatctgctgtgggcctgcgcactacagctctcctgccttttccctgcatgccggaggcctcctctccctgtcctgatggctggctgtggattctcttttacttctaggactctaatccctttgcttcccttgtcttctactgggagccacttaaccgtcaggtgagtgaattttcccaggacagcctgggatgggctgggttggcagggcctgagtttatggctacgtctagcgaaggtccccagactgggcaaacatcccagctgggcactctgcctctaaaatagccctcagttagttggagccaagagtggtggggcagccgatcgaacagagaggaacggggcctgtgctggtagggagggcaggtggcatttaatgccattcacccagagccatccctgagcaggtgcgtgtggaaggccctgtgaagaaactgcctgaggaggaggctgagtgctacttccactcccgccccaagagcagccagattggggctgtggtcagccaccagagttctgtgatccctgatcgggaggtgagtggagctccgctgtagtcctccaggtggtggaggctttggcttatccccagaagctgtccccaggagatgccaggagatgtccccaggagatgtcctctctctccagcccagtgaaaacagtgaaaaggacagtgagaagggaaagtgggggtagggagaggggaaataggcctcctctgtccatctggccatcctgttgactgctcctggaggacagaggccagtctgctctgctcacccatgtccccagcacatatccccaggaagtccttgttaatgaatcattgactgggcctggcccttcttctaactcttccccctggacagtatctgagaaagaaaaatgaggaactggaacagctctaccaggatcaagaggtgcccaagccaaaatcctggtgagtgacatctggtagtcctctagaaagggacaccaggcccctgtgtttacttgaagccacctgcctggggaatcacagatctcctcctccctggccacccttgtcagatgcatcccagcaacttccttcaagaggccctgggatgaggggtgagggtgggagagtgacctggctagaaaactccacagagcactgaaacctctgcttctccttataggggtggctatgtcctgtaccctcaggtgatggagttctggcaaggtcaaaccaaccgcctgcatgaccggatagtctttcggcggggcctacccacaggagatt

SEQ ID NO: 13432 - DNA, 453 bp, Homo sapiens
gtgctgccatggacctgggacccatgcgcaagagttaccgcggggaccgagaggcatttgaggagactcatctgacctcccttgacccagtgaaacagtttgctgcctggtttgaggaggctgttcagtgtcctgacataggggaagccaatgccatgtgtctggctacctgcaccagagatggaaaaccctctgctcgcatgttgctgctgaagggcttcgggaaagatggcttccgcttcttcactaacttcgagagtcgaaaaggaaaagagctgtatctgagaaagaaaaatgaggaactggaacagctctaccaggatcaagaggtgcccaagccaaaatcctggggtggctatgtcctgtaccctcaggtgatggagttctggcaaggtcaaaccaaccgcctgcatgaccggatagtctttcggcggggcctacccacaggagatt

SEQ ID NO: 13433 - DNA, 5631 bp, Homo sapiens
cccatgcgcaagagttaccgcggggaccgagaggtgccgccgctagggccaggcctcctgcaggggcgggggaaaaggggtccccggagtcatctacagcggggaggggagtagtaggagcccctcggggcttctggggccacccggtggggcaaggaggtttgaggatcaccccccgtgggaaaagggggcttcaaagacatcccaccaggggaggagttccggggaaacgcaaatgaagatgggttcaaaaggcagcctttcgtaatgggtaagagctcgaactttggagcctgcctgggttggaatgtttaatgtatctgggcctcagtttcctcatctgggaagtgatagtatctgcctcacggggatgttatggtctaagatgtttgtaaagtgcttagaaccctgctactcgacaggtagcaaggtcaaataacttgctcagtcccacagctagtgatgaatgaatcggggtttcatgtgatggatgtcaggactgtgctgggcctccctcaagggcgggggaagaggggtcctcggagtcatctactggggggaggggagtaggaggaaacagcccctcagggcttctggggccaccccctggggcaaggagatttgggggtcacccaaacctccttgtgccaggtgggcatggtcatgggcccctctttaggtgggtacagtgacaaacagcttacaaactgtttgacaaaaaagtaagtggaatatgggggaaggggactagctcggggaggaggggaggagaaagctcttagcttactgccttcagtactttctgctgaccactgggaagttcttttccttttcgctcctcaggaggggaaccaagagaaccttttaggaattggggtccagggccctggttgccaaatctggttgcatgtgggcatttctagaaacgcttgtttaaaatgcagtttttccagcctgggcaacatagtgagaccctgtctctacaaaaaattaaaattagtcgagcatgttggagcgtgcctgtaattccagctacttgggaggatgaggttggaggattgcttgagctcaggaagttgagactgcagtaagccgagatcacaccaccgcactccagcctaggtgacagagtgagaccctgtctaaaataaataaataaataaataaaaatgcagtttttgatgaagcctcagacctgctgaatgagaaattttgggggtggagcccagaaagttttttttatgctccccaggtgattctgatgcacagacagttttgacacccatgacatgtaaccctgatttatccatcactagctgtgggacagcaagttgtctgagtttttatgcctgtttcctcacctgtaaaatggggcacagaatcttcttactgcatactatttcttattttaaggtcattgtcatgaggactaaatgagttgatttttgaaaagtgactagaacagtgccaggtccatagtaagcactatatatgtttattaaatgaaataaatctcctttcctaggcatttgaggagactcatctgacctcccttgacccagtgaaacagtttgctgcctggtttgaggaggctgttcagtgtcctgacataggggaagccaatgccatgtgtctggctacctgcaccaggtgggcatggctgtgggcccctctttgggtggatacatatgaactaggaagcttatgaagctctctactctggatgccaattttatggttccagctctgttattaacatgctctgtggctttaggcaagatacttgtcctctctgggcctgtgtccttacctataaaccaaagaccaggccacaaaattacatttcagtgataaaaatgcagtgccttgttcatttctgcccttgatacatccacacacaaccccttgcctccctcatctccccatctacccaagccccgtctgccattcaggagctacttctcctggtgaagctctgtctctctctcgaaatctagcacagtgcttgactatatcattcctttgacaatcatatgccctttgagacatcacttgtattagcctgttattcaattctcctcgataaagtgtaaggccttgtagccagtgctcttgtactgtgcgagtggatatctcccagagctctgagcagaggggctgatctcatagcaccactgtgatcccgaagcattggatgattgcattattgttagtccctgcccttagggtcttatgaatttgctagggctgtcttaacaaaatactgtagactggatagcttaaacaacaggagtttatttccttatagttctggtggctggaagtccaagatcaaggtgccatcaggggtggtttctgatgaggcctctgcttggggtttgcagacagctactttttaccatgtcctcacactgcctttcgtgtgtgtgtgtgtgtgtgtgtgtgtgtgtgtgtgttgtggagggcaagggaggtggttctgaagtgtctcttctcttacagtgacaccagtcctactggattagggccccacccctatgaccttacttaaccttaattacctccataaggtccccttctccaaatacagtcacattggggtttaaggctttaacataggggtttggggtgacacaattcagcccataacagggccccaggctgtggtgtcatacctctaggacaaatccccaggagcacatgggacggggtagcctgacagcccaataaagggggtgcagctggagggggtgctgagacatcctttggggagagggactatagccagaacattgaagcagactctgaccacagtgctctgctctttgctcctagagatggaaaaccctctgctcgcatgttgctgctgaagggcttcgggaaagatggcttccgcttcttcactaacttcgagagtcgaaaaggaaaagagctggtgggtgaaaagagctagtaatctttcccagggcctgcagggtttggctcttgcttcctcagtcaccttcttatgccaccccacccccccagtctacttgctctctgtgtgcaggtgccctcctgccatgaggccttggcacttgctgtgctctttgccataaatgaatgaatgcactttctaaccagcctcaccccatcagccatgacctgttccttcagatctcagcccacatgttacctcctcaggaaggccttccttgactctcactcagactcagcccctcatgctgtttgctgccattataacttgcaactttcttttttgtcttcttcttcagtttgtaactgagcatttgtttgggtgattatgtaactgatatttgtctcctctgctcaacagtaagctctgtaggagtggaggctgctctgttttatctctgctgtatcccccgcacgtctcctgttgtcagacccagagtgggcacttcgcgtgcattcaatgaatgaatccaaaatgagtaaacctccctgagtccatgccagccaagcatgcatttctcaagactcacaaatctgtgggtgagagaaatcacccagtctcactttggagtccgactggcttaaacttagctccaccacttcctgcaggaacttgggcacgtgacttagcctgtctctgtgtctgtgacaataggcctacttttgagggtttaaatgagctcttacggtgggtgcatctgctgtgggcctgcgcactacagctctcctgccttttccctgcatgccggaggcctcctctccctgtcctgatggctggctgtggattctcttttacttctaggactctaatccctttgcttcccttgtcttctactgggagccacttaaccgtcaggtgagtgaattttcccaggacagcctgggatgggctgggttggcagggcctgagtttatggctacgtctagcgaaggtccccagactgggcaaacatcccagctgggcactctgcctctaaaatagccctcagttagttggagccaagagtggtggggcagccgatcgaacagagaggaacggggcctgtgctggtagggagggcaggtggcatttaatgccattcacccagagccatccctgagcaggtgcgtgtggaaggccctgtgaagaaactgcctgaggaggaggctgagtgctacttccactcccgccccaagagcagccagattggggctgtggtcagccaccagagttctgtgatccctgatcgggaggtgagtggagctccgctgtagtcctccaggtggtggaggctttggcttatccccagaagctgtccccaggagatgccaggagatgtccccaggagatgtcctctctctccagcccagtgaaaacagtgaaaaggacagtgagaagggaaagtgggggtagggagaggggaaataggcctcctctgtccatctggccatcctgttgactgctcctggaggacagaggccagtctgctctgctcacccatgtccccagcacatatccccaggaagtccttgttaatgaatcattgactgggcctggcccttcttctaactcttccccctggacagtatctgagaaagaaaaatgaggaactggaacagctctaccaggatcaagaggtgcccaagccaaaatcctggtgagtgacatctggtagtcctctagaaagggacaccaggcccctgtgtttacttgaagccacctgcctggggaatcacagatctcctcctccctggccacccttgtcagatgcatcccagcaacttccttcaagaggccctgggatgaggggtgagggtgggagagtgacctggctagaaaactccacagagcactgaaacctctgcttctccttataggggtggctatgtcctgtaccctcaggtgatggagttctggcaaggtcaaaccaaccgcctgcatgaccggatagtctttcggcggggcctacccacaggagattcccctttggggcccatgacccaccgcggggaggaagactggctctatgagagacttgcaccttaactctgggacctgctggcccagagtggagctagggctaggtgtcaagagagggtgtgggattgggacccaggcccttctttctaaactcaacccatttccctccctaccccttatcttcaggactcttcagagctaatcctctaagttctctgtactcagttggttctcagttagctggtcaagtggagtgtaatggtggcgtagagaatcacaaatggaaaataattccataattatttttttgaccttgcctatgattgattaggatagctccctctaggggtagcagccggtgtgactccctttctggtgacagacagggccccagcagccctgtctgttaccatgtgagtcatactggccaaagcttagtcctagcatatgcacctgagccaacctggccaatcagattgttttgtcaataatttgaaatttgaactggagagatccagaaccttgggagtcattaaagccaagtcattcatagcagccaggaaacaataggaaccaaaagcctctgcctgctgctattgcaattcccaggatctctccttccctggatccctccctcccaggtctgggctgtgcagttcctccccctgccttaaaacaccccactatctctgtaa

SEQ ID NO: 13434 - DNA, 1131 bp, Homo sapiens
cccatgcgcaagagttaccgcggggaccgagagagatggaaaaccctctgctcgcatgttgctgctgaagggcttcgggaaagatggcttccgcttcttcactaacttcgagagtcgaaaaggaaaagagctggtgcgtgtggaaggccctgtgaagaaactgcctgaggaggaggctgagtgctacttccactcccgccccaagagcagccagattggggctgtggtcagccaccagagttctgtgatccctgatcgggagtatctgagaaagaaaaatgaggaactggaacagctctaccaggatcaagaggtgcccaagccaaaatcctggggtggctatgtcctgtaccctcaggtgatggagttctggcaaggtcaaaccaaccgcctgcatgaccggatagtctttcggcggggcctacccacaggagattcccctttggggcccatgacccaccgcggggaggaagactggctctatgagagacttgcaccttaactctgggacctgctggcccagagtggagctagggctaggtgtcaagagagggtgtgggattgggacccaggcccttctttctaaactcaacccatttccctccctaccccttatcttcaggactcttcagagctaatcctctaagttctctgtactcagttggttctcagttagctggtcaagtggagtgtaatggtggcgtagagaatcacaaatggaaaataattccataattatttttttgaccttgcctatgattgattaggatagctccctctaggggtagcagccggtgtgactccctttctggtgacagacagggccccagcagccctgtctgttaccatgtgagtcatactggccaaagcttagtcctagcatatgcacctgagccaacctggccaatcagattgttttgtcaataatttgaaatttgaactggagagatccagaaccttgggagtcattaaagccaagtcattcatagcagccaggaaacaataggaaccaaaagcctctgcctgctgctattgcaattcccaggatctctccttccctggatccctccctcccaggtctgggctgtgcagttcctccccctgccttaaaacaccccactatctctgtaa

SEQ ID NO: 13435 - DNA, 7590 bp, Homo sapiens
attggctccgaggacttaggacctgttagcttggttgggcgactggcaaatccttccttccccggggtagaagtccagggtgagaaattggttccgaactcaaaggaacccagtgccgggccacagccgggtcacgtggccggcggccccccatgacgtgctggctgcggggcgtcacggcgacgttcgggcgacctgccgagtggccaggctacctcagtcacctgtgtggtcgcagtgctgccatggacctgggacccatgcgcaagagttaccgcggggaccgagaggtgccgccgctagggccaggcctcctgcaggggcgggggaaaaggggtccccggagtcatctacagcggggaggggagtagtaggagcccctcggggcttctggggccacccggtggggcaaggaggtttgaggatcaccccccgtgggaaaagggggcttcaaagacatcccaccaggggaggagttccggggaaacgcaaatgaagatgggttcaaaaggcagcctttcgtaatgggtaagagctcgaactttggagcctgcctgggttggaatgtttaatgtatctgggcctcagtttcctcatctgggaagtgatagtatctgcctcacggggatgttatggtctaagatgtttgtaaagtgcttagaaccctgctactcgacaggtagcaaggtcaaataacttgctcagtcccacagctagtgatgaatgaatcggggtttcatgtgatggatgtcaggactgtgctgggcctccctcaagggcgggggaagaggggtcctcggagtcatctactggggggaggggagtaggaggaaacagcccctcagggcttctggggccaccccctggggcaaggagatttgggggtcacccaaacctccttgtgccaggtgggcatggtcatgggcccctctttaggtgggtacagtgacaaacagcttacaaactgtttgacaaaaaagtaagtggaatatgggggaaggggactagctcggggaggaggggaggagaaagctcttagcttactgccttcagtactttctgctgaccactgggaagttcttttccttttcgctcctcaggaggggaaccaagagaaccttttaggaattggggtccagggccctggttgccaaatctggttgcatgtgggcatttctagaaacgcttgtttaaaatgcagtttttccagcctgggcaacatagtgagaccctgtctctacaaaaaattaaaattagtcgagcatgttggagcgtgcctgtaattccagctacttgggaggatgaggttggaggattgcttgagctcaggaagttgagactgcagtaagccgagatcacaccaccgcactccagcctaggtgacagagtgagaccctgtctaaaataaataaataaataaataaaaatgcagtttttgatgaagcctcagacctgctgaatgagaaattttgggggtggagcccagaaagttttttttatgctccccaggtgattctgatgcacagacagttttgacacccatgacatgtaaccctgatttatccatcactagctgtgggacagcaagttgtctgagtttttatgcctgtttcctcacctgtaaaatggggcacagaatcttcttactgcatactatttcttattttaaggtcattgtcatgaggactaaatgagttgatttttgaaaagtgactagaacagtgccaggtccatagtaagcactatatatgtttattaaatgaaataaatctcctttcctaggcatttgaggagactcatctgacctcccttgacccagtgaaacagtttgctgcctggtttgaggaggctgttcagtgtcctgacataggggaagccaatgccatgtgtctggctacctgcaccaggtgggcatggctgtgggcccctctttgggtggatacatatgaactaggaagcttatgaagctctctactctggatgccaattttatggttccagctctgttattaacatgctctgtggctttaggcaagatacttgtcctctctgggcctgtgtccttacctataaaccaaagaccaggccacaaaattacatttcagtgataaaaatgcagtgccttgttcatttctgcccttgatacatccacacacaaccccttgcctccctcatctccccatctacccaagccccgtctgccattcaggagctacttctcctggtgaagctctgtctctctctcgaaatctagcacagtgcttgactatatcattcctttgacaatcatatgccctttgagacatcacttgtattagcctgttattcaattctcctcgataaagtgtaaggccttgtagccagtgctcttgtactgtgcgagtggatatctcccagagctctgagcagaggggctgatctcatagcaccactgtgatcccgaagcattggatgattgcattattgttagtccctgcccttagggtcttatgaatttgctagggctgtcttaacaaaatactgtagactggatagcttaaacaacaggagtttatttccttatagttctggtggctggaagtccaagatcaaggtgccatcaggggtggtttctgatgaggcctctgcttggggtttgcagacagctactttttaccatgtcctcacactgcctttcgtgtgtgtgtgtgtgtgtgtgtgtgtgtgtgtgtgttgtggagggcaagggaggtggttctgaagtgtctcttctcttacagtgacaccagtcctactggattagggccccacccctatgaccttacttaaccttaattacctccataaggtccccttctccaaatacagtcacattggggtttaaggctttaacataggggtttggggtgacacaattcagcccataacagggccccaggctgtggtgtcatacctctaggacaaatccccaggagcacatgggacggggtagcctgacagcccaataaagggggtgcagctggagggggtgctgagacatcctttggggagagggactatagccagaacattgaagcagactctgaccacagtgctctgctctttgctcctagagatggaaaaccctctgctcgcatgttgctgctgaagggcttcgggaaagatggcttccgcttcttcactaacttcgagagtcgaaaaggaaaagagctggtgggtgaaaagagctagtaatctttcccagggcctgcagggtttggctcttgcttcctcagtcaccttcttatgccaccccacccccccagtctacttgctctctgtgtgcaggtgccctcctgccatgaggccttggcacttgctgtgctctttgccataaatgaatgaatgcactttctaaccagcctcaccccatcagccatgacctgttccttcagatctcagcccacatgttacctcctcaggaaggccttccttgactctcactcagactcagcccctcatgctgtttgctgccattataacttgcaactttcttttttgtcttcttcttcagtttgtaactgagcatttgtttgggtgattatgtaactgatatttgtctcctctgctcaacagtaagctctgtaggagtggaggctgctctgttttatctctgctgtatcccccgcacgtctcctgttgtcagacccagagtgggcacttcgcgtgcattcaatgaatgaatccaaaatgagtaaacctccctgagtccatgccagccaagcatgcatttctcaagactcacaaatctgtgggtgagagaaatcacccagtctcactttggagtccgactggcttaaacttagctccaccacttcctgcaggaacttgggcacgtgacttagcctgtctctgtgtctgtgacaataggcctacttttgagggtttaaatgagctcttacggtgggtgcatctgctgtgggcctgcgcactacagctctcctgccttttccctgcatgccggaggcctcctctccctgtcctgatggctggctgtggattctcttttacttctaggactctaatccctttgcttcccttgtcttctactgggagccacttaaccgtcaggtgagtgaattttcccaggacagcctgggatgggctgggttggcagggcctgagtttatggctacgtctagcgaaggtccccagactgggcaaacatcccagctgggcactctgcctctaaaatagccctcagttagttggagccaagagtggtggggcagccgatcgaacagagaggaacggggcctgtgctggtagggagggcaggtggcatttaatgccattcacccagagccatccctgagcaggtgcgtgtggaaggccctgtgaagaaactgcctgaggaggaggctgagtgctacttccactcccgccccaagagcagccagattggggctgtggtcagccaccagagttctgtgatccctgatcgggaggtgagtggagctccgctgtagtcctccaggtggtggaggctttggcttatccccagaagctgtccccaggagatgccaggagatgtccccaggagatgtcctctctctccagcccagtgaaaacagtgaaaaggacagtgagaagggaaagtgggggtagggagaggggaaataggcctcctctgtccatctggccatcctgttgactgctcctggaggacagaggccagtctgctctgctcacccatgtccccagcacatatccccaggaagtccttgttaatgaatcattgactgggcctggcccttcttctaactcttccccctggacagtatctgagaaagaaaaatgaggaactggaacagctctaccaggatcaagaggtgcccaagccaaaatcctggtgagtgacatctggtagtcctctagaaagggacaccaggcccctgtgtttacttgaagccacctgcctggggaatcacagatctcctcctccctggccacccttgtcagatgcatcccagcaacttccttcaagaggccctgggatgaggggtgagggtgggagagtgacctggctagaaaactccacagagcactgaaacctctgcttctccttataggggtggctatgtcctgtaccctcaggtgatggagttctggcaaggtcaaaccaaccgcctgcatgaccggatagtctttcggcggggcctacccacaggagattcccctttggggcccatgacccaccgcggggaggaagactggctctatgagagacttgcaccttaactctgggacctgctggcccagagtggagctagggctaggtgtcaagagagggtgtgggattgggacccaggcccttctttctaaactcaacccatttccctccctaccccttatcttcaggactcttcagagctaatcctctaagttctctgtactcagttggttctcagttagctggtcaagtggagtgtaatggtggcgtagagaatcacaaatggaaaataattccataattatttttttgaccttgcctatgattgattaggatagctccctctaggggtagcagccggtgtgactccctttctggtgacagacagggccccagcagccctgtctgttaccatgtgagtcatactggccaaagcttagtcctagcatatgcacctgagccaacctggccaatcagattgttttgtcaataatttgaaatttgaactggagagatccagaaccttgggagtcattaaagccaagtcattcatagcagccaggaaacaataggaaccaaaagcctctgcctgctgctattgcaattcccaggatctctccttccctggatccctccctcccaggtctgggctgtgcagttcctccccctgccttaaaacaccccactatctctgtaaagtctctctctctcttttttttttttttacttaatctagctagaatctatttctgttgattacaacttaactaactcatttacggataggacttttttttttctttttttcttttttcttttcttttttttttttgagatggagtctcactctgtcacccaggctggagtgcagtggtgtgatcttggctcactgcaacctctgcctcccaggttcaagcaattctcctgcctcagcctcccaagtagctgggactacaggcacacgccaccacacccaactaatttttgtatttttagtagagatggggtttcaccatgttggccaggattgtctccatctcttgaccttgtgatccacccacctcagcctcccaaagtgctgggattacaggcatgagccaccacacccagcgagacggggtttcattatgttggccaggctggtctccaactcctgacctaaagtgatctgcccgccttggcctcccaaagtgctgggattacagacatgagccaccacgcttggccgggatagtatatttttatagcacttcccctactgattgctgccttctctgtggctacaagggacccacagaattacagggaagttacagggaagcaggtttcatctcaatattgggagagatttcaaacaatcacacctgcctgagaaggagtgggctgtcactaggaatttttattcccagtccgtcaggaattttgtagaagggcttcatgtgctggtaccaataggacaggaagattttaatcagctttactatctatgtttttttatggaaactgtgtgtatgtatacatacattttccaaaaagaaaaattaaatgattatagagattatgtttttcagactactcacgtatctgcttttcttactccccacctctgctgataattcctagttcattggtttttcccccacactggaattacctggggagcttaaaaaaccctgatgcctgggtcccaccctcagagatgattgaaccagcctggccagcatggcaaaaccctgtctctactatgatatgaatgcagcctgggcactgggaaatttaaaaactccccagataattctgtgcagccaaggttgagacctcctagtctagagctttgctatacacagggtggtccacaagccaggagcatcagcatcacttggcagcgccttagagattcagaccccagacccactgaatctgaccctgcattttcactagaccccaggtgatcagctgcactagactcaacctctaaaccaagacctcccaccctcacagtctatgatcctttagtgaccctcagctgagtcctgtgctgaactgtgtttgttctccttgagcacatgcccgctaaccagggacagactggatgagcaagcaacctgctggctatggagaagagccaggctgggtaaatgtttgctgtgactaagccaggatcaaagaactgcctgttgcttgcactggctggcactgagcttgccactctgtgaactgtgcttccttcccctgcatggacctgtgcctcagtcactattatccgcaggccttctccaagggcagccctctccttgtttatccctcttaagcctgcgtgcaggaaggcacattaaccctgtggccccctgcaggcaggagggtgttgggtgcccttacctaccttgccctttttcttg

SEQ ID NO: 13436 - DNA, 3232 bp, Homo sapiens
attggctccgaggacttaggacctgttagcttggttgggcgactggcaaatccttccttccccggggtagaagtccagggtgagaaattggttccgaactcaaaggaacccagtgccgggccacagccgggtcacgtggccggcggccccccatgacgtgctggctgcggggcgtcacggcgacgttcgggcgacctgccgagtggccaggctacctcagtcacctgtgtggtcgcagtgctgccatggacctgggacccatgcgcaagagttaccgcggggaccgagagtgaaacagtttgctgcctggtttgaggaggctgttcagtgtcctgacataggggaagccaatgccatgtgtctggctacctgcaccagagatggaaaaccctctgctcgcatgttgctgctgaagggcttcgggaaagatggcttccgcttcttcactaacttcgagagtcgaaaaggaaaagagctggactctaatccctttgcttcccttgtcttctactgggagccacttaaccgtcaggtgcgtgtggaaggccctgtgaagaaactgcctgaggaggaggctgagtgctacttccactcccgccccaagagcagccagattggggctgtggtcagccaccagagttctgtgatccctgatcgggagtatctgagaaagaaaaatgaggaactggaacagctctaccaggatcaagaggtgcccaagccaaaatcctggggtggctatgtcctgtaccctcaggtgatggagttctggcaaggtcaaaccaaccgcctgcatgaccggatagtctttcggcggggcctacccacaggagattcccctttggggcccatgacccaccgcggggaggaagactggctctatgagagacttgcaccttaactctgggacctgctggcccagagtggagctagggctaggtgtcaagagagggtgtgggattgggacccaggcccttctttctaaactcaacccatttccctccctaccccttatcttcaggactcttcagagctaatcctctaagttctctgtactcagttggttctcagttagctggtcaagtggagtgtaatggtggcgtagagaatcacaaatggaaaataattccataattatttttttgaccttgcctatgattgattaggatagctccctctaggggtagcagccggtgtgactccctttctggtgacagacagggccccagcagccctgtctgttaccatgtgagtcatactggccaaagcttagtcctagcatatgcacctgagccaacctggccaatcagattgttttgtcaataatttgaaatttgaactggagagatccagaaccttgggagtcattaaagccaagtcattcatagcagccaggaaacaataggaaccaaaagcctctgcctgctgctattgcaattcccaggatctctccttccctggatccctccctcccaggtctgggctgtgcagttcctccccctgccttaaaacaccccactatctctgtaaagtctctctctctcttttttttttttttacttaatctagctagaatctatttctgttgattacaacttaactaactcatttacggataggacttttttttttctttttttcttttttcttttcttttttttttttgagatggagtctcactctgtcacccaggctggagtgcagtggtgtgatcttggctcactgcaacctctgcctcccaggttcaagcaattctcctgcctcagcctcccaagtagctgggactacaggcacacgccaccacacccaactaatttttgtatttttagtagagatggggtttcaccatgttggccaggattgtctccatctcttgaccttgtgatccacccacctcagcctcccaaagtgctgggattacaggcatgagccaccacacccagcgagacggggtttcattatgttggccaggctggtctccaactcctgacctaaagtgatctgcccgccttggcctcccaaagtgctgggattacagacatgagccaccacgcttggccgggatagtatatttttatagcacttcccctactgattgctgccttctctgtggctacaagggacccacagaattacagggaagttacagggaagcaggtttcatctcaatattgggagagatttcaaacaatcacacctgcctgagaaggagtgggctgtcactaggaatttttattcccagtccgtcaggaattttgtagaagggcttcatgtgctggtaccaataggacaggaagattttaatcagctttactatctatgtttttttatggaaactgtgtgtatgtatacatacattttccaaaaagaaaaattaaatgattatagagattatgtttttcagactactcacgtatctgcttttcttactccccacctctgctgataattcctagttcattggtttttcccccacactggaattacctggggagcttaaaaaaccctgatgcctgggtcccaccctcagagatgattgaaccagcctggccagcatggcaaaaccctgtctctactatgatatgaatgcagcctgggcactgggaaatttaaaaactccccagataattctgtgcagccaaggttgagacctcctagtctagagctttgctatacacagggtggtccacaagccaggagcatcagcatcacttggcagcgccttagagattcagaccccagacccactgaatctgaccctgcattttcactagaccccaggtgatcagctgcactagactcaacctctaaaccaagacctcccaccctcacagtctatgatcctttagtgaccctcagctgagtcctgtgctgaactgtgtttgttctccttgagcacatgcccgctaaccagggacagactggatgagcaagcaacctgctggctatggagaagagccaggctgggtaaatgtttgctgtgactaagccaggatcaaagaactgcctgttgcttgcactggctggcactgagcttgccactctgtgaactgtgcttccttcccctgcatggacctgtgcctcagtcactattatccgcaggccttctccaagggcagccctctccttgtttatccctcttaagcctgcgtgcaggaaggcacattaaccctgtggccccctgcaggcaggagggtgttgggtgcccttacctaccttgccctttttcttg

SEQ ID NO: 13437 - DNA, 6222 bp, Homo sapiens
ggggtagaagtccagggtgagaaattggttccgaactcaaaggaacccagtgccgggccacagccgggtcacgtggccggcggccccccatgacgtgctggctgcggggcgtcacggcgacgttcgggcgacctgccgagtggccaggctacctcagtcacctgtgtggtcgcagtgctgccatggacctgggacccatgcgcaagagttaccgcggggaccgagaggtgccgccgctagggccaggcctcctgcaggggcgggggaaaaggggtccccggagtcatctacagcggggaggggagtagtaggagcccctcggggcttctggggccacccggtggggcaaggaggtttgaggatcaccccccgtgggaaaagggggcttcaaagacatcccaccaggggaggagttccggggaaacgcaaatgaagatgggttcaaaaggcagcctttcgtaatgggtaagagctcgaactttggagcctgcctgggttggaatgtttaatgtatctgggcctcagtttcctcatctgggaagtgatagtatctgcctcacggggatgttatggtctaagatgtttgtaaagtgcttagaaccctgctactcgacaggtagcaaggtcaaataacttgctcagtcccacagctagtgatgaatgaatcggggtttcatgtgatggatgtcaggactgtgctgggcctccctcaagggcgggggaagaggggtcctcggagtcatctactggggggaggggagtaggaggaaacagcccctcagggcttctggggccaccccctggggcaaggagatttgggggtcacccaaacctccttgtgccaggtgggcatggtcatgggcccctctttaggtgggtacagtgacaaacagcttacaaactgtttgacaaaaaagtaagtggaatatgggggaaggggactagctcggggaggaggggaggagaaagctcttagcttactgccttcagtactttctgctgaccactgggaagttcttttccttttcgctcctcaggaggggaaccaagagaaccttttaggaattggggtccagggccctggttgccaaatctggttgcatgtgggcatttctagaaacgcttgtttaaaatgcagtttttccagcctgggcaacatagtgagaccctgtctctacaaaaaattaaaattagtcgagcatgttggagcgtgcctgtaattccagctacttgggaggatgaggttggaggattgcttgagctcaggaagttgagactgcagtaagccgagatcacaccaccgcactccagcctaggtgacagagtgagaccctgtctaaaataaataaataaataaataaaaatgcagtttttgatgaagcctcagacctgctgaatgagaaattttgggggtggagcccagaaagttttttttatgctccccaggtgattctgatgcacagacagttttgacacccatgacatgtaaccctgatttatccatcactagctgtgggacagcaagttgtctgagtttttatgcctgtttcctcacctgtaaaatggggcacagaatcttcttactgcatactatttcttattttaaggtcattgtcatgaggactaaatgagttgatttttgaaaagtgactagaacagtgccaggtccatagtaagcactatatatgtttattaaatgaaataaatctcctttcctaggcatttgaggagactcatctgacctcccttgacccagtgaaacagtttgctgcctggtttgaggaggctgttcagtgtcctgacataggggaagccaatgccatgtgtctggctacctgcaccaggtgggcatggctgtgggcccctctttgggtggatacatatgaactaggaagcttatgaagctctctactctggatgccaattttatggttccagctctgttattaacatgctctgtggctttaggcaagatacttgtcctctctgggcctgtgtccttacctataaaccaaagaccaggccacaaaattacatttcagtgataaaaatgcagtgccttgttcatttctgcccttgatacatccacacacaaccccttgcctccctcatctccccatctacccaagccccgtctgccattcaggagctacttctcctggtgaagctctgtctctctctcgaaatctagcacagtgcttgactatatcattcctttgacaatcatatgccctttgagacatcacttgtattagcctgttattcaattctcctcgataaagtgtaaggccttgtagccagtgctcttgtactgtgcgagtggatatctcccagagctctgagcagaggggctgatctcatagcaccactgtgatcccgaagcattggatgattgcattattgttagtccctgcccttagggtcttatgaatttgctagggctgtcttaacaaaatactgtagactggatagcttaaacaacaggagtttatttccttatagttctggtggctggaagtccaagatcaaggtgccatcaggggtggtttctgatgaggcctctgcttggggtttgcagacagctactttttaccatgtcctcacactgcctttcgtgtgtgtgtgtgtgtgtgtgtgtgtgtgtgtgtgttgtggagggcaagggaggtggttctgaagtgtctcttctcttacagtgacaccagtcctactggattagggccccacccctatgaccttacttaaccttaattacctccataaggtccccttctccaaatacagtcacattggggtttaaggctttaacataggggtttggggtgacacaattcagcccataacagggccccaggctgtggtgtcatacctctaggacaaatccccaggagcacatgggacggggtagcctgacagcccaataaagggggtgcagctggagggggtgctgagacatcctttggggagagggactatagccagaacattgaagcagactctgaccacagtgctctgctctttgctcctagagatggaaaaccctctgctcgcatgttgctgctgaagggcttcgggaaagatggcttccgcttcttcactaacttcgagagtcgaaaaggaaaagagctggtgggtgaaaagagctagtaatctttcccagggcctgcagggtttggctcttgcttcctcagtcaccttcttatgccaccccacccccccagtctacttgctctctgtgtgcaggtgccctcctgccatgaggccttggcacttgctgtgctctttgccataaatgaatgaatgcactttctaaccagcctcaccccatcagccatgacctgttccttcagatctcagcccacatgttacctcctcaggaaggccttccttgactctcactcagactcagcccctcatgctgtttgctgccattataacttgcaactttcttttttgtcttcttcttcagtttgtaactgagcatttgtttgggtgattatgtaactgatatttgtctcctctgctcaacagtaagctctgtaggagtggaggctgctctgttttatctctgctgtatcccccgcacgtctcctgttgtcagacccagagtgggcacttcgcgtgcattcaatgaatgaatccaaaatgagtaaacctccctgagtccatgccagccaagcatgcatttctcaagactcacaaatctgtgggtgagagaaatcacccagtctcactttggagtccgactggcttaaacttagctccaccacttcctgcaggaacttgggcacgtgacttagcctgtctctgtgtctgtgacaataggcctacttttgagggtttaaatgagctcttacggtgggtgcatctgctgtgggcctgcgcactacagctctcctgccttttccctgcatgccggaggcctcctctccctgtcctgatggctggctgtggattctcttttacttctaggactctaatccctttgcttcccttgtcttctactgggagccacttaaccgtcaggtgagtgaattttcccaggacagcctgggatgggctgggttggcagggcctgagtttatggctacgtctagcgaaggtccccagactgggcaaacatcccagctgggcactctgcctctaaaatagccctcagttagttggagccaagagtggtggggcagccgatcgaacagagaggaacggggcctgtgctggtagggagggcaggtggcatttaatgccattcacccagagccatccctgagcaggtgcgtgtggaaggccctgtgaagaaactgcctgaggaggaggctgagtgctacttccactcccgccccaagagcagccagattggggctgtggtcagccaccagagttctgtgatccctgatcgggaggtgagtggagctccgctgtagtcctccaggtggtggaggctttggcttatccccagaagctgtccccaggagatgccaggagatgtccccaggagatgtcctctctctccagcccagtgaaaacagtgaaaaggacagtgagaagggaaagtgggggtagggagaggggaaataggcctcctctgtccatctggccatcctgttgactgctcctggaggacagaggccagtctgctctgctcacccatgtccccagcacatatccccaggaagtccttgttaatgaatcattgactgggcctggcccttcttctaactcttccccctggacagtatctgagaaagaaaaatgaggaactggaacagctctaccaggatcaagaggtgcccaagccaaaatcctggtgagtgacatctggtagtcctctagaaagggacaccaggcccctgtgtttacttgaagccacctgcctggggaatcacagatctcctcctccctggccacccttgtcagatgcatcccagcaacttccttcaagaggccctgggatgaggggtgagggtgggagagtgacctggctagaaaactccacagagcactgaaacctctgcttctccttataggggtggctatgtcctgtaccctcaggtgatggagttctggcaaggtcaaaccaaccgcctgcatgaccggatagtctttcggcggggcctacccacaggagattcccctttggggcccatgacccaccgcggggaggaagactggctctatgagagacttgcaccttaactctgggacctgctggcccagagtggagctagggctaggtgtcaagagagggtgtgggattgggacccaggcccttctttctaaactcaacccatttccctccctaccccttatcttcaggactcttcagagctaatcctctaagttctctgtactcagttggttctcagttagctggtcaagtggagtgtaatggtggcgtagagaatcacaaatggaaaataattccataattatttttttgaccttgcctatgattgattaggatagctccctctaggggtagcagccggtgtgactccctttctggtgacagacagggccccagcagccctgtctgttaccatgtgagtcatactggccaaagcttagtcctagcatatgcacctgagccaacctggccaatcagattgttttgtcaataatttgaaatttgaactggagagatccagaaccttgggagtcattaaagccaagtcattcatagcagccaggaaacaataggaaccaaaagcctctgcctgctgctattgcaattcccaggatctctccttccctggatccctccctcccaggtctgggctgtgcagttcctccccctgccttaaaacaccccactatctctgtaaagtctctctctctcttttttttttttttacttaatctagctagaatctatttctgttgattacaacttaactaactcatttacggataggacttttttttttctttttttcttttttcttttcttttttttttttgagatggagtctcactctgtcacccaggctggagtgcagtggtgtgatcttggctcactgcaacctctgcctcccaggttcaagcaattctcctgcctcagcctcccaagtagctgggactacaggcacacgccaccacacccaactaatttttgtatttttagtagagatggggtttcaccatgttggccaggattgtctccatctcttgaccttgtgatccacccacctcagcctcccaaagtgctgggattacaggcat

SEQ ID NO: 13438 - DNA, 2619 bp, Homo sapiens
ggggtagaagtccagggtgagaaattggttccgaactcaaaggaacccagtgccgggccacagccgggtcacgtggccggcggccccccatgacgtgctggctgcggggcgtcacggcgacgttcgggcgacctgccgagtggccaggctacctcagtcacctgtgtggtcgcagtgctgccatggacctgggacccatgcgcaagagttaccgcggggaccgagagagatggaaaaccctctgctcgcatgttgctgctgaagggcttcgggaaagatggcttccgcttcttcactaacttcgagagtcgaaaaggaaaagagctggtgggtgaaaagagctagtaatctttcccagggcctgcagggtttggctcttgcttcctcagtcaccttcttatgccaccccacccccccagtctacttgctctctgtgtgcaggtgccctcctgccatgaggccttggcacttgctgtgctctttgccataaatgaatgaatgcactttctaaccagcctcaccccatcagccatgacctgttccttcagatctcagcccacatgttacctcctcaggaaggccttccttgactctcactcagactcagcccctcatgctgtttgctgccattataacttgcaactttcttttttgtcttcttcttcagtttgtaactgagcatttgtttgggtgattatgtaactgatatttgtctcctctgctcaacagtaagctctgtaggagtggaggctgctctgttttatctctgctgtatcccccgcacgtctcctgttgtcagacccagagtgggcacttcgcgtgcattcaatgaatgaatccaaaatgagtaaacctccctgagtccatgccagccaagcatgcatttctcaagactcacaaatctgtgggtgagagaaatcacccagtctcactttggagtccgactggcttaaacttagctccaccacttcctgcaggaacttgggcacgtgacttagcctgtctctgtgtctgtgacaataggcctacttttgagggtttaaatgagctcttacggtgggtgcatctgctgtgggcctgcgcactacagctctcctgccttttccctgcatgccggaggcctcctctccctgtcctgatggctggctgtggattctcttttacttctaggactctaatccctttgcttcccttgtcttctactgggagccacttaaccgtcaggtgcgtgtggaaggccctgtgaagaaactgcctgaggaggaggctgagtgctacttccactcccgccccaagagcagccagattggggctgtggtcagccaccagagttctgtgatccctgatcgggagtatctgagaaagaaaaatgaggaactggaacagctctaccaggatcaagaggtgcccaagccaaaatcctggggtggctatgtcctgtaccctcaggtgatggagttctggcaaggtcaaaccaaccgcctgcatgaccggatagtctttcggcggggcctacccacaggagattcccctttggggcccatgacccaccgcggggaggaagactggctctatgagagacttgcaccttaactctgggacctgctggcccagagtggagctagggctaggtgtcaagagagggtgtgggattgggacccaggcccttctttctaaactcaacccatttccctccctaccccttatcttcaggactcttcagagctaatcctctaagttctctgtactcagttggttctcagttagctggtcaagtggagtgtaatggtggcgtagagaatcacaaatggaaaataattccataattatttttttgaccttgcctatgattgattaggatagctccctctaggggtagcagccggtgtgactccctttctggtgacagacagggccccagcagccctgtctgttaccatgtgagtcatactggccaaagcttagtcctagcatatgcacctgagccaacctggccaatcagattgttttgtcaataatttgaaatttgaactggagagatccagaaccttgggagtcattaaagccaagtcattcatagcagccaggaaacaataggaaccaaaagcctctgcctgctgctattgcaattcccaggatctctccttccctggatccctccctcccaggtctgggctgtgcagttcctccccctgccttaaaacaccccactatctctgtaaagtctctctctctcttttttttttttttacttaatctagctagaatctatttctgttgattacaacttaactaactcatttacggataggacttttttttttctttttttcttttttcttttcttttttttttttgagatggagtctcactctgtcacccaggctggagtgcagtggtgtgatcttggctcactgcaacctctgcctcccaggttcaagcaattctcctgcctcagcctcccaagtagctgggactacaggcacacgccaccacacccaactaatttttgtatttttagtagagatggggtttcaccatgttggccaggattgtctccatctcttgaccttgtgatccacccacctcagcctcccaaagtgctgggattacaggcat

SEQ ID NO: 13439 - DNA, 7786 bp, Homo sapiens
cattggctccgaggacttaggacctgttagcttggttgggcgactggcaaatccttccttccccggggtagaagtccagggtgagaaattggttccgaactcaaaggaacccagtgccgggccacagccgggtcacgtggccggcggccccccatgacgtgctggctgcggggcgtcacggcgacgttcgggcgacctgccgagtggccaggctacctcagtcacctgtgtggtcgcagtgctgccatggacctgggacccatgcgcaagagttaccgcggggaccgagaggtgccgccgctagggccaggcctcctgcaggggcgggggaaaaggggtccccggagtcatctacagcggggaggggagtagtaggagcccctcggggcttctggggccacccggtggggcaaggaggtttgaggatcaccccccgtgggaaaagggggcttcaaagacatcccaccaggggaggagttccggggaaacgcaaatgaagatgggttcaaaaggcagcctttcgtaatgggtaagagctcgaactttggagcctgcctgggttggaatgtttaatgtatctgggcctcagtttcctcatctgggaagtgatagtatctgcctcacggggatgttatggtctaagatgtttgtaaagtgcttagaaccctgctactcgacaggtagcaaggtcaaataacttgctcagtcccacagctagtgatgaatgaatcggggtttcatgtgatggatgtcaggactgtgctgggcctccctcaagggcgggggaagaggggtcctcggagtcatctactggggggaggggagtaggaggaaacagcccctcagggcttctggggccaccccctggggcaaggagatttgggggtcacccaaacctccttgtgccaggtgggcatggtcatgggcccctctttaggtgggtacagtgacaaacagcttacaaactgtttgacaaaaaagtaagtggaatatgggggaaggggactagctcggggaggaggggaggagaaagctcttagcttactgccttcagtactttctgctgaccactgggaagttcttttccttttcgctcctcaggaggggaaccaagagaaccttttaggaattggggtccagggccctggttgccaaatctggttgcatgtgggcatttctagaaacgcttgtttaaaatgcagtttttccagcctgggcaacatagtgagaccctgtctctacaaaaaattaaaattagtcgagcatgttggagcgtgcctgtaattccagctacttgggaggatgaggttggaggattgcttgagctcaggaagttgagactgcagtaagccgagatcacaccaccgcactccagcctaggtgacagagtgagaccctgtctaaaataaataaataaataaataaaaatgcagtttttgatgaagcctcagacctgctgaatgagaaattttgggggtggagcccagaaagttttttttatgctccccaggtgattctgatgcacagacagttttgacacccatgacatgtaaccctgatttatccatcactagctgtgggacagcaagttgtctgagtttttatgcctgtttcctcacctgtaaaatggggcacagaatcttcttactgcatactatttcttattttaaggtcattgtcatgaggactaaatgagttgatttttgaaaagtgactagaacagtgccaggtccatagtaagcactatatatgtttattaaatgaaataaatctcctttcctaggcatttgaggagactcatctgacctcccttgacccagtgaaacagtttgctgcctggtttgaggaggctgttcagtgtcctgacataggggaagccaatgccatgtgtctggctacctgcaccaggtgggcatggctgtgggcccctctttgggtggatacatatgaactaggaagcttatgaagctctctactctggatgccaattttatggttccagctctgttattaacatgctctgtggctttaggcaagatacttgtcctctctgggcctgtgtccttacctataaaccaaagaccaggccacaaaattacatttcagtgataaaaatgcagtgccttgttcatttctgcccttgatacatccacacacaaccccttgcctccctcatctccccatctacccaagccccgtctgccattcaggagctacttctcctggtgaagctctgtctctctctcgaaatctagcacagtgcttgactatatcattcctttgacaatcatatgccctttgagacatcacttgtattagcctgttattcaattctcctcgataaagtgtaaggccttgtagccagtgctcttgtactgtgcgagtggatatctcccagagctctgagcagaggggctgatctcatagcaccactgtgatcccgaagcattggatgattgcattattgttagtccctgcccttagggtcttatgaatttgctagggctgtcttaacaaaatactgtagactggatagcttaaacaacaggagtttatttccttatagttctggtggctggaagtccaagatcaaggtgccatcaggggtggtttctgatgaggcctctgcttggggtttgcagacagctactttttaccatgtcctcacactgcctttcgtgtgtgtgtgtgtgtgtgtgtgtgtgtgtgtgtgttgtggagggcaagggaggtggttctgaagtgtctcttctcttacagtgacaccagtcctactggattagggccccacccctatgaccttacttaaccttaattacctccataaggtccccttctccaaatacagtcacattggggtttaaggctttaacataggggtttggggtgacacaattcagcccataacagggccccaggctgtggtgtcatacctctaggacaaatccccaggagcacatgggacggggtagcctgacagcccaataaagggggtgcagctggagggggtgctgagacatcctttggggagagggactatagccagaacattgaagcagactctgaccacagtgctctgctctttgctcctagagatggaaaaccctctgctcgcatgttgctgctgaagggcttcgggaaagatggcttccgcttcttcactaacttcgagagtcgaaaaggaaaagagctggtgggtgaaaagagctagtaatctttcccagggcctgcagggtttggctcttgcttcctcagtcaccttcttatgccaccccacccccccagtctacttgctctctgtgtgcaggtgccctcctgccatgaggccttggcacttgctgtgctctttgccataaatgaatgaatgcactttctaaccagcctcaccccatcagccatgacctgttccttcagatctcagcccacatgttacctcctcaggaaggccttccttgactctcactcagactcagcccctcatgctgtttgctgccattataacttgcaactttcttttttgtcttcttcttcagtttgtaactgagcatttgtttgggtgattatgtaactgatatttgtctcctctgctcaacagtaagctctgtaggagtggaggctgctctgttttatctctgctgtatcccccgcacgtctcctgttgtcagacccagagtgggcacttcgcgtgcattcaatgaatgaatccaaaatgagtaaacctccctgagtccatgccagccaagcatgcatttctcaagactcacaaatctgtgggtgagagaaatcacccagtctcactttggagtccgactggcttaaacttagctccaccacttcctgcaggaacttgggcacgtgacttagcctgtctctgtgtctgtgacaataggcctacttttgagggtttaaatgagctcttacggtgggtgcatctgctgtgggcctgcgcactacagctctcctgccttttccctgcatgccggaggcctcctctccctgtcctgatggctggctgtggattctcttttacttctaggactctaatccctttgcttcccttgtcttctactgggagccacttaaccgtcaggtgagtgaattttcccaggacagcctgggatgggctgggttggcagggcctgagtttatggctacgtctagcgaaggtccccagactgggcaaacatcccagctgggcactctgcctctaaaatagccctcagttagttggagccaagagtggtggggcagccgatcgaacagagaggaacggggcctgtgctggtagggagggcaggtggcatttaatgccattcacccagagccatccctgagcaggtgcgtgtggaaggccctgtgaagaaactgcctgaggaggaggctgagtgctacttccactcccgccccaagagcagccagattggggctgtggtcagccaccagagttctgtgatccctgatcgggaggtgagtggagctccgctgtagtcctccaggtggtggaggctttggcttatccccagaagctgtccccaggagatgccaggagatgtccccaggagatgtcctctctctccagcccagtgaaaacagtgaaaaggacagtgagaagggaaagtgggggtagggagaggggaaataggcctcctctgtccatctggccatcctgttgactgctcctggaggacagaggccagtctgctctgctcacccatgtccccagcacatatccccaggaagtccttgttaatgaatcattgactgggcctggcccttcttctaactcttccccctggacagtatctgagaaagaaaaatgaggaactggaacagctctaccaggatcaagaggtgcccaagccaaaatcctggtgagtgacatctggtagtcctctagaaagggacaccaggcccctgtgtttacttgaagccacctgcctggggaatcacagatctcctcctccctggccacccttgtcagatgcatcccagcaacttccttcaagaggccctgggatgaggggtgagggtgggagagtgacctggctagaaaactccacagagcactgaaacctctgcttctccttataggggtggctatgtcctgtaccctcaggtgatggagttctggcaaggtcaaaccaaccgcctgcatgaccggatagtctttcggcggggcctacccacaggagattcccctttggggcccatgacccaccgcggggaggaagactggctctatgagagacttgcaccttaactctgggacctgctggcccagagtggagctagggctaggtgtcaagagagggtgtgggattgggacccaggcccttctttctaaactcaacccatttccctccctaccccttatcttcaggactcttcagagctaatcctctaagttctctgtactcagttggttctcagttagctggtcaagtggagtgtaatggtggcgtagagaatcacaaatggaaaataattccataattatttttttgaccttgcctatgattgattaggatagctccctctaggggtagcagccggtgtgactccctttctggtgacagacagggccccagcagccctgtctgttaccatgtgagtcatactggccaaagcttagtcctagcatatgcacctgagccaacctggccaatcagattgttttgtcaataatttgaaatttgaactggagagatccagaaccttgggagtcattaaagccaagtcattcatagcagccaggaaacaataggaaccaaaagcctctgcctgctgctattgcaattcccaggatctctccttccctggatccctccctcccaggtctgggctgtgcagttcctccccctgccttaaaacaccccactatctctgtaaagtctctctctctcttttttttttttttacttaatctagctagaatctatttctgttgattacaacttaactaactcatttacggataggacttttttttttctttttttcttttttcttttcttttttttttttgagatggagtctcactctgtcacccaggctggagtgcagtggtgtgatcttggctcactgcaacctctgcctcccaggttcaagcaattctcctgcctcagcctcccaagtagctgggactacaggcacacgccaccacacccaactaatttttgtatttttagtagagatggggtttcaccatgttggccaggattgtctccatctcttgaccttgtgatccacccacctcagcctcccaaagtgctgggattacaggcatgagccaccacacccagcgagacggggtttcattatgttggccaggctggtctccaactcctgacctaaagtgatctgcccgccttggcctcccaaagtgctgggattacagacatgagccaccacgcttggccgggatagtatatttttatagcacttcccctactgattgctgccttctctgtggctacaagggacccacagaattacagggaagttacagggaagcaggtttcatctcaatattgggagagatttcaaacaatcacacctgcctgagaaggagtgggctgtcactaggaatttttattcccagtccgtcaggaattttgtagaagggcttcatgtgctggtaccaataggacaggaagattttaatcagctttactatctatgtttttttatggaaactgtgtgtatgtatacatacattttccaaaaagaaaaattaaatgattatagagattatgtttttcagactactcacgtatctgcttttcttactccccacctctgctgataattcctagttcattggtttttcccccacactggaattacctggggagcttaaaaaaccctgatgcctgggtcccaccctcagagatgattgaaccagcctggccagcatggcaaaaccctgtctctactatgatatgaatgcagcctgggcactgggaaatttaaaaactccccagataattctgtgcagccaaggttgagacctcctagtctagagctttgctatacacagggtggtccacaagccaggagcatcagcatcacttggcagcgccttagagattcagaccccagacccactgaatctgaccctgcattttcactagaccccaggtgatcagctgcactagactcaacctctaaaccaagacctcccaccctcacagtctatgatcctttagtgaccctcagctgagtcctgtgctgaactgtgtttgttctccttgagcacatgcccgctaaccagggacagactggatgagcaagcaacctgctggctatggagaagagccaggctgggtaaatgtttgctgtgactaagccaggatcaaagaactgcctgttgcttgcactggctggcactgagcttgccactctgtgaactgtgcttccttcccctgcatggacctgtgcctcagtcactattatccgcaggccttctccaagggcagccctctccttgtttatccctcttaagcctgcgtgcaggaaggcacattaaccctgtggccccctgcaggcaggagggtgttgggtgcccttacctaccttgccctttttcttgtaccgtaggctgtgccgtttatgagtaagtgatgtgtgtctgtgtgtgtgtctagaagtgctgcactcaccttgtgttattggaggttgtgtaaccccctagctttgagcctggtctcagatgttccttttccgttctctgtccagccgttaccgcccccagtctgtaataaaagcctatcagccgtgcacttta

SEQ ID NO: 13440 - DNA, 3465 bp, Homo sapiens
cattggctccgaggacttaggacctgttagcttggttgggcgactggcaaatccttccttccccggggtagaagtccagggtgagaaattggttccgaactcaaaggaacccagtgccgggccacagccgggtcacgtggccggcggccccccatgacgtgctggctgcggggcgtcacggcgacgttcgggcgacctgccgagtggccaggctacctcagtcacctgtgtggtcgcagtgctgccatggacctgggacccatgcgcaagagttaccgcggggaccgagaggcatttgaggagactcatctgacctcccttgacccagtgaaacagtttgctgcctggtttgaggaggctgttcagtgtcctgacataggggaagccaatgccatgtgtctggctacctgcaccagagatggaaaaccctctgctcgcatgttgctgctgaagggcttcgggaaagatggcttccgcttcttcactaacttcgagagtcgaaaaggaaaagagctggactctaatccctttgcttcccttgtcttctactgggagccacttaaccgtcaggtgcgtgtggaaggccctgtgaagaaactgcctgaggaggaggctgagtgctacttccactcccgccccaagagcagccagattggggctgtggtcagccaccagagttctgtgatccctgatcgggagtatctgagaaagaaaaatgaggaactggaacagctctaccaggatcaagaggtgcccaagccaaaatcctggggtggctatgtcctgtaccctcaggtgatggagttctggcaaggtcaaaccaaccgcctgcatgaccggatagtctttcggcggggcctacccacaggagattcccctttggggcccatgacccaccgcggggaggaagactggctctatgagagacttgcaccttaactctgggacctgctggcccagagtggagctagggctaggtgtcaagagagggtgtgggattgggacccaggcccttctttctaaactcaacccatttccctccctaccccttatcttcaggactcttcagagctaatcctctaagttctctgtactcagttggttctcagttagctggtcaagtggagtgtaatggtggcgtagagaatcacaaatggaaaataattccataattatttttttgaccttgcctatgattgattaggatagctccctctaggggtagcagccggtgtgactccctttctggtgacagacagggccccagcagccctgtctgttaccatgtgagtcatactggccaaagcttagtcctagcatatgcacctgagccaacctggccaatcagattgttttgtcaataatttgaaatttgaactggagagatccagaaccttgggagtcattaaagccaagtcattcatagcagccaggaaacaataggaaccaaaagcctctgcctgctgctattgcaattcccaggatctctccttccctggatccctccctcccaggtctgggctgtgcagttcctccccctgccttaaaacaccccactatctctgtaaagtctctctctctcttttttttttttttacttaatctagctagaatctatttctgttgattacaacttaactaactcatttacggataggacttttttttttctttttttcttttttcttttcttttttttttttgagatggagtctcactctgtcacccaggctggagtgcagtggtgtgatcttggctcactgcaacctctgcctcccaggttcaagcaattctcctgcctcagcctcccaagtagctgggactacaggcacacgccaccacacccaactaatttttgtatttttagtagagatggggtttcaccatgttggccaggattgtctccatctcttgaccttgtgatccacccacctcagcctcccaaagtgctgggattacaggcatgagccaccacacccagcgagacggggtttcattatgttggccaggctggtctccaactcctgacctaaagtgatctgcccgccttggcctcccaaagtgctgggattacagacatgagccaccacgcttggccgggatagtatatttttatagcacttcccctactgattgctgccttctctgtggctacaagggacccacagaattacagggaagttacagggaagcaggtttcatctcaatattgggagagatttcaaacaatcacacctgcctgagaaggagtgggctgtcactaggaatttttattcccagtccgtcaggaattttgtagaagggcttcatgtgctggtaccaataggacaggaagattttaatcagctttactatctatgtttttttatggaaactgtgtgtatgtatacatacattttccaaaaagaaaaattaaatgattatagagattatgtttttcagactactcacgtatctgcttttcttactccccacctctgctgataattcctagttcattggtttttcccccacactggaattacctggggagcttaaaaaaccctgatgcctgggtcccaccctcagagatgattgaaccagcctggccagcatggcaaaaccctgtctctactatgatatgaatgcagcctgggcactgggaaatttaaaaactccccagataattctgtgcagccaaggttgagacctcctagtctagagctttgctatacacagggtggtccacaagccaggagcatcagcatcacttggcagcgccttagagattcagaccccagacccactgaatctgaccctgcattttcactagaccccaggtgatcagctgcactagactcaacctctaaaccaagacctcccaccctcacagtctatgatcctttagtgaccctcagctgagtcctgtgctgaactgtgtttgttctccttgagcacatgcccgctaaccagggacagactggatgagcaagcaacctgctggctatggagaagagccaggctgggtaaatgtttgctgtgactaagccaggatcaaagaactgcctgttgcttgcactggctggcactgagcttgccactctgtgaactgtgcttccttcccctgcatggacctgtgcctcagtcactattatccgcaggccttctccaagggcagccctctccttgtttatccctcttaagcctgcgtgcaggaaggcacattaaccctgtggccccctgcaggcaggagggtgttgggtgcccttacctaccttgccctttttcttgtaccgtaggctgtgccgtttatgagtaagtgatgtgtgtctgtgtgtgtgtctagaagtgctgcactcaccttgtgttattggaggttgtgtaaccccctagctttgagcctggtctcagatgttccttttccgttctctgtccagccgttaccgcccccagtctgtaataaaagcctatcagccgtgcacttta

SEQ ID NO: 13441 - DNA, 7823 bp, Homo sapiens
gaagcagaggtggtagccaacggctccatgtctctgaggagcggcgggcggcggcgcgcggacccaggcgcggatggcgaggccagcagggatgatggcgccacttcctcagtttcggcactcaagcgcctggaacggagtcagtggacggataagatggatttgcggtttggttttgagcggctgaaggagcctggtgagaagacaggctggctcattaacatgcatcctaccgagattttagatgaagataagcgcttaggcagtgcagtggattactactttattcaagatgacggaagcagatttaaggtggctttgccctataaaccgtatttctacattgcgaccagaaagggttgtgagcgagaagtttcatcttttctctccaagaagtttcagggcaaaattgcaaaagtggagactgtccccaaagaggatctggacttgccaaatcacttggtgggtttgaagcgaaattacatcaggctgtccttccacactgtggaggatcttgtcaaagtgaggaaggagatctcccctgccgtgaagaagaacagggagcaggatcacgccagcgacgcgtacacagctctgctttccagtgttctgcagaggggcggtgtcattactgatgaagaggaaacctctaagaagatagctgaccagttggacaacattgtggacatgcgcgagtacgatgttccctaccacatccgcctctccattgacctgaagatccacgtggctcattggtacaatgtcagataccgaggaaatgcttttccggtagaaatcacccgccgagatgaccttgttgaacgacctgaccctgtggttttggcatttgacattgagacgaccaaactgcccctcaagtttcctgatgctgagacagaccagattatgatgatttcctacatgatcgatggccagggctacctcatcaccaacagggagattgtttcagaagatattgaagattttgagttcacccccaagccagaatatgaaggccccttttgtgtcttcaatgaacccgatgaggctcatctgatccaaaggtggtttgaacacgtccaggagaccaaacccaccatcatggtcacctacaacggggacttttttgactggccatttgtggaggcccgggcagcagtccacggtctgagcatgcagcaggagataggcttccagaaggacagccagggggagtacaaggcgccccagtgcatccacatggactgcctcaggtgggtgaagagggacagttaccttcctgtgggcagtcataatctcaaggcggccgccaaggccaagctaggctatgatcccgtggagctagacccggaggacatgtgccggatggccacggagcagccccagactctggccacgtattctgtgtcagatgctgtcgccacttactacctgtacatgaagtacgtccacccattcatctttgctctgtgcaccattattcccatggagcccgacgaggtgctgcggaagggctctggcactctgtgtgaggccttgctgatggtgcaggccttccacgccaacatcatcttccccaacaagcaagagcaggagttcaataagctgacggacgacggacacgtgctggactctgagacctacgtcgggggccacgtggaggccctcgagtctggggttttccgcagcgatatcccttgccggtttaggatgaatcctgccgcctttgacttcctgctgcagcgggttgagaagaccttgcgccacgcccttgaggaagaggagaaagtgcctgtggagcaagtcaccaactttgaagaggtgtgtgatgagattaagagcaagcttgcctccctgaaggacgttcccagccgcatcgagtgtccactcatctaccacctggacgtgggggccatgtaccccaacatcatcctgaccaaccgcctgcagccctctgccatggtggacgaagccacctgtgctgcctgtgacttcaataagcctggagcaaactgccagcggaagatggcctggcagtggaggggcgagttcatgccagccagtcgcagcgaataccatcggatccagcaccagctggagtcagagaagttcccccccttgttcccagaggggccagctcgggcctttcatgaactgtcccgcgaggaacaggcgaaatacgagaagagaaggctggcggattactgccggaaagcctacaagaagatccacatcaccaaggtggaagagcgtctcaccaccatctgccagcgggaaaactccttctacgtggacaccgtgcgtgccttccgggacaggcgttacgagttcaaagggctccacaaggtgtggaaaaagaagctctcggcggccgtggaggtgggcgacgcggctgaggtgaagcgctgcaagaacatggaggtgctgtatgactcgctgcagctggcccacaagtgcatcctgaactccttctatggctatgtcatgcgcaagggggctcgctggtactccatggagatggctggcatcgtctgcttcacaggggccaacatcatcacccaggcacgggagctgatcgagcagattgggaggcccttagagctggacacagatggtatatggtgcgtcctgcccaacagcttcccagaaaattttgtcttcaagacgaccaatgtgaagaagcccaaagtgaccatctcctacccaggcgccatgttgaacatcatggtcaaggaaggcttcaccaatgaccagtaccaggagctggctgagccgtcctcactcacctacgtcacccgctcagagaacagcatcttttttgaggttgatgggccctaccttgccatgattcttccagcctccaaggaagaaggcaagaaattgaagaagaggtatgctgtgttcaatgaagacggttctctggctgagctcaagggctttgaggtcaaacgccgcggggaactgcagctgattaagatcttccaatcctcggtgtttgaggccttcctcaagggcagcacgctggaagaggtgtatggctctgtagccaaggtggctgactactggctggacgtgctgtacagcaaggcagccaacatgcctgactctgagctattcgagctcatctctgagaaccgttccatgtctcggaagctggaagattacggggagcagaagtctacgtccatcagcacagcaaagcgcctggccgagttcctgggagaccagatggtcaaggatgcagggctgagttgccgctacatcatctcccgcaagcccgagggctcccctgtcacggagagggccatcccacttgccattttccaagcagagcccacggtgaggaagcactttctccggaaatggctcaagagctcttcccttcaagactttgatattcgagcaattctggattgggactactacattgagcggctgggaagcgccatccagaagatcatcaccatccctgcggccctgcagcaggtaaagaacccagtgccacgtgtcaaacaccccgactggctgcacaaaaaactgctggagaagaatgatgtctacaagcagaagaagatcagtgagctcttcaccctggagggcaggagacaggtcacgatggccgaggcctcagaagacagtccgaggccaagtgctcctgacatggaggacttcggcctcgtaaagctgcctcacccagcagcccctgtcactgtgaagaggaagcgagttctttgggagagccaggaggagtcccaggacctcacgccgactgtgccctggcaggaaatcttggggcagcctcccgccctgggaaccagccaggaggaatggcttgtctggctccggttccacaagaagaagtggcagctgcaggcccggcagcgcctcgcccgcaggaagaggcagcgtctggagtcggcagagggtgtgctcaggcccggggccatccgggatggtcctgccacggggctggggagcttcttgcgaagaactgcccgcagcatcctggaccttccgtggcagattgtgcagatcagcgagaccagccaggccggcctgttcaggctgtgggcgctcgttggcagtgacttgcactgcatcaggctgagcatcccccgtgtgttctacgtgaaccagcgagtcgctaaagcggaggagggtgcttcgtatcgcaaggtaaatcgggtccttcctcgctccaacatggtctacaatctctatgagtattcagtgccagaggacatgtaccaggaacacatcaacgagatcaacgctgagctgtcagcgccagacatcgagggcgtatatgagactcaggttccgttactgttccgggccctggtgcacctgggctgtgtgtgtgtggtcaataaacagctggtgaggcacctttcaggctgggaagcagagacctttgctcttgagcacctggagatgcgctctctggcccagttcagctacctggaaccagggagtatccgccatatctacctgtaccaccacgcacaggcccacaaagcgctcttcgggatcttcatcccctcacagcgcagggcatccgtctttgtgctggacactgtgcgcagcaaccagatgcccagccttggcgccctgtactcagcagagcacggcctcctcctggagaaggtgggccctgagctcctgccaccccccaaacacaccttcgaagttcgggcagaaactgacctgaagaccatctgcagagccatccagcgattcctgctcgcctacaaggaggagcgccgggggcccacactcatcgctgttcagtccagctgggagctgaagaggctggccagtgaaattcctgtcttggaggaattcccactggtgcctatctgtgtggctgacaagatcaactatggggtcctggactggcagcgccatggagcccggcgcatgatccgtcactacctcaacctggacacctgcctgtcgcaggccttcgagatgagcaggtactttcacattcccattgggaacctaccagaggacatctccacattcggctccgacctcttctttgcccgccacctccagcgccacaaccacctgctctggctgtcccctacagcccgccctgacctgggtggaaaggaggctgatgacaactgtcttgtcatggagttcgatgaccaagccactgttgagatcaacagttcaggctgttactccacagtgtgtgtggagctggaccttcagaacctggccgtcaacaccattctccagtctcaccatgtcaacgacatggagggggccgacagcatggggatcagcttcgacgtgatccagcaggcctccctggaggacatgatcacgggtggtcaggctgccagtgccccggccagctacgatgagacagccctgtgctctaacaccttcaggatcctgaagagcatggtcgtgggctgggtgaaggagatcacccagtaccacaacatctatgcagacaaccaggtgatgcacttctaccgctggcttcggtcgccatcctctctgcttcatgaccctgccctgcaccgcacactccacaacatgatgaagaagctcttcctgcagctcatcgctgagttcaagcgcctggggtcatcagtcatctacgccaacttcaaccgcatcatcctctgtacaaagaagcgccgtgtggaagatgccatcgcttacgtggagtacatcaccagcagcatccattcaaaggagaccttccattctctgacaatttctttctctcgatgctgggaatttcttctctggatggatccatctaactatggcggaatcaaaggaaaagtttcatctcgtattcactgtggactgcaagactcccagaaagcagggggagcagaggatgagcaggaaaatgaggacgatgaggaggaaagagatggggaggaggaggaagaggcggaggaatccaacgtggaggatttactggaaaacaactggaacattttgcagtttttgccacaggcagcctcctgccagaactacttcctcatgattgtttcagcgtacatcgtggccgtgtaccactgcatgaaggacgggctgaggcgcagtgctccagggagcacccccgtgaggaggaggggggccagccagctctcccaggaggccgagggggcggtcggagcccttcccggaatgatcaccttctctcaggattatgtcgcaaatgagctcactcagagcttcttcaccatcactcagaagattcagaagaaagtcacaggctctcggaactccactgagctctcagagatgtttcctgtcctccccggttcccacttgctgctcaataaccctgccctggagttcatcaaatacgtgtgcaaggtgctgtccctggacaccaacatcacaaaccaggtgaataagctgaaccgagacctgcttcgcctggtggatgtcggcgagttctccgaggaggcccagttccgagacccctgccgctcctacgtgcttcctgaggtcatctgccgcagctgtaacttctgccgcgacctggacctgtgtaaagactcttccttctcagaggatggggcggtcctgcctcagtggctctgctccaactgtcaggcgccctacgactcctctgccatcgagatgacgctggtggaagttctacagaagaagctgatggccttcaccctgcaggacctggtctgcctgaagtgccgcggggtgaaggagaccagcatgcctgtgtactgcagctgcgcgggagacttcgccctcaccatccacacccaggtcttcatggaacagatcggaatattccggaacattgcccagcactacggcatgtcgtacctcctggagaccctggagtggctgctgcagaagaacccacagctgggccattagccagccccgggccccgggtgcctctgcgtccgtgccaggcctcctgatgccaaggccacatccccgtgcttccagtgaccagaccactgaccaccctgactgtccaaacctgtgaccccaggccagggaacggggaggaaaccaaagaaaaccattttcagggagctcagacgtcacaggagggagcgggagcaggatgtggccctggcctcgccagagcacctgaagaagcaggccgtgagcgaggctgcgagtgccctgggcgccgtttctcacgcagtgaatgcttttccaggcctctgttgcttcctgcaccacacctggtggggtgggagcgtcctctaggtgcccctagttctttgtcctgcctcccagagggaggaaaagcccctgggggcttctggctccctgagattgggctctgagacgagacgggttcccaaggccctggtggggctggagtctcacctgtttgcatggagaaatgggctggccccacagcctcacaggagcagtttgtgggctggtttccccaggaatccagaccctaacccgtgagaatctggattttggcttgtgagccctgcttatttggagccgggtctagagggaaccctctatcagcctcaggaaaacaagacctctgtgcacctcacttttggctcactgcagcccttgtccttcacctccacacaggaccagctggaagcagaaagaagaaaggccaatttcacagggcaccaaacaagtatgaaatgtaaatcagaaatgcagacaccccagacgagagcctcacaggagggagggggccccacaggctccccaggaggctcgtgtctttggcccagagccagccttagtttgtccctgccatctactgtctgaggccatcgctgctacactttgtttttatttgtatttcatactgaagtttc

SEQ ID NO: 13442 - DNA, 2055 bp, Homo sapiens
gcatccattcaaaggagaccttccattctctgacaatttctttctctcgatgctgggaatttcttctctggatggatccatctaactatggcggaatcaaaggaaaagtttcatctcgtattcactgtggactggtaagcgagctgcagtgtggcacccgagccagctttgggggtcgcgttcattcctgcagcaagtgctgagtgctcagggccccggcgggcctggccgtgagcagcagacactgcacccgcatcctgccctcatgaacacggggagggaccatgcgcagacaagcacgtcagtgtggagtgtggcgtcagccctggtgatggcaaggcttgccgtgggcaacagggaggtggaggcccatgaggtggtgacagggaatccgagagctgatgaagtgcaccatagttgtgcgagcataaggcgcctccagcggatggacaccagggaggcaaagcacaagtcagtggagcagtggttgcagatgcaggcagagagctgacagagccaggcaacttgggcatggcagggcagggcctcggctttcgtggggatgggagcttctgtgtgggtgatgttggagctttcttggccccatgtggataacccaccattggagggcacaggcaggtaaagccggttagtgcctgtgtcagggagatgctgggcagcgaggttggtgagaagggcctgggtgggctttgaagtggagccaaggggccagcggatcggatgtgtgtaaatgcccaggtgcgggccaggctgtgggtgagtggaggtggctgtcgggagcagtctggggaaggggtcacgtctggctggggctcatggtgtttgcaaggttgagacgtgggtggtcagctggtgcaggagtggccagagagtggctgggtgggttgagaggaggcctgtgtcctccacaggggccctcatagtggactgagaggaagctgtgggtaccagagccaggggctcagatgtcagagggaaagccctttgtaaggacgcagacgcttctgggagctggcaggatgaagccaagactgcccaggacacctggatgggagcgattctggttggagttgggggataaaccctgattgaagggattcagaacaaagtgggagggtagaaactcaggcagtgtagaccgctctgaggaggggatcagcgtgtggtcagggcaggtggcagtgggtgtcggtgtctacacagacgtggatggtgccgtggcacgaacacaggctgcgcgggaggctgggtctgtgatggggtcgtgccgtcccaggagattcatggactcagaggagagaacagtcaccgggaagctctggctggttctttcgtccttggggggtgggagttcaacaattaaagtgaactctggaagagcagagtgaagctcacagtcccaggtcacgagcacttctgtgtgccaggcgcttcccacaaagcactttgtactgggagccaccctgggggattcacgcaggctccaggggatgccttgactgcgaggaaggcctctggtcaaacggggcagatggacccaggttggaggagccttcgctgtggcatcctacccctctaccaggccgcgatggtgcaaacacagccgcgttgtctcatgtgttacagcaagactcccagaaagcagggggagcagaggatgagcaggaaaatgaggacgatgaggaggaaagagatggggaggaggaggaagaggcggaggaatccaacgtggaggatttactggaaaacaactggaacattttgcagtttttgccacaggcagcctcctgccagaactacttcctcatgattgtttcaggtaagcccagagcccagggctgcgcagcccccactgaagggactcatggttagtagatgtggctcctgtgccatggtatcgcaagaagggagacagggaaaatcagatcgggcggagcctgcccagcagttgggactttgtgagccgaggggcctcctctccaggctccaggcatgttccactggagggcccggagaggggtgactgtcttccct

SEQ ID NO: 13443 - DNA, 542 bp, Homo sapiens
gcatccattcaaaggagaccttccattctctgacaatttctttctctcgatgctgggaatttcttctctggatggatccatctaactatggcggaatcaaaggaaaagtttcatctcgtattcactgtggactgcaagactcccagaaagcagggggagcagaggatgagcaggaaaatgaggacgatgaggaggaaagagatggggaggaggaggaagaggcggaggaatccaacgtggaggatttactggaaaacaactggaacattttgcagtttttgccacaggcagcctcctgccagaactacttcctcatgattgtttcaggtaagcccagagcccagggctgcgcagcccccactgaagggactcatggttagtagatgtggctcctgtgccatggtatcgcaagaagggagacagggaaaatcagatcgggcggagcctgcccagcagttgggactttgtgagccgaggggcctcctctccaggctccaggcatgttccactggagggcccggagaggggtgactgtcttccct

SEQ ID NO: 13444 - DNA, 18491 bp, Homo sapiens
gaggctgatgacaactgtcttgtcatggagttcgatgaccaagccactgttgagatcaacagttcaggctgttactccacaggtaagtgggcgggaggacgaggcccatgagacctggctggtgtttctgccattctgtgacatcttctcaaggcaatagtgccgaggatgggctcagagttcgaccgcgcaggtcagagctgaggctgcaggagacggtcctggggtcaaggtccaggtggggcctcctgtgccctcgggaatctgaatagcctggcaggtgtgaggatgggtgtgggcaggtctgttgctggttctggaggtggtggtggctggagtcaggcccagggggctggtggtgctggagctggcaggatgctggctgagcatggcgtcttcctgtgcagtgtgtgtggagctggaccttcagaacctggccgtcaacaccattctccagtctcaccatgtcaacgacatggagggggccgacagcatggggatcagcttcgacgtgatccagcaggcctccctggaggacatgatcacgggtggtcaggctgccagtgccccggccagctacgatgagacagccctgtgctctaacaccttcaggtgccaccctctctgggaaggagtgttactaatagaagggtcttatcctttgcccttaatttggaaagctaaggtctaagacagggtccattgggcttcccttagtcttaatggcagagccagagaccactgtgtggcgagttttccatagtctattgtctttaccactgtgggggtccggcctggtccctggcgactgttcagtgtgctgcctctgacctccctgtggccagaggtacttcacacagagtctttctaaccagggccacttttcgatgtgaccaaaggtacatcacagggatctccagccagctctactgagtatgatgtgtgaggcatcagcacttaggtgtcaggagccgtcggtctgctgcagagggcgtggttgagggtcaggagccatcagtctgcggagagcatggttgagggcagctactcgcattacccaccagcggtggttcatgctgggcaatgcttgctgtgtaccaggaggtgggccgagcacttcgcattctgcctctgtccccacatcagcccagggacggggagcggttattgtctgtttttcagataaggaaactgaggtcagaggggctgcctttgtggtcataccacaaatgaatggaagggtaggtgctcaaaaacaagtctttgtaattccagagcctgtactcagctgtagttttaatgactccatacaaaaggggagagggagcatgccagagctgggaaatgaggcagggagaggactggtggaaagaggcagggaggcagttgggagccgggagcagggtcttggcagagagacagtagcccaggcctgaaaggtagaaggagtccaacagcagatacccaaactgccgctctggagaatgtggggtttgccaaattattgaagagtttgtgatgaaagggagttttaggaatgggacttggacctctgtaggttctcttgtaacattctgttcttgaccccattgaagttcccgcttcttcagtagggtgatgtgcagttttggaatcctttagctgaattggggttccagtaccagagcagctggcatctctgccccatgggaagtgaagggggccagacagggcgtgtacagtgcactggccaatgcctagctgtctggcctgtgaccagggccccccggaacgggaaacttgtttacactggcacacgcccttgtggcttttgtgtgacctgtgtctaggtaccacctgcctgaccattgcttcggtgtaggggcccagccttgtgttccccctagtgtcgtagggaagacccagcccagggcagcccctgcctcttcagagggaaggcacaaaatcagtcaccaccacaatagggaacaagtgcaaagatgtgttccttacagctcctgggcagggagggtgccgtgagtagggaggccatcctccatccctgggtcctgcaaggcaggactgaagagtcagacagggagggtgcccagggcagctaggcgtgtgagggaatggggtgtaggcatgtgttagttcacgggcgagcgcctgaatggtccatttaaaggaagtggcgggaaggcagggcccagcctgctaggcgggagagaggcctctaagttcttgtttctgaccagctggggccatgtgggtatggtgatgttttgttttgttttgttttgttttgttttgttttgttttgtttttgttttttgagacagtctcactctgtcacccaggctggaatgcagtggcaccatcttgggtcactgcaacctccacctcccgggttcaagcgattctcctgccttagcctcccgagtagcaggattacaggcatgcactagcccagctaatttttgtatttttaatagagacggggtttcaccatgttggccaggttggtctcaaactcttgacctcaggtgatccacctgcctcggcctcccaaagtggtgggattacaggcgtgagcctctgcatccggcctagtgtggtgttctgatgtctaggcagtggctttgctgtgtccttcctgtcagggtccccggcccgtcacacacttgctgctttgtactgtgctgccctcccgtcctgctttagaacacacagagtttgggatgcggtgaagcctgaacaagtttaaggaatgaaatgggaagaaacagatgaggcatgagggtgaagggatgaaatttggaccgtgacttaaggtggggacagtgagaaggggaggcgacagtgacggatttggacccagccgtgtagggaaaacctgtgcccatttcagttggagcgtcccgcgtggcagcagcgtgggaggctgagggtacgagggtgtcgtgcaccttctctttcaggatcctgaagagcatggtcgtgggctgggtgaaggagatcacccagtaccacaacatctatgcagacaaccaggtgatgcacttctaccgctggcttcggtcgccatcctctctgcttcatgaccctgccctgcaccgcacactccacaacatgatgaagaagctcttcctgcagtgagtgctcctcctccctgggctgtccaccgcgtcctcagctgggctggtcccttactccccagaaccagagacatggccagccagtgcctctgggataagtagtgtatttctgagtttgtggagcataacaatccaaaggatcccagagaaacacgcagctgctgctgcagcgtcgcctgcacatcctgcagagaacactaggtggcacctcctctcctgcccctttcctgcacaaagtcatgctacacattgtattgctgtgtgccttgttgttttagtgaaaatatgcctgtgtcaggagatctgtgtgaggacatgccatatgaaagaacatttagcctctctccagccttgtgccgttgttacaaatagcaaatcagtgagaggcttcatgcatgagctcatgcagatagatccgtggggtaattgctggggcgtagccctcttgcaggcctcagaggtgttgtaactcgggatgaatcctgatttgatggacttcaccagagcggccccacagaggccccttgtggacacttcttccctggccgcgcctcaccaacatggccggggattattacccaactgctgggataaaagtgcttcttggtgcagtcttaacttaggattcttacaatgaatgaagtcgaattttctcttctagtcctttgtctatttttctgtagttttggtggttcttctcttattaaatatcgaatgagttgtctccatacaaaaagttgccatttttctgtgataagaatttgctaattttttcctgtttttggttatcttttgcctttgtttgtggtggatttttgccatgcagaaatctttgctcttcattagcttctgggttctagtgtatctcggaggcttttctgcttcaggaccctcagctcttttccctcttggattttctgggtgccctctggctctccatgactgtggcgtctccaccacggactctcaacttgctccacaggctcatcgctgagttcaagcgcctggggtcatcagtcatctacgccaacttcaaccgcatcatcctctgtacaaagaagcgccgtgtggaagatgccatcgcttacgtggagtacatcaccagcaggtgcggctggctggtcctggtgacgcagcactgtggctttgagagggatgctaaaatgaccccctgaggtgccagctctcctcctgggtgggctgggaggtcgttagaagtgcaggactcaccatggtgaatctgagcagcgtgaaaagggggttaccgccacctgtgcgcggtagcagatcggaggccactcagctgtgcagcttgagttgggcaagttcaggaagtggcctgcctttgctaagaaggttccacagtgatttttgtttgtttgctttttttccccatggatattcagggcacagattcaaggtgccctgaatatatgcaccccgtaagtgttgacgttgtaagccttttcatagacgtcagtgttggcgagtggagtggtgtggttcccgggtgctcaggtgtgcacagctctcagctgtcagagcctggtgtggttttgacttcctgccttccaggccatgttcctgaggttccctcctaggccttgctgtgcttctcacacactcagcactatttaaatctaaatagaagacaaagcaacagaaaaatctccaccagcaacttttgttcaactgatagtaggaagctccctcctaggtgcgctcaccctggggatgaatgcagccctttctgagcacagaggggagttgcttgtggaggcacagagagtctgcatgggtctgatctttgcatggttacaggggtagcatctgggggcgctgcagaaaaggctgacactaaattgataataggccttatcactgagaagtaggaaggtagagcttataagactttcattcctaatcaaaccatatgcactggattaatttgaaacacaaaagcactgttgtcctcctgcagacccactgtggccccttatgtctatccaagatgagccttgatggtcagtggtcacgctgtgtgcctgggaaagctggcttgggctagaattgtatttcggagcatggctgagataatgggaaggatgtgcctctccccacgttggccatgggcagctccaggggtgccctgtacctgaggaggccggggttgctcatgtcgagaaacaggctgctattcttccttagcgcgaagagcagagttagggagaacataaagttctcctgcaggagctgcgatgtgggctactcagctgcattttgaaactgtgatttaggatgttcctccttccttcctctctttctttgtttattcttccattttttggggttttgtttgttttttaggagatggggtcttgctctgtcacccaggctggagtgcagtggtgcagtcatggctcactgcggcctcaaactctgggctcaagctatctgcccacctcagcccactgagtagatgggactagaggtgcatgccagcatgcccagccaatttttgtattttttgtagagacagggttttgccacgttgcctggggtggtcttgaactcctgaactcaggcgatcctcctgcctcagcctcccaaagtgctaggattacaggcgtgagccaccgtgcctggcctgttctttttttttttttttttttttttttttccttaaatggatctaatgtgcagaggattgggtcagcgctagggaggcttaaccgaggagtgacaaggatgacgatagcttaaaagagcttggcagtgggaagcactgtggttggttaccagcaggtgcaggtcacctaaggccgcagagcagaggcagaacaccctgtgggccatccccagcacgaggaggcacccagctctctttgtggcgccagctcccaggggcctggtgggcctccttagttttacgtttaccacatttccccaggaagcctgagggatgatgtggtctgaatgaactttcaaattcagtgttaagtaagtggagggtacagatagatacaaggggaaataaaggaaagttgagaacaaggtcgatttcactgaagcagcgtcttcaatgcttcctctgcagcatccattcaaaggagaccttccattctctgacaatttctttctctcgatgctgggaatttcttctctggatggatccatctaactatggcggaatcaaaggaaaagtttcatctcgtattcactgtggactggtaagcgagctgcagtgtggcacccgagccagctttgggggtcgcgttcattcctgcagcaagtgctgagtgctcagggccccggcgggcctggccgtgagcagcagacactgcacccgcatcctgccctcatgaacacggggagggaccatgcgcagacaagcacgtcagtgtggagtgtggcgtcagccctggtgatggcaaggcttgccgtgggcaacagggaggtggaggcccatgaggtggtgacagggaatccgagagctgatgaagtgcaccatagttgtgcgagcataaggcgcctccagcggatggacaccagggaggcaaagcacaagtcagtggagcagtggttgcagatgcaggcagagagctgacagagccaggcaacttgggcatggcagggcagggcctcggctttcgtggggatgggagcttctgtgtgggtgatgttggagctttcttggccccatgtggataacccaccattggagggcacaggcaggtaaagccggttagtgcctgtgtcagggagatgctgggcagcgaggttggtgagaagggcctgggtgggctttgaagtggagccaaggggccagcggatcggatgtgtgtaaatgcccaggtgcgggccaggctgtgggtgagtggaggtggctgtcgggagcagtctggggaaggggtcacgtctggctggggctcatggtgtttgcaaggttgagacgtgggtggtcagctggtgcaggagtggccagagagtggctgggtgggttgagaggaggcctgtgtcctccacaggggccctcatagtggactgagaggaagctgtgggtaccagagccaggggctcagatgtcagagggaaagccctttgtaaggacgcagacgcttctgggagctggcaggatgaagccaagactgcccaggacacctggatgggagcgattctggttggagttgggggataaaccctgattgaagggattcagaacaaagtgggagggtagaaactcaggcagtgtagaccgctctgaggaggggatcagcgtgtggtcagggcaggtggcagtgggtgtcggtgtctacacagacgtggatggtgccgtggcacgaacacaggctgcgcgggaggctgggtctgtgatggggtcgtgccgtcccaggagattcatggactcagaggagagaacagtcaccgggaagctctggctggttctttcgtccttggggggtgggagttcaacaattaaagtgaactctggaagagcagagtgaagctcacagtcccaggtcacgagcacttctgtgtgccaggcgcttcccacaaagcactttgtactgggagccaccctgggggattcacgcaggctccaggggatgccttgactgcgaggaaggcctctggtcaaacggggcagatggacccaggttggaggagccttcgctgtggcatcctacccctctaccaggccgcgatggtgcaaacacagccgcgttgtctcatgtgttacagcaagactcccagaaagcagggggagcagaggatgagcaggaaaatgaggacgatgaggaggaaagagatggggaggaggaggaagaggcggaggaatccaacgtggaggatttactggaaaacaactggaacattttgcagtttttgccacaggcagcctcctgccagaactacttcctcatgattgtttcaggtaagcccagagcccagggctgcgcagcccccactgaagggactcatggttagtagatgtggctcctgtgccatggtatcgcaagaagggagacagggaaaatcagatcgggcggagcctgcccagcagttgggactttgtgagccgaggggcctcctctccaggctccaggcatgttccactggagggcccggagaggggtgactgtcttccctccagcctttgctctcaggaaactccatggggagcggctgcccctggccgtgtcattgaggagtttcctagctctgctcccgccatctgattcggtaactcagtcacatacattcccagggaacatttgtgtgtgtgcacgttcagtagctgaagataaagccctgggtcaggtcagctgccccctggctggtctgtgaggcctaactttctggtgggggagttcctatgccttggtttgggtctgcaggcttagagtttgcaaatcaagctatgcaggttagtgtgcagatgaagtgtatcgaggaagcactgtttgtagttgacagccctaagttaaagaatgccctaagtaaaaacagcaggttgtgatgtgcacacacaggtggatgcggtcacagaggccttcgttgatgatcattttatatttttgtctacttgtccttgagtctttaactttctcagttctctcttgcaactttctatgtctcttttgaaaagttccgggttggccgggcgcagtggctcatgcctgtaatcccagcactttagggggctgaggcgggtggatcacgtgaggtcaagagtttgagaccagcctggccaacatggtgaaaccccatctctactaaaaatacaaaaagtagccaggtgtggtgcgcacacctttaataccagctactcaggaagctgaggcaggagaatcacttgaacccaggaggcggaggttgcagtgagctgagattgcgccattgcactacagtctgggcaacaagaatgaaactgtgtctcaaaaaaaaaaaaaaaaaagggtaagtgccaggtgacaggcccggagtagtttttggagaagcttgctgatgccaggggccctgcctttgcttgtgttgggagctgtctttcacgcgctacccagtgagaggcttagtgtacatggccccatttatacagttttctctctgacaatgaactcaggtgtcagcgagtgttccttctcatttccacttctcacttctctaatttacttttagctcatctaaaggctgcagataaaattattaacaatgacattttagcctcatctgtgaggcaatctgaccagccatgggtcccctcagattctagggtgtttgcagcagcccgactcagggcctgtggtgtgtgtgcctctccacagcgtacatcgtggccgtgtaccactgcatgaaggacgggctgaggcgcagtgctccagggagcacccccgtgaggaggaggggggccagccagctctcccaggaggccgagggggcggtcggagcccttcccggtgagcagtcttttgtcttttgaggccactgccatgtgccagtgacctaactcctctgtgtgccatgggtggtccccggtgccagtcccccaggtgggaggtccccagtgccagacaggtcccagacccctccctcagcatccttatacttccaggaatgatcaccttctctcaggattatgtcgcaaatgagctcactcagagcttcttcaccatcactcagaagattcagaagaaagtcacaggctctcggaactccactgagctctcagagatgtttcctgtcctccccggttcccacttgctgctcaataaccctgccctggagttcatcaaatacgtgtgcaaggtgagagtgccagcgtgcgtgtgaggagaggacactaacgtacatgtgtaaggcgagaatgttactgtgtgcaaggtgaggctgtaatgcgtgcaccatgaacgtgctagcgtatgtgtgcaagataaggacaccgacatacctgtgcatggtaaggatgttaatgaatgcaggatgaggctttcagctgtgcaagggggaggtacctacatgtgtagggtcagggtgccagcgtgtgcaaggtgaggagcaggtgtaagttacttgttcattccaccaacatttatcatgtccctgtcacatgcagccacagttgcggcatctgtgctcaggtgtgagcaagacaggaaaggtcctgccttgtggggcctgtctgctgccagccgacccgagaagggagagggccgttcagaggcgcaggtgctgtggggatggagcctgtgaggggcgctgggaccaggtgcaggaggagggaagacgcaaaggccctggggggtgagcttggtgtgttggtgaaggcacagccgaacacccagtgccaccggctgggaggatgggtcaccggagaccagtaggctggaccaggacccagagctgatgagatgagagcttgctcggatgctgaggcctttctgggaaaggcaggctgagtccaaggagggataatattaccagataacgaccgcgggtgtcagcccttacagagcagagtgcttcactgtccatttcctcactcagccttcccagcaaactgcatctcacacacggctaaggttacgctggagatcaggtgacagcctcaaggtctggttgtggtgaagaagtgtttttagctcaccattttaattcctttattgacttttacatattttaaattcatttttattaaggtgtaatttatatacagtaaaatgtactctgtggcgtgcagttctgtgatttttcctaggtgaatggaattgcatcatcatcagcaggatacaggatagtcaccgcccgaaaacattccccgcactgccctcctcacctgacaccctttagccactggtgtgtcttccgtccctgcattttttttctcttctagagcgtcacataagtagagacattgtgcagccttttggatgtggcttcttagcaaaacacacctggaattggttcatccacgcgctcgtgtgtatcagaactccctttctgttgcgagcagtgtccattgtgtgggcaaaccacagcttgcttttcattcactggtggaaggacatttgcgttgctttcactttggggtgattaataacaaagctgctgtaaacattctgtaggtgtaggtttttgtgtgaacataaatttcaattctctgaggtcattttttaagtgtttgtttaacttgataagaaactgccaaactcttttctgaagtggctgcaccgtgtcagggtctcctcagcagtgtgtggcaagagttgctgttccacatcctcaccaggacttggtatcattgggtttttaaattgcagctattccagtaggtgtgtagtggtatcgcattgtgtttctgatttgcatttccctggcgactaatgatgtggagcttttttttggagatggagattcactctcattgcccaggctggggtgcagtggcgcgatctcagctcactgcaacctctgcctcctggttagctgggattacaggtgcctgccaccacgcccccccaattttttgtatttttagtggagacggagtttcaccatgttggccaggctggtctcgaactcctgacctcaagtgatccacctgcttcggcctcccaaagtgctgggattacaggcgtgagccaccacgcctggctgtggggcattttttaatgggcttctttgctgtcctggtgtctgtcctctttggtgaagttttaggttttatccatttgagttaatttttatacaatgtgcatgctgtagatccaagtccatatttctgcatgggatatctgattgcaggcatatcctgtcttattgtgcttcgaagcggttacctgtatttttataaatggaaggtttgtgggaatcttgtcttgagcaagtctcatctttccaacagcatgtgctcactgtgtctgtgtcacatgttggtaactctcaggatatttcagacttttccactattattatatcagccgtgataacctttgatgcttctatggcaattgttttggggcgccatgaaccgtgcgcatagaagacaatgagcttcatcaatgttgtgtgtgtcctgattgctccactcacgggccattctgccatctcgccctttctccttgggcctccccagtcccggtgacacaacactatagaaattaggtaagttaatagccctgcaatggcctctacgtgttcaagtgaaaggaagagtcacacgtctctcactttacataaagagctagaaatggctaaacttaggaaggcatgttgaaagtcgagacaggctgaaagctaggcctctcacaccagttagccaagtcaactgcaaaggaaaggttcttgaaggaaattacaagtgctcctccagtgaacacatgaaagataaagaagtgaagcatcctgttgctgatatggagaaagttgagtctggatagatcaaaccagatataacatcccctcaagccagagcctaatccagagcaaggctctcactctgttcagttccatgaaggctgagagctgaggaggctgtagaaggaaagcttgaagctggcggaggttggttcatggggtttagggagagaagccgtcccagtaacataaaagggcaaatgaggcaacaggtgcgggtggagaggctgcagcgagttctccagaagatctgtctgggatcattggcgaaggtggctacactgacaacatattttccgtgtagacaaaacagccttcttttggaagaagatgccatctaggactttcatagctagagaggaggcctcagagcctggcttcagaggaaaggctgactcttgttagcggcagatgcagctggtgactttaagtcgaagccactgctcattcagtcttttaaggccactacctgcagctcagaaaaagattccttccaaaatagtactgctcattgacagtggacctggtcacccaagagctctgatggagacgtacaaggagatgaatgttgctttcatgcctgcggacacagcatcccttctgcagcccatggatcaaggagcaatttcgactttcaacgtttattatttaaaaatatatttcatgaggctatagctgccatagatagtgattcccctgatggaactgggcacagtaaattgaaaaccttctagaaaggattcaccattctggatgccattaagaacatttgtgactcatgggagaaggggtcaaaatatcaacattaacaggagtgtggaagaagttgattctgaccctcatggatgactttgagggattcaagactattgtgggaggcgtgactgcagatgtggtggaaacagcaagggaactagaattagaagtggagcctgaagatgtgaccaagttgctgcaatctcaggacaaaatttaacagataaagagtggcttttcatggatgagcagtaaagtagttttttgttttgttttgttttgttttgttttgttttgttttgttttgagatggagcctccttgctctgtcgcccaggctggaatacagtggtgcggtcttggctcgctgcaacctccgcctcctgggttcaagtgattttcctacatcagcctcccaagtagctgggattacaggtgcccgccacaatgctcagctaatttttgtatttttaatagagacagagtttcaccatattggtcaggctggtctcaaactcctgacctcaggtgatccacccgccttggcctcccaaagtgctgggattacaggcacaagccaccacgcccagcccaaaaaagtagttttttttttaagatggagtctcgcactctcgcccaggctggagtgcagtggcgcgatcttggctcactgcaagctccctcccaggttcacgccattctcctgcctcagcctcccgagtagctgggactacaggcaagcgccaccacacctggctaattttcgtatttttagtagagacagggtttcaccatgttagccaggatggtctcgatctcctgaccttgtgatctgcccacctcggcctcccaaagtgctgggattacaggcgtgagccaccgcacctggccaaaaagtagtttcttgagatgaaagtgaacattgtggaaatgacaaaggattgagaatattccataaacttagttgccaaagcagcagcagaatttgagaggaccgactccaattttgaaagaagttctactgtgggtgaaatgttatcaaacagcatcacatgctacagagtctttcatggaaggaagagtcagttgatgcagcaaacttcattgttgtcttgttttaagaaattgccacagccaccccaactctcagcaataccaccctgatcagtcagcagccgtttacattgaggcaagaccctccaccagcaaaacgattgcgactcactgaaggctcagatgatcgttaatatttctgagcaataaaacattttaaaattaaggtacatacattgttttttagacataatgctgttatgcacttaatagactacagtatagggtaaacctaagttttgtctgggtagagtgactcacacctgtaatcccagcactttgggaggtcagggtgggttgactgtttgagcccagcagttcaagaccagcctgggcaacatggcaaaacccatctttacaacgattacaaacattacctgggcatggtggcgcatgcctgtcgtcccagctactgggaaggctgaggtagaaggatcaattgagccccaagaggtcaatgctgcagtgagccatgattgtgccactgcagtccattctgggtgacagagtgaaatcctgtcccaaaataaaaaaaatcacatagctttttttttttttgagatggagtctcactctgtcactcaggctggagtgcagtggtgcaatcttggctaactgcaacctccacctcctgggttcaagcgattccctgcttcagcctcccaggtagctgggatcacaggtgcacccgccaccatgcccagccaatttttgtatttttaatagaaatggggtttcactgtgttggccaggatggtcttgaactcctgacctcaggccatccacctgccttggcctaccaaagtgctgggattacaggcgtgagccaccacaaatcacgtaacttttatatgtactgagaaaacaagcgtgagccaaaaatcatgtaacttttatatgcactgagaaaccaaataatttgtgtgatttgctttattgtgatgttagtccattgaggtggtttgaaaccgaacttgccatatctccaagatacgcttgtattcaagaaccatttgttgaaaagactattctttttctatcgaatcatctttgtacctttttccataacttagtaaccttatctatgtgagtctctttctggattatgtattctttttttcgatcttgcattcaatttgctaatatctcgttgcgcatttttgtgtctgtgctcaggctgttattggtctgtagtttcttagtacggtctttggttctagtatcaggggatgctggcctcatagaatgggttgagtgctctctctcttcagtgttttgaaagatactgtgtagaatcagcagcatttcttccttaaatgtttagtaaattccccagggaagcctgtcctcaccgatggaaaactgctaatgtagagaagtcagctgaggcgtctaaagggactaaggaagggaggaaaggacaccaggaaactgtagcctaaggtccagagggttctggtccagacagagcagcagggaggccccgggagctccttcccgatgtgggctgtggtctctgcaggtgctgtccctggacaccaacatcacaaaccaggtgaataagctgaaccgagacctgcttcgcctggtggatgtcggcgagttctccgaggaggcccagttccgagacccctgccgctcctacgtgcttcctgaggtcatctgccgcagctgtaacttctgccgcgacctggacctgtgtaaagactcttccttctcagaggtgcggctgagctccagcgggcccttcactgtggagcagaacatccgagggcactgcggtgtcttgagggcttctgcagctccagctctgtgggtcacacctgctgcccctctgactcacatggattggcaacaggccccttcccaggcctccccacaccatgttcggaatgttgtcctaggaagggctcaagtgcaggtgggaggccagagtgcgtgcagctgcactcaggagactcgcccgtcaccaggcgcttctcacagccccttcctctcctgagatcctgcccatggcactgtggtctggaggctgggctggtgacctctcgcactcttgctctgcctaggatggggcggtcctgcctcagtggctctgctccaactgtcaggcgccctacgactcctctgccatcgagatgacgctggtggaagttctacagaagaagctgatggccttcaccctgcaggacctggtgagtcgtgcatgccgcctgcccgtgtgccctggagtccacaggggggtttctgtgcactcccgggagccggggtgtgtgcaggtcctgaggcacgccctggtgtcttccaaggggcctgccctgcagaccagtccatgccctgagcctgatggactgttctgtccacactggttgagcacctgccttgggtcaagagctggccttgtgggtgcttcgttctagcggaaggaggcagacactcccaagtgtgaagagaaggaaaggaggaagagggagttgcacagctcggccacaggaaggtcttgccgaggggcatctgagcagaggctgggggacgcgccaagctgccgtgtggtggtgcacggcgttcaggcctgcaggatggagggagtgagcagggcctggaggaggcctcaggactgggcatctggggtggaacatccacagcgagggtgggtgtagggaaggcgctggcaccgtgggatgaggtcgtgcattttactcataaccgagggctggctgcacacagcaggggctcgaggcttactgatgggcccacgaatgtgtctcgcgagcctgtgaagaagcagcaggcaggtctggccagcgcgggagggctggcgcccatcggggctgctccctttcaggtctgcctgaagtgccgcggggtgaaggagaccagcatgcctgtgtactgcagctgcgcgggagacttcgccctcaccatccacacccaggtgggctctccctcatctgcctcggctcagcctggcctccttggcctcctctctgagtggactggggtctcactgtgcctgtttattcctgcaggtcttcatggaacagatcggaatattccggaacattgcccagcactacggcatgtcgtacctcctggagaccctggagtggctgctgcagaagaacccacagctgggccattagccagccccgggccccgggtgcctctgcgtccgtgccaggcctcctgatgccaaggccacatccccgtgcttccagtgaccagaccactgaccaccctgactgtccaaacctgtgaccccaggccagggaacggggaggaaaccaaagaaaaccattttcagggagctcagacgtcacaggagggagcgggagcaggatgtggccctggcctcgccagagcacctgaagaagcaggccgtgagcgaggctgcgagtgccctgggcgccgtttctcacgcagtgaatgcttttccaggcctctgttgcttcctgcaccacacctggtggggtgggagcgtcctctaggtgcccctagttctttgtcctgcctcccagagggaggaaaagcccctgggggcttctggctccctgagattgggctctgagacgagacgggttcccaaggccctggtggggctggagtctcacctgtttgcatggagaaatgggctggccccacagcctcacaggagcagtttgtgggctggtttccccaggaatccagaccctaacccgtgagaatctggattttggcttgtgagccctgcttatttggagccgggtctagagggaaccctctatcagcctcaggaaaacaagacctctgtgcacctcacttttggctcactgcagcccttgtccttcacctccacacaggaccagctggaagcagaaagaagaaaggccaatttcacagggcaccaaacaagtatgaaatgtaaatcagaaatgcagacaccccagacgagagcctcacaggagggagggggccccacaggctccccaggaggctcgtgtctttggcccagagccagccttagtttgtccctgccatctactgtctgaggccatcgctgctacactttgtttttatttgtatttcatactga

SEQ ID NO: 13445 - DNA, 3328 bp, Homo sapiens
gaggctgatgacaactgtcttgtcatggagttcgatgaccaagccactgttgagatcaacagttcaggctgttactccacagtgtgtgtggagctggaccttcagaacctggccgtcaacaccattctccagtctcaccatgtcaacgacatggagggggccgacagcatggggatcagcttcgacgtgatccagcaggcctccctggaggacatgatcacgggtggtcaggctgccagtgccccggccagctacgatgagacagccctgtgctctaacaccttcaggtgccaccctctctgggaaggagtgttactaatagaagggtcttatcctttgcccttaatttggaaagctaaggtctaagacagggtccattgggcttcccttagtcttaatggcagagccagagaccactgtgtggcgagttttccatagtctattgtctttaccactgtgggggtccggcctggtccctggcgactgttcagtgtgctgcctctgacctccctgtggccagaggtacttcacacagagtctttctaaccagggccacttttcgatgtgaccaaaggtacatcacagggatctccagccagctctactgagtatgatgtgtgaggcatcagcacttaggtgtcaggagccgtcggtctgctgcagagggcgtggttgagggtcaggagccatcagtctgcggagagcatggttgagggcagctactcgcattacccaccagcggtggttcatgctgggcaatgcttgctgtgtaccaggaggtgggccgagcacttcgcattctgcctctgtccccacatcagcccagggacggggagcggttattgtctgtttttcagataaggaaactgaggtcagaggggctgcctttgtggtcataccacaaatgaatggaagggatcctgaagagcatggtcgtgggctgggtgaaggagatcacccagtaccacaacatctatgcagacaaccaggtgatgcacttctaccgctggcttcggtcgccatcctctctgcttcatgaccctgccctgcaccgcacactccacaacatgatgaagaagctcttcctgcagctcatcgctgagttcaagcgcctggggtcatcagtcatctacgccaacttcaaccgcatcatcctctgtacaaagaagcgccgtgtggaagatgccatcgcttacgtggagtacatcaccagcagcatccattcaaaggagaccttccattctctgacaatttctttctctcgatgctgggaatttcttctctggatggatccatctaactatggcggaatcaaaggaaaagtttcatctcgtattcactgtggactgcaagactcccagaaagcagggggagcagaggatgagcaggaaaatgaggacgatgaggaggaaagagatggggaggaggaggaagaggcggaggaatccaacgtggaggatttactggaaaacaactggaacattttgcagtttttgccacaggcagcctcctgccagaactacttcctcatgattgtttcagcgtacatcgtggccgtgtaccactgcatgaaggacgggctgaggcgcagtgctccagggagcacccccgtgaggaggaggggggccagccagctctcccaggaggccgagggggcggtcggagcccttcccggaatgatcaccttctctcaggattatgtcgcaaatgagctcactcagagcttcttcaccatcactcagaagattcagaagaaagtcacaggctctcggaactccactgagctctcagagatgtttcctgtcctccccggttcccacttgctgctcaataaccctgccctggagttcatcaaatacgtgtgcaaggtgctgtccctggacaccaacatcacaaaccaggtgaataagctgaaccgagacctgcttcgcctggtggatgtcggcgagttctccgaggaggcccagttccgagacccctgccgctcctacgtgcttcctgaggtcatctgccgcagctgtaacttctgccgcgacctggacctgtgtaaagactcttccttctcagaggatggggcggtcctgcctcagtggctctgctccaactgtcaggcgccctacgactcctctgccatcgagatgacgctggtggaagttctacagaagaagctgatggccttcaccctgcaggacctggtctgcctgaagtgccgcggggtgaaggagaccagcatgcctgtgtactgcagctgcgcgggagacttcgccctcaccatccacacccaggtcttcatggaacagatcggaatattccggaacattgcccagcactacggcatgtcgtacctcctggagaccctggagtggctgctgcagaagaacccacagctgggccattagccagccccgggccccgggtgcctctgcgtccgtgccaggcctcctgatgccaaggccacatccccgtgcttccagtgaccagaccactgaccaccctgactgtccaaacctgtgaccccaggccagggaacggggaggaaaccaaagaaaaccattttcagggagctcagacgtcacaggagggagcgggagcaggatgtggccctggcctcgccagagcacctgaagaagcaggccgtgagcgaggctgcgagtgccctgggcgccgtttctcacgcagtgaatgcttttccaggcctctgttgcttcctgcaccacacctggtggggtgggagcgtcctctaggtgcccctagttctttgtcctgcctcccagagggaggaaaagcccctgggggcttctggctccctgagattgggctctgagacgagacgggttcccaaggccctggtggggctggagtctcacctgtttgcatggagaaatgggctggccccacagcctcacaggagcagtttgtgggctggtttccccaggaatccagaccctaacccgtgagaatctggattttggcttgtgagccctgcttatttggagccgggtctagagggaaccctctatcagcctcaggaaaacaagacctctgtgcacctcacttttggctcactgcagcccttgtccttcacctccacacaggaccagctggaagcagaaagaagaaaggccaatttcacagggcaccaaacaagtatgaaatgtaaatcagaaatgcagacaccccagacgagagcctcacaggagggagggggccccacaggctccccaggaggctcgtgtctttggcccagagccagccttagtttgtccctgccatctactgtctgaggccatcgctgctacactttgtttttatttgtatttcatactga

SEQ ID NO: 13446 - DNA, 9682 bp, Homo sapiens
caatttctttctctcgatgctgggaatttcttctctggatggatccatctaactatggcggaatcaaaggaaaagtttcatctcgtattcactgtggactggtaagcgagctgcagtgtggcacccgagccagctttgggggtcgcgttcattcctgcagcaagtgctgagtgctcagggccccggcgggcctggccgtgagcagcagacactgcacccgcatcctgccctcatgaacacggggagggaccatgcgcagacaagcacgtcagtgtggagtgtggcgtcagccctggtgatggcaaggcttgccgtgggcaacagggaggtggaggcccatgaggtggtgacagggaatccgagagctgatgaagtgcaccatagttgtgcgagcataaggcgcctccagcggatggacaccagggaggcaaagcacaagtcagtggagcagtggttgcagatgcaggcagagagctgacagagccaggcaacttgggcatggcagggcagggcctcggctttcgtggggatgggagcttctgtgtgggtgatgttggagctttcttggccccatgtggataacccaccattggagggcacaggcaggtaaagccggttagtgcctgtgtcagggagatgctgggcagcgaggttggtgagaagggcctgggtgggctttgaagtggagccaaggggccagcggatcggatgtgtgtaaatgcccaggtgcgggccaggctgtgggtgagtggaggtggctgtcgggagcagtctggggaaggggtcacgtctggctggggctcatggtgtttgcaaggttgagacgtgggtggtcagctggtgcaggagtggccagagagtggctgggtgggttgagaggaggcctgtgtcctccacaggggccctcatagtggactgagaggaagctgtgggtaccagagccaggggctcagatgtcagagggaaagccctttgtaaggacgcagacgcttctgggagctggcaggatgaagccaagactgcccaggacacctggatgggagcgattctggttggagttgggggataaaccctgattgaagggattcagaacaaagtgggagggtagaaactcaggcagtgtagaccgctctgaggaggggatcagcgtgtggtcagggcaggtggcagtgggtgtcggtgtctacacagacgtggatggtgccgtggcacgaacacaggctgcgcgggaggctgggtctgtgatggggtcgtgccgtcccaggagattcatggactcagaggagagaacagtcaccgggaagctctggctggttctttcgtccttggggggtgggagttcaacaattaaagtgaactctggaagagcagagtgaagctcacagtcccaggtcacgagcacttctgtgtgccaggcgcttcccacaaagcactttgtactgggagccaccctgggggattcacgcaggctccaggggatgccttgactgcgaggaaggcctctggtcaaacggggcagatggacccaggttggaggagccttcgctgtggcatcctacccctctaccaggccgcgatggtgcaaacacagccgcgttgtctcatgtgttacagcaagactcccagaaagcagggggagcagaggatgagcaggaaaatgaggacgatgaggaggaaagagatggggaggaggaggaagaggcggaggaatccaacgtggaggatttactggaaaacaactggaacattttgcagtttttgccacaggcagcctcctgccagaactacttcctcatgattgtttcaggtaagcccagagcccagggctgcgcagcccccactgaagggactcatggttagtagatgtggctcctgtgccatggtatcgcaagaagggagacagggaaaatcagatcgggcggagcctgcccagcagttgggactttgtgagccgaggggcctcctctccaggctccaggcatgttccactggagggcccggagaggggtgactgtcttccctccagcctttgctctcaggaaactccatggggagcggctgcccctggccgtgtcattgaggagtttcctagctctgctcccgccatctgattcggtaactcagtcacatacattcccagggaacatttgtgtgtgtgcacgttcagtagctgaagataaagccctgggtcaggtcagctgccccctggctggtctgtgaggcctaactttctggtgggggagttcctatgccttggtttgggtctgcaggcttagagtttgcaaatcaagctatgcaggttagtgtgcagatgaagtgtatcgaggaagcactgtttgtagttgacagccctaagttaaagaatgccctaagtaaaaacagcaggttgtgatgtgcacacacaggtggatgcggtcacagaggccttcgttgatgatcattttatatttttgtctacttgtccttgagtctttaactttctcagttctctcttgcaactttctatgtctcttttgaaaagttccgggttggccgggcgcagtggctcatgcctgtaatcccagcactttagggggctgaggcgggtggatcacgtgaggtcaagagtttgagaccagcctggccaacatggtgaaaccccatctctactaaaaatacaaaaagtagccaggtgtggtgcgcacacctttaataccagctactcaggaagctgaggcaggagaatcacttgaacccaggaggcggaggttgcagtgagctgagattgcgccattgcactacagtctgggcaacaagaatgaaactgtgtctcaaaaaaaaaaaaaaaaaagggtaagtgccaggtgacaggcccggagtagtttttggagaagcttgctgatgccaggggccctgcctttgcttgtgttgggagctgtctttcacgcgctacccagtgagaggcttagtgtacatggccccatttatacagttttctctctgacaatgaactcaggtgtcagcgagtgttccttctcatttccacttctcacttctctaatttacttttagctcatctaaaggctgcagataaaattattaacaatgacattttagcctcatctgtgaggcaatctgaccagccatgggtcccctcagattctagggtgtttgcagcagcccgactcagggcctgtggtgtgtgtgcctctccacagcgtacatcgtggccgtgtaccactgcatgaaggacgggctgaggcgcagtgctccagggagcacccccgtgaggaggaggggggccagccagctctcccaggaggccgagggggcggtcggagcccttcccggtgagcagtcttttgtcttttgaggccactgccatgtgccagtgacctaactcctctgtgtgccatgggtggtccccggtgccagtcccccaggtgggaggtccccagtgccagacaggtcccagacccctccctcagcatccttatacttccaggaatgatcaccttctctcaggattatgtcgcaaatgagctcactcagagcttcttcaccatcactcagaagattcagaagaaagtcacaggctctcggaactccactgagctctcagagatgtttcctgtcctccccggttcccacttgctgctcaataaccctgccctggagttcatcaaatacgtgtgcaaggtgagagtgccagcgtgcgtgtgaggagaggacactaacgtacatgtgtaaggcgagaatgttactgtgtgcaaggtgaggctgtaatgcgtgcaccatgaacgtgctagcgtatgtgtgcaagataaggacaccgacatacctgtgcatggtaaggatgttaatgaatgcaggatgaggctttcagctgtgcaagggggaggtacctacatgtgtagggtcagggtgccagcgtgtgcaaggtgaggagcaggtgtaagttacttgttcattccaccaacatttatcatgtccctgtcacatgcagccacagttgcggcatctgtgctcaggtgtgagcaagacaggaaaggtcctgccttgtggggcctgtctgctgccagccgacccgagaagggagagggccgttcagaggcgcaggtgctgtggggatggagcctgtgaggggcgctgggaccaggtgcaggaggagggaagacgcaaaggccctggggggtgagcttggtgtgttggtgaaggcacagccgaacacccagtgccaccggctgggaggatgggtcaccggagaccagtaggctggaccaggacccagagctgatgagatgagagcttgctcggatgctgaggcctttctgggaaaggcaggctgagtccaaggagggataatattaccagataacgaccgcgggtgtcagcccttacagagcagagtgcttcactgtccatttcctcactcagccttcccagcaaactgcatctcacacacggctaaggttacgctggagatcaggtgacagcctcaaggtctggttgtggtgaagaagtgtttttagctcaccattttaattcctttattgacttttacatattttaaattcatttttattaaggtgtaatttatatacagtaaaatgtactctgtggcgtgcagttctgtgatttttcctaggtgaatggaattgcatcatcatcagcaggatacaggatagtcaccgcccgaaaacattccccgcactgccctcctcacctgacaccctttagccactggtgtgtcttccgtccctgcattttttttctcttctagagcgtcacataagtagagacattgtgcagccttttggatgtggcttcttagcaaaacacacctggaattggttcatccacgcgctcgtgtgtatcagaactccctttctgttgcgagcagtgtccattgtgtgggcaaaccacagcttgcttttcattcactggtggaaggacatttgcgttgctttcactttggggtgattaataacaaagctgctgtaaacattctgtaggtgtaggtttttgtgtgaacataaatttcaattctctgaggtcattttttaagtgtttgtttaacttgataagaaactgccaaactcttttctgaagtggctgcaccgtgtcagggtctcctcagcagtgtgtggcaagagttgctgttccacatcctcaccaggacttggtatcattgggtttttaaattgcagctattccagtaggtgtgtagtggtatcgcattgtgtttctgatttgcatttccctggcgactaatgatgtggagcttttttttggagatggagattcactctcattgcccaggctggggtgcagtggcgcgatctcagctcactgcaacctctgcctcctggttagctgggattacaggtgcctgccaccacgcccccccaattttttgtatttttagtggagacggagtttcaccatgttggccaggctggtctcgaactcctgacctcaagtgatccacctgcttcggcctcccaaagtgctgggattacaggcgtgagccaccacgcctggctgtggggcattttttaatgggcttctttgctgtcctggtgtctgtcctctttggtgaagttttaggttttatccatttgagttaatttttatacaatgtgcatgctgtagatccaagtccatatttctgcatgggatatctgattgcaggcatatcctgtcttattgtgcttcgaagcggttacctgtatttttataaatggaaggtttgtgggaatcttgtcttgagcaagtctcatctttccaacagcatgtgctcactgtgtctgtgtcacatgttggtaactctcaggatatttcagacttttccactattattatatcagccgtgataacctttgatgcttctatggcaattgttttggggcgccatgaaccgtgcgcatagaagacaatgagcttcatcaatgttgtgtgtgtcctgattgctccactcacgggccattctgccatctcgccctttctccttgggcctccccagtcccggtgacacaacactatagaaattaggtaagttaatagccctgcaatggcctctacgtgttcaagtgaaaggaagagtcacacgtctctcactttacataaagagctagaaatggctaaacttaggaaggcatgttgaaagtcgagacaggctgaaagctaggcctctcacaccagttagccaagtcaactgcaaaggaaaggttcttgaaggaaattacaagtgctcctccagtgaacacatgaaagataaagaagtgaagcatcctgttgctgatatggagaaagttgagtctggatagatcaaaccagatataacatcccctcaagccagagcctaatccagagcaaggctctcactctgttcagttccatgaaggctgagagctgaggaggctgtagaaggaaagcttgaagctggcggaggttggttcatggggtttagggagagaagccgtcccagtaacataaaagggcaaatgaggcaacaggtgcgggtggagaggctgcagcgagttctccagaagatctgtctgggatcattggcgaaggtggctacactgacaacatattttccgtgtagacaaaacagccttcttttggaagaagatgccatctaggactttcatagctagagaggaggcctcagagcctggcttcagaggaaaggctgactcttgttagcggcagatgcagctggtgactttaagtcgaagccactgctcattcagtcttttaaggccactacctgcagctcagaaaaagattccttccaaaatagtactgctcattgacagtggacctggtcacccaagagctctgatggagacgtacaaggagatgaatgttgctttcatgcctgcggacacagcatcccttctgcagcccatggatcaaggagcaatttcgactttcaacgtttattatttaaaaatatatttcatgaggctatagctgccatagatagtgattcccctgatggaactgggcacagtaaattgaaaaccttctagaaaggattcaccattctggatgccattaagaacatttgtgactcatgggagaaggggtcaaaatatcaacattaacaggagtgtggaagaagttgattctgaccctcatggatgactttgagggattcaagactattgtgggaggcgtgactgcagatgtggtggaaacagcaagggaactagaattagaagtggagcctgaagatgtgaccaagttgctgcaatctcaggacaaaatttaacagataaagagtggcttttcatggatgagcagtaaagtagttttttgttttgttttgttttgttttgttttgttttgttttgttttgagatggagcctccttgctctgtcgcccaggctggaatacagtggtgcggtcttggctcgctgcaacctccgcctcctgggttcaagtgattttcctacatcagcctcccaagtagctgggattacaggtgcccgccacaatgctcagctaatttttgtatttttaatagagacagagtttcaccatattggtcaggctggtctcaaactcctgacctcaggtgatccacccgccttggcctcccaaagtgctgggattacaggcacaagccaccacgcccagcccaaaaaagtagttttttttttaagatggagtctcgcactctcgcccaggctggagtgcagtggcgcgatcttggctcactgcaagctccctcccaggttcacgccattctcctgcctcagcctcccgagtagctgggactacaggcaagcgccaccacacctggctaattttcgtatttttagtagagacagggtttcaccatgttagccaggatggtctcgatctcctgaccttgtgatctgcccacctcggcctcccaaagtgctgggattacaggcgtgagccaccgcacctggccaaaaagtagtttcttgagatgaaagtgaacattgtggaaatgacaaaggattgagaatattccataaacttagttgccaaagcagcagcagaatttgagaggaccgactccaattttgaaagaagttctactgtgggtgaaatgttatcaaacagcatcacatgctacagagtctttcatggaaggaagagtcagttgatgcagcaaacttcattgttgtcttgttttaagaaattgccacagccaccccaactctcagcaataccaccctgatcagtcagcagccgtttacattgaggcaagaccctccaccagcaaaacgattgcgactcactgaaggctcagatgatcgttaatatttctgagcaataaaacattttaaaattaaggtacatacattgttttttagacataatgctgttatgcacttaatagactacagtatagggtaaacctaagttttgtctgggtagagtgactcacacctgtaatcccagcactttgggaggtcagggtgggttgactgtttgagcccagcagttcaagaccagcctgggcaacatggcaaaacccatctttacaacgattacaaacattacctgggcatggtggcgcatgcctgtcgtcccagctactgggaaggctgaggtagaaggatcaattgagccccaagaggtcaatgctgcagtgagccatgattgtgccactgcagtccattctgggtgacagagtgaaatcctgtcccaaaataaaaaaaatcacatagctttttttttttttgagatggagtctcactctgtcactcaggctggagtgcagtggtgcaatcttggctaactgcaacctccacctcctgggttcaagcgattccctgcttcagcctcccaggtagctgggatcacaggtgcacccgccaccatgcccagccaatttttgtatttttaatagaaatggggtttcactgtgttggccaggatggtcttgaactcctgacctcaggccatccacctgccttggcctaccaaagtgctgggattacaggcgtgagccaccacaaatcacgtaacttttatatgtactgagaaaacaagcgtgagccaaaaatcatgtaacttttatatgcactgagaaaccaaataatttgtgtgatttgctttattgtgatgttagtccattgaggtggtttgaaaccgaacttgccatatctccaagatacgcttgtattcaagaaccatttgttgaaaagactattctttttctatcgaatcatctttgtacctttttccataacttagtaaccttatctatgtgagtctctttctggattatgtattctttttttcgatcttgcattcaatttgctaatatctcgttgcgcatttttgtgtctgtgctcaggctgttattggtctgtagtttcttagtacggtctttggttctagtatcaggggatgctggcctcatagaatgggttgagtgctctctctcttcagtgttttgaaagatactgtgtagaatcagcagcatttcttccttaaatgtttagtaaattccccagggaagcctgtcctcaccgatggaaaactgctaatgtagagaagtcagctgaggcgtctaaagggactaaggaagggaggaaaggacaccaggaaactgtagcctaaggtccagagggttctggtccagacagagcagcagggaggccccgggagctccttcccgatgtgggctgtggtctctgcaggtgctgt

SEQ ID NO: 13447 - DNA, 556 bp, Homo sapiens
caatttctttctctcgatgctgggaatttcttctctggatggatccatctaactatggcggaatcaaaggaaaagtttcatctcgtattcactgtggactgcaagactcccagaaagcagggggagcagaggatgagcaggaaaatgaggacgatgaggaggaaagagatggggaggaggaggaagaggcggaggaatccaacgtggaggatttactggaaaacaactggaacattttgcagtttttgccacaggcagcctcctgccagaactacttcctcatgattgtttcagcgtacatcgtggccgtgtaccactgcatgaaggacgggctgaggcgcagtgctccagggagcacccccgtgaggaggaggggggccagccagctctcccaggaggccgagggggcggtcggagcccttcccgattcagaagaaagtcacaggctctcggaactccactgagctctcagagatgtttcctgtcctccccggttcccacttgctgctcaataaccctgccctggagttcatcaaatacgtgtgcaaggtgctgt

SEQ ID NO: 13448 - DNA, 2055 bp, Homo sapiens
gtggttgttctccgggaccaggcaacacatacagagatggtcattgagtcacagtttgtagttttgaaaaagtaggcgcttgtcattcttcatttgcaaagtcatgggtaggtaggctgatgtgtttatatgataaatcatttcacatcagttacaatgaacgaaccatatgtgcatgtttcacccggtgtcagtctcaaaaatacatggctgaataaagaaacaagttgcagggacaggcatgtggctcacgcctgtaatctcaacactttggaaggctgaggtgggtggatcacttgaggtcaggagttcgagaccagcctggccaacatggtgaaaccccatctttactaaaaatacaacaaaaaattagccgggcttggtggcaggtgcctgtaatcctagcttcttgggaggctgaggcagaattgcttgaacccaggaggcgaggttgcagtgagatgagatcgtgccattgcgctccagcctggacaacagagtgagattctgtctcaaaaaaaaaaaaaaaaaaaaaggaaacaagttgcagtcagatgtgtcccacatgttactatttaggttaaaacttacagctgtggcatgtgtctgtggacatgtggtaaaaatttaaaggtgtgtgggggcagacagaagagggctgtacccattatttgcaatattttctttcttacaaaaagcattctggagcaaacatggcaaaatgcaaagatttacttattggtggtattgagtgacgttttatttttcggtttgatcttttcactttttttttgaaagagggtctcaccctctcgcccaggctggaatgcagtggcgcaaccttggctcactgcaacccctacctcctaggctcaagtgatccttccacctcagcctcccaagtagctgggaccacaggcccacacaaccacacccagctaatttttctattttttgtagagacggagtttcaccatgttggccaggctagtctcaaactcctgggctcaagtgatccgcccacctcagcctctcaaagtgctgggatgacaggcgtgagccaccacacccggccttcactattaaaggttcaataaacttgtgtaaacgaacatcccatttcaggtgatatacttatactagatttcgagaagtagaatttgtggggatgagatcctgagatttttgtttgcttgtttttatgaggcaaggtctcacttgcccaggctggagttcagtggtgtgatcatagttcgccgcagcctccaactcctgggttcaagtgatcctcctgcctcagcctaccaagtagcttgggactacaggcgcactaccacgcctggctaatttgtaatatattttgtagagacagggtcttgctgttacccaggctggtctcaaactcctggccccaagcaattctcctgtcttggcctcccaaagtgctggcattccaggcatgagccaccctgcgcagcccgagatcctgagatttaaggcttcactgggtctttccaggtcacgatggccgaggcctcagaagacagtccgaggccaagtgctcctgacatggaggacttcggcctcgtaaagctgcctcacccagcagcccctgtcactgtgaagaggaagcgagttctttgggagagccaggaggagtcccaggacctcacgccgactgtgccctggcaggaaatcttggggcagcctcccgccctgggaaccagccaggtaaggcacacagctgtgatactgtctgtctctgaggggtctgcacagcccagggagcccgagatgcgtcctgacccctagggaggctgcttgtgagaaagtcatggcgggcattcccatctcaccacttgcacactggctgtgctcaccatccatcccaggaggaatggcttgtctggctccggttccacaagaagaagtggcagctgcaggcccggcagcgcctcgcccgcaggaagaggcagcgtctggagtcggcagagggtgtgctcaggcccggggccatccgggatggtcctgccacggggctggggagcttcttgc

SEQ ID NO: 13449 - DNA, 1501 bp, Homo sapiens
gtggttgttctccgggaccaggcaacacatacagagatggtcattgagtcacagtttgtagttttgaaaaagtaggcgcttgtcattcttcatttgcaaagtcatgggtaggtaggctgatgtgtttatatgataaatcatttcacatcagttacaatgaacgaaccatatgtgcatgtttcacccggtgtcagtctcaaaaatacatggctgaataaagaaacaagttgcagggacaggcatgtggctcacgcctgtaatctcaacactttggaaggctgaggtgggtggatcacttgaggtcaggagttcgagaccagcctggccaacatggtgaaaccccatctttactaaaaatacaacaaaaaattagccgggcttggtggcaggtgcctgtaatcctagcttcttgggaggctgaggcagaattgcttgaacccaggaggcgaggttgcagtgagatgagatcgtgccattgcgctccagcctggacaacagagtgagattctgtctcaaaaaaaaaaaaaaaaaaaaaggaaacaagttgcagtcagatgtgtcccacatgttactatttaggttaaaacttacagctgtggcatgtgtctgtggacatgtggtaaaaatttaaaggtgtgtgggggcagacagaagagggctgtacccattatttgcaatattttctttcttacaaaaagcattctggagcaaacatggcaaaatgcaaagatttacttattggtggtattgagtgacgttttatttttcggtttgatcttttcactttttttttgaaagagggtctcaccctctcgcccaggctggaatgcagtggcgcaaccttggctcactgcaacccctacctcctaggctcaagtgatccttccacctcagcctcccaagtagctgggaccacaggcccacacaaccacacccagctaatttttctattttttgtagagacggagtttcaccatgttggccaggctagtctcaaactcctgggctcaagtgatccgcccacctcagcctctcaaagtgctgggatgacaggcgtgagccaccacacccggccttcactattaaaggttcaataaacttgtgtaaacgaacatcccatttcaggtcacgatggccgaggcctcagaagacagtccgaggccaagtgctcctgacatggaggacttcggcctcgtaaagctgcctcacccagcagcccctgtcactgtgaagaggaagcgagttctttgggagagccaggaggagtcccaggacctcacgccgactgtgccctggcaggaaatcttggggcagcctcccgccctgggaaccagccaggaggaatggcttgtctggctccggttccacaagaagaagtggcagctgcaggcccggcagcgcctcgcccgcaggaagaggcagcgtctggagtcggcagagggtgtgctcaggcccggggccatccgggatggtcctgccacggggctggggagcttcttgc

SEQ ID NO: 13450 - DNA, 8003 bp, Homo sapiens
agtgccagacaggtcccagacccctccctcagcatccttatacttccaggaatgatcaccttctctcaggattatgtcgcaaatgagctcactcagagcttcttcaccatcactcagaagattcagaagaaagtcacaggctctcggaactccactgagctctcagagatgtttcctgtcctccccggttcccacttgctgctcaataaccctgccctggagttcatcaaatacgtgtgcaaggtgagagtgccagcgtgcgtgtgaggagaggacactaacgtacatgtgtaaggcgagaatgttactgtgtgcaaggtgaggctgtaatgcgtgcaccatgaacgtgctagcgtatgtgtgcaagataaggacaccgacatacctgtgcatggtaaggatgttaatgaatgcaggatgaggctttcagctgtgcaagggggaggtacctacatgtgtagggtcagggtgccagcgtgtgcaaggtgaggagcaggtgtaagttacttgttcattccaccaacatttatcatgtccctgtcacatgcagccacagttgcggcatctgtgctcaggtgtgagcaagacaggaaaggtcctgccttgtggggcctgtctgctgccagccgacccgagaagggagagggccgttcagaggcgcaggtgctgtggggatggagcctgtgaggggcgctgggaccaggtgcaggaggagggaagacgcaaaggccctggggggtgagcttggtgtgttggtgaaggcacagccgaacacccagtgccaccggctgggaggatgggtcaccggagaccagtaggctggaccaggacccagagctgatgagatgagagcttgctcggatgctgaggcctttctgggaaaggcaggctgagtccaaggagggataatattaccagataacgaccgcgggtgtcagcccttacagagcagagtgcttcactgtccatttcctcactcagccttcccagcaaactgcatctcacacacggctaaggttacgctggagatcaggtgacagcctcaaggtctggttgtggtgaagaagtgtttttagctcaccattttaattcctttattgacttttacatattttaaattcatttttattaaggtgtaatttatatacagtaaaatgtactctgtggcgtgcagttctgtgatttttcctaggtgaatggaattgcatcatcatcagcaggatacaggatagtcaccgcccgaaaacattccccgcactgccctcctcacctgacaccctttagccactggtgtgtcttccgtccctgcattttttttctcttctagagcgtcacataagtagagacattgtgcagccttttggatgtggcttcttagcaaaacacacctggaattggttcatccacgcgctcgtgtgtatcagaactccctttctgttgcgagcagtgtccattgtgtgggcaaaccacagcttgcttttcattcactggtggaaggacatttgcgttgctttcactttggggtgattaataacaaagctgctgtaaacattctgtaggtgtaggtttttgtgtgaacataaatttcaattctctgaggtcattttttaagtgtttgtttaacttgataagaaactgccaaactcttttctgaagtggctgcaccgtgtcagggtctcctcagcagtgtgtggcaagagttgctgttccacatcctcaccaggacttggtatcattgggtttttaaattgcagctattccagtaggtgtgtagtggtatcgcattgtgtttctgatttgcatttccctggcgactaatgatgtggagcttttttttggagatggagattcactctcattgcccaggctggggtgcagtggcgcgatctcagctcactgcaacctctgcctcctggttagctgggattacaggtgcctgccaccacgcccccccaattttttgtatttttagtggagacggagtttcaccatgttggccaggctggtctcgaactcctgacctcaagtgatccacctgcttcggcctcccaaagtgctgggattacaggcgtgagccaccacgcctggctgtggggcattttttaatgggcttctttgctgtcctggtgtctgtcctctttggtgaagttttaggttttatccatttgagttaatttttatacaatgtgcatgctgtagatccaagtccatatttctgcatgggatatctgattgcaggcatatcctgtcttattgtgcttcgaagcggttacctgtatttttataaatggaaggtttgtgggaatcttgtcttgagcaagtctcatctttccaacagcatgtgctcactgtgtctgtgtcacatgttggtaactctcaggatatttcagacttttccactattattatatcagccgtgataacctttgatgcttctatggcaattgttttggggcgccatgaaccgtgcgcatagaagacaatgagcttcatcaatgttgtgtgtgtcctgattgctccactcacgggccattctgccatctcgccctttctccttgggcctccccagtcccggtgacacaacactatagaaattaggtaagttaatagccctgcaatggcctctacgtgttcaagtgaaaggaagagtcacacgtctctcactttacataaagagctagaaatggctaaacttaggaaggcatgttgaaagtcgagacaggctgaaagctaggcctctcacaccagttagccaagtcaactgcaaaggaaaggttcttgaaggaaattacaagtgctcctccagtgaacacatgaaagataaagaagtgaagcatcctgttgctgatatggagaaagttgagtctggatagatcaaaccagatataacatcccctcaagccagagcctaatccagagcaaggctctcactctgttcagttccatgaaggctgagagctgaggaggctgtagaaggaaagcttgaagctggcggaggttggttcatggggtttagggagagaagccgtcccagtaacataaaagggcaaatgaggcaacaggtgcgggtggagaggctgcagcgagttctccagaagatctgtctgggatcattggcgaaggtggctacactgacaacatattttccgtgtagacaaaacagccttcttttggaagaagatgccatctaggactttcatagctagagaggaggcctcagagcctggcttcagaggaaaggctgactcttgttagcggcagatgcagctggtgactttaagtcgaagccactgctcattcagtcttttaaggccactacctgcagctcagaaaaagattccttccaaaatagtactgctcattgacagtggacctggtcacccaagagctctgatggagacgtacaaggagatgaatgttgctttcatgcctgcggacacagcatcccttctgcagcccatggatcaaggagcaatttcgactttcaacgtttattatttaaaaatatatttcatgaggctatagctgccatagatagtgattcccctgatggaactgggcacagtaaattgaaaaccttctagaaaggattcaccattctggatgccattaagaacatttgtgactcatgggagaaggggtcaaaatatcaacattaacaggagtgtggaagaagttgattctgaccctcatggatgactttgagggattcaagactattgtgggaggcgtgactgcagatgtggtggaaacagcaagggaactagaattagaagtggagcctgaagatgtgaccaagttgctgcaatctcaggacaaaatttaacagataaagagtggcttttcatggatgagcagtaaagtagttttttgttttgttttgttttgttttgttttgttttgttttgttttgagatggagcctccttgctctgtcgcccaggctggaatacagtggtgcggtcttggctcgctgcaacctccgcctcctgggttcaagtgattttcctacatcagcctcccaagtagctgggattacaggtgcccgccacaatgctcagctaatttttgtatttttaatagagacagagtttcaccatattggtcaggctggtctcaaactcctgacctcaggtgatccacccgccttggcctcccaaagtgctgggattacaggcacaagccaccacgcccagcccaaaaaagtagttttttttttaagatggagtctcgcactctcgcccaggctggagtgcagtggcgcgatcttggctcactgcaagctccctcccaggttcacgccattctcctgcctcagcctcccgagtagctgggactacaggcaagcgccaccacacctggctaattttcgtatttttagtagagacagggtttcaccatgttagccaggatggtctcgatctcctgaccttgtgatctgcccacctcggcctcccaaagtgctgggattacaggcgtgagccaccgcacctggccaaaaagtagtttcttgagatgaaagtgaacattgtggaaatgacaaaggattgagaatattccataaacttagttgccaaagcagcagcagaatttgagaggaccgactccaattttgaaagaagttctactgtgggtgaaatgttatcaaacagcatcacatgctacagagtctttcatggaaggaagagtcagttgatgcagcaaacttcattgttgtcttgttttaagaaattgccacagccaccccaactctcagcaataccaccctgatcagtcagcagccgtttacattgaggcaagaccctccaccagcaaaacgattgcgactcactgaaggctcagatgatcgttaatatttctgagcaataaaacattttaaaattaaggtacatacattgttttttagacataatgctgttatgcacttaatagactacagtatagggtaaacctaagttttgtctgggtagagtgactcacacctgtaatcccagcactttgggaggtcagggtgggttgactgtttgagcccagcagttcaagaccagcctgggcaacatggcaaaacccatctttacaacgattacaaacattacctgggcatggtggcgcatgcctgtcgtcccagctactgggaaggctgaggtagaaggatcaattgagccccaagaggtcaatgctgcagtgagccatgattgtgccactgcagtccattctgggtgacagagtgaaatcctgtcccaaaataaaaaaaatcacatagctttttttttttttgagatggagtctcactctgtcactcaggctggagtgcagtggtgcaatcttggctaactgcaacctccacctcctgggttcaagcgattccctgcttcagcctcccaggtagctgggatcacaggtgcacccgccaccatgcccagccaatttttgtatttttaatagaaatggggtttcactgtgttggccaggatggtcttgaactcctgacctcaggccatccacctgccttggcctaccaaagtgctgggattacaggcgtgagccaccacaaatcacgtaacttttatatgtactgagaaaacaagcgtgagccaaaaatcatgtaacttttatatgcactgagaaaccaaataatttgtgtgatttgctttattgtgatgttagtccattgaggtggtttgaaaccgaacttgccatatctccaagatacgcttgtattcaagaaccatttgttgaaaagactattctttttctatcgaatcatctttgtacctttttccataacttagtaaccttatctatgtgagtctctttctggattatgtattctttttttcgatcttgcattcaatttgctaatatctcgttgcgcatttttgtgtctgtgctcaggctgttattggtctgtagtttcttagtacggtctttggttctagtatcaggggatgctggcctcatagaatgggttgagtgctctctctcttcagtgttttgaaagatactgtgtagaatcagcagcatttcttccttaaatgtttagtaaattccccagggaagcctgtcctcaccgatggaaaactgctaatgtagagaagtcagctgaggcgtctaaagggactaaggaagggaggaaaggacaccaggaaactgtagcctaaggtccagagggttctggtccagacagagcagcagggaggccccgggagctccttcccgatgtgggctgtggtctctgcaggtgctgtccctggacaccaacatcacaaaccaggtgaataagctgaaccgagacctgcttcgcctggtggatgtcggcgagttctccgaggaggcccagttccgagacccctgccgctcctacgtgcttcctgaggtcatctgccgcagctgtaacttctgccgcgacctggacctgtgtaaagactcttccttctcagaggtgcggctgagctccagcgggcccttcactgtggagcagaacatccgagggcactgcggtgtcttgagggcttctgcagctccagctctgtgggtcacacctgctgcccctctgactcacatggattggcaacaggccccttcccaggcctccccacaccatgttcggaatgttgtcctaggaagggctcaagtgcaggtgggaggccagagtgcgtgcagctgcactcaggagactcgcccgtcaccaggcgcttctcacagccccttcctctcctgagatcctgcccatggcactgtggtctggaggctgggctggtgacctctcgcactcttgctctgcctaggatggggcggtcctgcctcagtggctctgctccaactgtcaggcgccctacgactcctctgccatcgagatgacgctggtggaagttctacagaagaagctgatggccttcaccctgcaggacctggtgagtcgtgcatgccgcctgcccgtgtgccctggagtccacaggggggtttctgtgcactcccgggagccggggtgtgtgcaggtcctgaggcacgccctggtgtcttccaaggggcctgccctgcagaccagtccatgccctgagcctgatggactgttctgtccacactggttgagcacctgccttgggtcaagagctggccttgtgggtgcttcgttctagcggaaggaggcagacactcccaagtgtgaagagaaggaaaggaggaagagggagttgcacagctcggccacaggaaggtcttgccgaggggcatctgagcagaggctgggggacgcgccaagctgccgtgtggtggtgcacggcgttcaggcctgcaggatggagggagtgagcagggcctggaggaggcctcaggactgggcatctggggtggaacatccacagcgagggtgggtgtagggaaggcgctggcaccgtgggatgaggtcgtgcattttactcataaccgagggctggctgcacacagcaggggctcgaggcttactgatgggcccacgaatgtgtctcgcgagcctgtgaagaagcagcaggcaggtctggccagcgcgggagggctggcgcccatcggggctgctccctttcaggtctgcctgaagtgccgcggggtgaaggagaccagcatgcctgtgtactgcagctgcgcgggagacttcgccctcaccatccacacccaggtgggctctccctcatctgcctcggctcagcctggcctccttggcctcctctctgagtggactggggtctcactgtgcctgtttattcctgcaggtcttcatggaacagatcggaatattccggaacattgcccagcactacggcatgtcgtacctcctggagaccctggagtggctgctgcagaagaacccacagctgggccattagccagccccgggccccgggtgcctctgcgtccgtgccaggcctcctgatgccaaggccacatccccgtgcttccagtgaccagaccactgaccaccctgactgtccaaacctgtgaccccaggccagggaacggggaggaaac

SEQ ID NO: 13451 - DNA, 1660 bp, Homo sapiens
agtgccagacaggtcccagacccctccctcagcatccttatacttccaggaatgatcaccttctctcaggattatgtcgcaaatgagctcactcagagcttcttcaccatcactcagaagattcagaagaaagtcacaggctctcggaactccactgagctctcagagatgtttcctgtcctccccggttcccacttgctgctcaataaccctgccctggagttcatcaaatacgtgtgcaaggtgctgtccctggacaccaacatcacaaaccaggtgaataagctgaaccgagacctgcttcgcctggtggatgtcggcgagttctccgaggaggcccagttccgagacccctgccgctcctacgtgcttcctgaggtcatctgccgcagctgtaacttctgccgcgacctggacctgtgtaaagactcttccttctcagaggatggggcggtcctgcctcagtggctctgctccaactgtcaggcgccctacgactcctctgccatcgagatgacgctggtggaagttctacagaagaagctgatggccttcaccctgcaggacctggtgagtcgtgcatgccgcctgcccgtgtgccctggagtccacaggggggtttctgtgcactcccgggagccggggtgtgtgcaggtcctgaggcacgccctggtgtcttccaaggggcctgccctgcagaccagtccatgccctgagcctgatggactgttctgtccacactggttgagcacctgccttgggtcaagagctggccttgtgggtgcttcgttctagcggaaggaggcagacactcccaagtgtgaagagaaggaaaggaggaagagggagttgcacagctcggccacaggaaggtcttgccgaggggcatctgagcagaggctgggggacgcgccaagctgccgtgtggtggtgcacggcgttcaggcctgcaggatggagggagtgagcagggcctggaggaggcctcaggactgggcatctggggtggaacatccacagcgagggtgggtgtagggaaggcgctggcaccgtgggatgaggtcgtgcattttactcataaccgagggctggctgcacacagcaggggctcgaggcttactgatgggcccacgaatgtgtctcgcgagcctgtgaagaagcagcaggcaggtctggccagcgcgggagggctggcgcccatcggggctgctccctttcaggtctgcctgaagtgccgcggggtgaaggagaccagcatgcctgtgtactgcagctgcgcgggagacttcgccctcaccatccacacccaggtgggctctccctcatctgcctcggctcagcctggcctccttggcctcctctctgagtggactggggtctcactgtgcctgtttattcctgcaggtcttcatggaacagatcggaatattccggaacattgcccagcactacggcatgtcgtacctcctggagaccctggagtggctgctgcagaagaacccacagctgggccattagccagccccgggccccgggtgcctctgcgtccgtgccaggcctcctgatgccaaggccacatccccgtgcttccagtgaccagaccactgaccaccctgactgtccaaacctgtgaccccaggccagggaacggggaggaaac

SEQ ID NO: 13452 - DNA, 6800 bp, Homo sapiens
agccaacggctccatgtctctgaggagcggcgggcggcggcgcgcggacccaggcgcggatggcgaggccagcagggatgatggcgccacttcctcagtttcggcactcaagcgcctggaacggagtcagtggacggataagatggatttgcggtttggttttgagcggctgaaggagcctggtgagaagacaggctggctcattaacatgcatcctgtggctttgccctataaaccgtatttctacattgcgaccagaaagggttgtgagcgagaagtttcatcttttctctccaagaagtttcagggcaaaattgcaaaagtggagactgtccccaaagaggatctggacttgccaaatcacttggtgggtttgaagcgaaattacatcaggctgtccttccacactgtggaggatcttgtcaaagtgaggaaggagatctcccctgccgtgaagaagaacagggagcaggatcacgccagcgacgcgtacacagctctgctttccagtgttctgcagaggggcggtgtcattactgatgaagaggaaacctctaagaagatagctgaccagttggacaacattgtggacatgcgcgagtacgatgttccctaccacatccgcctctccattgacctgaagatccacgtggctcattggtacaatgtcagataccgaggaaatgcttttccggtagaaatcacccgccgagatgaccttgttgaacgacctgaccctgtggttttggcatttgacattgagacgaccaaactgcccctcaagtttcctgatgctgagacagaccagattatgatgatttcctacatgatcgatggccagggctacctcatcaccaacagggagattgtttcagaagatattgaagattttgagttcacccccaagccagaatatgaaggccccttttgtgtcttcaatgaacccgatgaggctcatctgatccaaaggtggtttgaacacgtccaggagaccaaacccaccatcatggtcacctacaacggggacttttttgactggccatttgtggaggcccgggcagcagtccacggtctgagcatgcagcaggagataggcttccagaaggacagccagggggagtacaaggcgccccagtgcatccacatggactgcctcaggtgggtgaagagggacagttaccttcctgtgggcagtcataatctcaaggcggccgccaaggccaagctaggctatgatcccgtggagctagacccggaggacatgtgccggatggccacggagcagccccagactctggccacgtattctgtgtcagatgctgtcgccacttactacctgtacatgaagtacgtccacccattcatctttgctctgtgcaccattattcccatggagcccgacgaggtgctgcggaagggctctggcactctgtgtgaggccttgctgatggtgcaggccttccacgccaacatcatcttccccaacaagcaagagcaggagttcaataagctgacggacgacggacacgtgctggactctgagacctacgtcgggggccacgtggaggccctcgagtctggggttttccgcagcgatatcccttgccggtttaggatgaatcctgccgcctttgacttcctgctgcagcgggttgagaagaccttgcgccacgcccttgaggaagaggagaaagtgcctgtggagcaagtcaccaactttgaagaggtgtgtgatgagattaagagcaagcttgcctccctgaaggacgttcccagccgcatcgagtgtccactcatctaccacctggacgtgggggccatgtaccccaacatcatcctgaccaaccgcctgcagccctctgccatggtggacgaagccacctgtgctgcctgtgacttcaataagcctggagcaaactgccagcggaagatggcctggcagtggaggggcgagttcatgccagccagtcgcagcgaataccatcggatccagcaccagctggagtcagagaagttcccccccttgttcccagaggggccagctcgggcctttcatgaactgtcccgcgaggaacaggcgaaatacgagaagagaaggctggcggattactgccggaaagcctacaagaagatccacatcaccaaggtggaagagcgtctcaccaccatctgccagcgggaaaactccttctacgtggacaccgtgcgtgccttccgggacaggcgttacgagttcaaagggctccacaaggtgtggaaaaagaagctctcggcggccgtggaggtgggcgacgcggctgaggtgaagcgctgcaagaacatggaggtgctgtatgactcgctgcagctggcccacaagtgcatcctgaactccttctatggctatgtcatgcgcaagggggctcgctggtactccatggagatggctggcatcgtctgcttcacaggggccaacatcatcacccaggcacgggagctgatcgagcagattgggaggcccttagagctggacacagatggtatatggtgcgtcctgcccaacagcttcccagaaaattttgtcttcaagacgaccaatgtgaagaagcccaaagtgaccatctcctacccaggcgccatgttgaacatcatggtcaaggaaggcttcaccaatgaccagtaccaggagctggctgagccgtcctcactcacctacgtcacccgctcagagaacagcatcttttttgaggttgatgggccctaccttgccatgattcttccagcctccaaggaagaaggcaagaaattgaagaagaggtatgctgtgttcaatgaagacggttctctggctgagctcaagggctttgaggtcaaacgccgcggggaactgcagctgattaagatcttccaatcctcggtgtttgaggccttcctcaagggcagcacgctggaagaggtgtatggctctgtagccaaggtggctgactactggctggacgtgctgtacagcaaggcagccaacatgcctgactctgagctattcgagctcatctctgagaaccgttccatgtctcggaagctggaagattacggggagcagaagtctacgtccatcagcacagcaaagcgcctggccgagttcctgggagaccagatggtcaaggatgcagggctgagttgccgctacatcatctcccgcaagcccgagggctcccctgtcacggagagggccatcccacttgccattttccaagcagagcccacggtgaggaagcactttctccggaaatggctcaagagctcttcccttcaagactttgatattcgagcaattctggattgggactactacattgagcggctgggaagcgccatccagaagatcatcaccatccctgcggccctgcagcaggtaaagaacccagtgccacgtgtcaaacaccccgactggctgcacaaaaaactgctggagaagaatgatgtctacaagcagaagaagatcagtgagctcttcaccctggagggcaggagacaggtcacgatggccgaggcctcagaagacagtccgaggccaagtgctcctgacatggaggacttcggcctcgtaaagctgcctcacccagcagcccctgtcactgtgaagaggaagcgagttctttgggagagccaggaggagtcccaggacctcacgccgactgtgccctggcaggaaatcttggggcagcctcccgccctgggaaccagccaggaggaatggcttgtctggctccggttccacaagaagaagtggcagctgcaggcccggcagcgcctcgcccgcaggaagaggcagcgtctggagtcggcagagggtgtgctcaggcccggggccatccgggatggtcctgccacggggctggggagcttcttgcgaagaactgcccgcagcatcctggaccttccgtggcagattgtgcagatcagcgagaccagccaggccggcctgttcaggctgtgggcgctcgttggcagtgacttgcactgcatcaggctgagcatcccccgtgtgttctacgtgaaccagcgagtcgctaaagcggaggagggtgcttcgtatcgcaaggtaaatcgggtccttcctcgctccaacatggtctacaatctctatgagtattcagtgccagaggacatgtaccaggaacacatcaacgagatcaacgctgagctgtcagcgccagacatcgagggcgtatatgagactcaggttccgttactgttccgggccctggtgcacctgggctgtgtgtgtgtggtcaataaacagctggtgaggcacctttcaggctgggaagcagagacctttgctcttgagcacctggagatgcgctctctggcccagttcagctacctggaaccagggagtatccgccatatctacctgtaccaccacgcacaggcccacaaagcgctcttcgggatcttcatcccctcacagcgcagggcatccgtctttgtgctggacactgtgcgcagcaaccagatgcccagccttggcgccctgtactcagcagagcacggcctcctcctggagaaggtgggccctgagctcctgccaccccccaaacacaccttcgaagttcgggcagaaactgacctgaagaccatctgcagagccatccagcgattcctgctcgcctacaaggaggagcgccgggggcccacactcatcgctgttcagtccagctgggagctgaagaggctggccagtgaaattcctgtcttggaggaattcccactggtgcctatctgtgtggctgacaagatcaactatggggtcctggactggcagcgccatggagcccggcgcatgatccgtcactacctcaacctggacacctgcctgtcgcaggccttcgagatgagcaggtactttcacattcccattgggaacctaccagaggacatctccacattcggctccgacctcttctttgcccgccacctccagcgccacaaccacctgctctggctgtcccctacagcccgccctgacctgggtggaaaggaggctgatgacaactgtcttgtcatggagttcgatgaccaagccactgttgagatcaacagttcaggctgttactccacagtgtgtgtggagctggaccttcagaacctggccgtcaacaccattctccagtctcaccatgtcaacgacatggagggggccgacagcatggggatcagcttcgacgtgatccagcaggcctccctggaggacatgatcacgggtggtcaggctgccagtgccccggccagctacgatgagacagccctgtgctctaacaccttcaggatcctgaagagcatggtcgtgggctgggtgaaggagatcacccagtaccacaacatctatgcagacaaccaggtgatgcacttctaccgctggcttcggtcgccatcctctctgcttcatgaccctgccctgcaccgcacactccacaacatgatgaagaagctcttcctgcagctcatcgctgagttcaagcgcctggggtcatcagtcatctacgccaacttcaaccgcatcatcctctgtacaaagaagcgccgtgtggaagatgccatcgcttacgtggagtacatcaccagcagcatccattcaaaggagaccttccattctctgacaatttctttctctcgatgctgggaatttcttctctggatggatccatctaactatggcggaatcaaaggaaaagtttcatctcgtattcactgtggactgcaagactcccagaaagcagggggagcagaggatgagcaggaaaatgaggacgatgaggaggaaagagatggggaggaggaggaagaggcggaggaatccaacgtggaggatttactggaaaacaactggaacattttgcagtttttgccacaggcagcctcctgccagaactacttcctcatgattgtttcagcgtacatcgtggccgtgtaccactgcatgaaggacgggctgaggcgcagtgctccagggagcacccccgtgaggaggaggggggccagccagctctcccaggaggccgagggggcggtcggagcccttcccggaatgatcaccttctctcaggattatgtcgcaaatgagctcactcagagcttcttcaccatcactcagaagattcagaagaaagtcacaggctctcggaactccactgagctctcagagatgtttcctgtcctccccggttcccacttgctgctcaataaccctgccctggagttcatcaaatacgtgtgcaaggtgctgtccctggacaccaacatcacaaaccaggtgaataagctgaaccgagacctgcttcgcctggtggatgtcggcgagttctccgaggaggcccagttccgagacccctgccgctcctacgtgcttcctgaggtcatctgccgcagctgtaacttctgccgcgacctggacctgtgtaaagactcttccttctcagaggatggggcggtcctgcctcagtggctctgctccaactgtcaggcgccctacgactcctctgccatcgagatgacgctggtggaagttctacagaagaagctgatggccttcaccctgcaggacctggtctgcctgaagtgccgcggggtgaaggagaccagcatgcctgtgtactgcagctgcgcgggagacttcgccctcaccatccacacccaggtcttcatggaacagatcggaatattccggaacattgcccagcactacggcatgtcgtacctcctggagaccctggagtggctgctgcagaagaacccacagctgggccattagccagccc

SEQ ID NO: 13453 - DNA, 3872 bp, Homo sapiens
tctggtccccatactacagcagcatctgccccactgttagtatttgttgagtgaataatgagttagtccaggaatgggagcaaccaagccgttccgacctccagctgtaccctcccctttcgagtgggaatccacacacagagcgtctcttctcaggaagcttaaagcactttcacattgctgtggacttctttgtagtgagaatctctaggcagagtgtgtgggcagggtgggaacgccatttcttggctttgcagcctctgacttgtgctgattgctaatgaacttggctagggctacctcatcaccaacagggagattgtttcagaagatattgaagattttgagttcacccccaagccagaatatgaaggccccttttgtgtcttcaatgaacccgatgaggtaaggaggtatcacttgggaaactacccggtattgtgggaagaacggacatgtggatctttccaaggcctcaggcattccgtcagatcagaattgcagctccatgagctttgttctcagggtatgaccgtcttttctgccagagacgggcggaggggcggggcaggaataagggccaacatgaggctgctgcttctgaactttgggagaggaatttggaatagcttgaagaagagaaagagcagacctctgactgctgtgacttgggttcaggctcatctgatccaaaggtggtttgaacacgtccaggagaccaaacccaccatcatggtcacctacaacggggacttttttgactggtgagtctgtgtcttctctatgagtaactgggcagcatttgagagggagggcgttgcgtggtgcaggggcgcttcccatgtcgacttaggaggtggctcctgggttcactctgcacctcccgtgtctgggttcctccctgggtctgagggaggaatggagaaaggggcattagagcctgacctgcccacttgcttgtctgtcctctttccaacccaggccatttgtggaggcccgggcagcagtccacggtctgagcatgcagcaggagataggcttccagaaggacagccagggggagtacaaggcgccccagtgcatccacatggactgcctcaggtaggggccacagagcagcatggctcctcactgctgtccgtgagcgagatctgaaggcctcttgcagactgtgctgtcaccacatctcatgggaggagggtggcctccgagaggccgtttcaggtcacccaagagtatggcagctgcaaccctgccagggcccgggatgtgctgtctttgactgttgactgacaattcatcagtgaccaggcacattgagcatcagcctctggggtggggaagccgctggaaagacgcactcagctgacaggtcccagacctaggacctcatggagctgctctgcccaggcaaggttgggatgtggcagcccggctgcctcacaggacaagcctcacgggacaaccacagattccatatgagctagggtgggaggcagctcagagcttcggagagtcacggcgttcgggggctctgacatgactggttgggaagacaggtggatgtggaaatgccaacagaaggaggctggaagggaaggaagggaagggagggaggaaaggagggaagggaaggaagggaagggagggagggaaggaagggaagggagggagggaaggaagggaatggaggggcctccacggcctctgtattctgcacagtgccactggggtgcttgcagcctgaatgcgtttctgtttagctctgatgctcagcacttggcttggagagggaggccaggaggctggggccggtttagcgtgtgacggtgtgacagtcctgatccaaggcagggagtgagggttgtgaggattcaggatctgtcatgtggggcagggggaggcccagggatgctggttcttagggaggggttggcacctggggtttttgtgccatccgtggagacagggaatgggtagagaaggggcttgaggcaggaggtgaccctgctaccgatatgctagcctggaagccccacccatatgggggccctgaagaccaccatgaggcttggtttgggctcgcactgtagattgggactcactgggttgcgggtgggtcttggtgaaagctggggtagtggatgaactgaaggcaagaggtaaagtgagagaagaaggccacagggtggaggctgcggggggtggagaccggacatgacccctggacagctgctccagggaatgcgtctgtagggaggaggtagagacaggttccgggtagagtgtggggggccttcttttcttaatttttattttttatttattttttaaatttttattcttcttggcatctgatcacatcttgccttctattaaaggagggtgggcttgagtgtttccgtgctgaagggacagtgtgaggagagaagatcagtgtggttgatagaactaggccccaggggtgcagacctgaggtctggggagaggcccaaggaggtggggcgcccgtcggagaggccacaaactctgctgaggatgggaggaaggcgagggccggaaggaccagtcctggtgcttccttgtgttgtggataggtctgtgagattaactagatcctgatgaagggttttcacaaggtgtctacaccatgtggggccttggtgtgaggctcctgggtgcctgttaggaacttgcatctgtctgtgtggtgcccagttttgccagttctcaggggttcccgggctgcatgttagaatcatcctggcttctgttctcattctccttccaggtgggtgaagagggacagttaccttcctgtgggcagtcataatctcaaggcggccgccaaggccaagctaggctatgatcccgtggagctagacccggaggacatgtgccggatggccacggagcagccccaggcacgtaagccacatcccggctgcccctgctgccgtgtgcacgcatccagatggccacggagcagccccaggcatgtgagccacatcccggctccccctgctgccgtgtgcacgcatgtatgccagcccgctccacccagcaggctgtgtctccgggacacacgtgttttgtcctgtgccggtctccttactgtgtgtgcggcaggctggtcaggccaggctttgctttctgtgcttcacacttgaccctgggctcttgatttttgatggccctgctctctggcgttctctcctcagactctggccacgtattctgtgtcagatgctgtcgccacttactacctgtacatgaagtacgtccacccattcatctttgctctgtgcaccattattcccatggagcccgacgaggtgagcattatctgtcctgtcggcaccctggcctcctcagcccttgccccattccaaatgcactggagctgaatggaggtggatgtcccaggagtgctggcaccagaggcggcagtagaattctggtgtgtgacgtcagggatgtcctttgggaattctctggccctggtgtgaggaagaaaccacaggaggcagaatttgcagccatttaccacgaggttttctctcctttcacactgaagttcagcttaggttcctggactttgcctgcaagtcagggcctttggtgttgcttttggctggaagccttggtttctcttgcaggtgctgcggaagggctctggcactctgtgtgaggccttgctgatggtgcaggccttccacgccaacatcatcttccccaacaagcaagagcaggagttcaataagctgacggacgacggacacgtgctggactctgagacctacgtcgggggccacgtggaggccctcgagtctggggttttccgcagcgatatcccttgccggtttaggatg

SEQ ID NO: 13454 - DNA, 1561 bp, Homo sapiens
tctggtccccatactacagcagcatctgccccactgttagtatttgttgagtgaataatgagttagtccaggaatgggagcaaccaagccgttccgacctccagctgtaccctcccctttcgagtgggaatccacacacagagcgtctcttctcaggaagcttaaagcactttcacattgctgtggacttctttgtagtgagaatctctaggcagagtgtgtgggcagggtgggaacgccatttcttggctttgcagcctctgacttgtgctgattgctaatgaacttggctagggctacctcatcaccaacagggagattgtttcagaagatattgaagattttgagttcacccccaagccagaatatgaaggccccttttgtgtcttcaatgaacccgatgaggtaaggaggtatcacttgggaaactacccggtattgtgggaagaacggacatgtggatctttccaaggcctcaggcattccgtcagatcagaattgcagctccatgagctttgttctcagggtatgaccgtcttttctgccagagacgggcggaggggcggggcaggaataagggccaacatgaggctgctgcttctgaactttgggagaggaatttggaatagcttgaagaagagaaagagcagacctctgactgctgtgacttgggttcaggctcatctgatccaaaggtggtttgaacacgtccaggagaccaaacccaccatcatggtcacctacaacggggacttttttgactggtgagtctgtgtcttctctatgagtaactgggcagcatttgagagggagggcgttgcgtggtgcaggggcgcttcccatgtcgacttaggaggtggctcctgggttcactctgcacctcccgtgtctgggttcctccctgggtctgagggaggaatggagaaaggggcattagagcctgacctgcccacttgcttgtctgtcctctttccaacccaggccatttgtggaggcccgggcagcagtccacggtctgagcatgcagcaggagataggcttccagaaggacagccagggggagtacaaggcgccccagtgcatccacatggactgcctcaggtgggtgaagagggacagttaccttcctgtgggcagtcataatctcaaggcggccgccaaggccaagctaggctatgatcccgtggagctagacccggaggacatgtgccggatggccacggagcagccccagactctggccacgtattctgtgtcagatgctgtcgccacttactacctgtacatgaagtacgtccacccattcatctttgctctgtgcaccattattcccatggagcccgacgaggtgctgcggaagggctctggcactctgtgtgaggccttgctgatggtgcaggccttccacgccaacatcatcttccccaacaagcaagagcaggagttcaataagctgacggacgacggacacgtgctggactctgagacctacgtcgggggccacgtggaggccctcgagtctggggttttccgcagcgatatcccttgccggtttaggatg

SEQ ID NO: 13455 - DNA, 11593 bp, Homo sapiens
aggggaccccgtgcttcctgggctcctggagaccaaggtgaccgaagaacacagggccagtcctaatgaaatcccaagacctcctgagcacaattacccccttggagttcccctcaacttctgcatccagggacacaactctgagggaaacgtttttctaaatagcgtgataagcctggcatggtgatgcgtgcctgtggtcccagctacttgggaggatcacttgagaccaggaagtagaggccacagtgagccgtgactgcaccactgcactccagcctgggatatttgtttatttctatgttactttgtattttttatatttttcaggctacataacattttgacagtttacataccttaatttacgtaactagcccacgattatttactaccagataggtttcacatttccattgttatcaatggtgttgcattgaacgagatatctcggtgcatatgtttcccaggcacaggcgtcttgggtagaaggaatactggaacactctgcagtgctttcctggcttgctttgctgtgtgggcttctgtttcttggcatattgtcttgtatagagtgaaacacacgagcaagggagcaccagggtatcacacagaatattcatgagcccagcactccttacaggatgtggggggcctgtggtcaggaacatgtgtgcaaagcacagctccagctggatgtgggtgccacactggaactgctcaggcctccactgctcaggccactctccagccggccggagtttctctttcctctcttctggctcttcctgccccttctttctcttcctttcaaggagaaaaacttcctgtcttaggccgagcaacatccttttctgcagccttggtgctcttcagtaaattcttcttgatattttgtgcacagtttaataaaataaaagccaagccaggcgtggtggctcacgcctgtaatcccagcacttgggaggcctcggcgggcagaccacttgaggtcaggagttggaaaccagcctggccaacatggcaaaaccctttctctactaaaaatacaaaaattagctggatgtgatggcatgtgcctgtaatctcagctacttgggaggctgaggcacgagaatctcttgaacccaggaggggaggttttagtgagttgagattgcaccactgcactccagcctgggtgacagaatgagactctgtctcaaaaaaaatataaaagctaaagttttgtgtgtgtgtgtatgttttaaagtattgccacacaggcatattagagagctcttgaaattgcagccttctgcgtctcaggctagagaagggcatggcctagaggagcacagtccagggtgagctcagactctgccccttgatttctgcagtgttttacccattgtctttctctaggcagccaacatgcctgactctgagctattcgagctcatctctgagaaccgttccatgtctcggaagctggaagattacggggagcagaagtctacgtccatcagcacagcaaagcgcctggccgagttcctgggagaccagatggtcaaggatgcagggctgagttgccgctacatcatctcccgcaagcccgagggctcccctgtcacggagaggtgagggctccccccatcacggagaggtgagggctcctcccatcacggacaggtgagggctccctccgtcacggagaggtgagggctcccctcatcacagagaggtgagggctgccctgtcacggagaggtaaggggttccttacagatttgggctgtgtttaacaccaagtttggggatggcataagtgtccatcaaccagaaatggataattgccattttgtagggaatgagatacactataccagagttcaaagggttgaattgcagctacaggttacaacactgacagtttgaaaccactttggagaaaaaagcaaaaatcaggttgaaggaagacccttatgcctccgtgtatgtaaaacttaaaaacatggaaactgctctttttttttttttttttttttttttttggtggttatatacaaataggaccagtacaaatgcctgcatggggttgatgaacaccagaataagggttgtctttacttctgtgtgaggagggaataggttggggtcacacagggcttcactctaatcgtctcacaaaggaagtcagagtggccaagtgttgaagcttgatggagccgagtggatcatagtgtgcgtgtcttctttaggtctccttatgtttgcagtattcaccacagatgtttcctccagtgaaagggaagcactgacggttgccagttgctttgctagtgacatgaaaacaggctcgttttttctagaaagcagcctgagtcttctgtgtgttactcagcaaggaacatgtagacatggttatgaacgtgcacgtttgcctgtatgcatgcacgtggttactcagaaacgcagacatgtttacgcacacacgcatgtctttgcctatacgcatgcgcgtggttactcagaaacgtagacatgtttacgcacgcatgcgtttatgtatgtgcatgcacatggttatgccgtgagaaacatgtagacatagttacgaacatgcacgtgtttgcctgtacgcatgcacgtggttactcaatgagaaacgcagacatgtctacgcacacgcatgtgtttatgtatatgcatgcccatggttacgctgtgaggaacatgtagacatgtttacgtgcacacacgcacgtgtttacacatacgcacgtgttactccccgaggaacctgtaggcatgtttgtgcatacatatgcacgcagatgtatacattgatgtttgtgaacagctgttacacgtccttatttccatgttcatttgataagagttaggatcagattttgggtgattttcactgttactgagctgtgtgcctgtcttccttacccagggccatcccacttgccattttccaagcagagcccacggtgaggaagcactttctccggaaatggctcaagagctcttcccttcaagactttgatattcgagcagtgagtgccagttgcgttctctactcttaaaagtttacaaggaaagctagacagagcagaatatgtctgagttggattatgttttttgtctggcgtcttcactcttgacttcctcctttctgataagtaataggtgagcacctaataaccttttagggcaaaactgaaaacatgaagtgcctggggccctttagctgttctattggatggactaaggccaggggtgttggctcagccacctactagctctgtgatctagaggagtcagtgaagctccctgccttggtgtcctctgttgtgcaatgggcacctttcatcatagagtttctgagaggattaaataagacacagtggttagccctgtgctcagcatgaagtgagccccactcttggctgctgccacctgctgttctctgtgcccgtttcctgcacatgcagattctggattgggactactacattgagcggctgggaagcgccatccagaagatcatcaccatccctgcggccctgcagcaggtaagggcggggtcagtggcacgggctgtggggctaaaaactgtgcagttagacaagggtctctctctgatgggtgttggcctcacacaggtaaagaacccagtgccacgtgtcaaacaccccgactggctgcacaaaaaactgctggagaagaatgatgtctacaagcagaagaagatcagtgagctcttcaccctggagggcaggagacaggtgacggtggggccccaaggctgggctgggcgggatccttgtgacacacaggactccaggcttcttgcgctgctgtgtgtgctgtagtgaagcttctgttcaagcatcgaaaatggactttttctgaaaatgtgcccattggcactttactctctaactctgagtgtcactcttttgttaataggacaccattgtgaggctgaggtgagggcaaggaactgtctccttatgtgaaaatattagggtgcactacttagactcagtgccttgggcaaatcactgtctcttgaagccccagttttctgaatgtgaaatgaatatcttccctatggaaacacttagaaacacaggacacagtgtaataaaaggtacagtgaaagtcagaagagcaaaaggaaaattcttaaatgctgaaaattaaaagtaagctataaatcagagcagtatacaaactcacatgacaagaacaaggttctttgaccaggtgcggtggctcacacctgtaatcccagcactttgggaggcctaggtgggcagaccacaaggtcaggagatggagacaatcctggctaacacagtgaaaccccatctctactaaaaatacaaaaaattagccaggcgtagtggtgggcgcctgtagtcctagctactcgggaggctgaggcaggagaacagcgtgaacccgggaggcggagcttgcagtgagccgagatcacgccactgcactcccctgggcgacagagcgagactccgtctcaaaaaaaaaaaaagaaaaaggttctgagatggattggattttaaaatttaactgtcttatttgtaagagttatatatgtattctttcccctgccccccaagacggagtcttgctctattgcccaggcaggagtgcagtggcacaatgcagcttctgcctcctgggtttggctcactgcagcttctgcctcctgggtttaagcagttctcctgcctcagcctctagtgtagctgggattataggcacacaccaccatgcctagctaatttttatttttttaatttttttctgcctcagcctctagtgtagctgggattataggcacgcaccaccatgcctagctaatttttatttttttaattttttttttaaatttttagtagagacggggtttcaccatgttggccaggctggtctcaaactcctgacctcaggtgaatgcacccgccttggcctcgcaaagtgctggaaatacagcactgcgcccagtggcttatgggccagtataacaatttcaagagttatattgaaaagataggacgcaggaaaagcaaaaggagtaaaaaatacgtataccaggtaaatgttaaccaaaagaaagctgatgtggctgtattaataccagacaaaatactctttaggccaaaagtattaggaaacataaggactattgttacataatactgaaagtcacaattctctggaaatatatactaattgtaacaatgtagcctcacattaaataatgtaaacatttacctaattataagaagaatttacctccaatcagtttgggagatgttaacatccctccctcaattgatagttggagcagaccaaaaatcagcaaaaatatgtttggaatgacacaatcaactaactagatttagtcactagctataatacatttagtgaacaaatgtagtcttgcactaaaattagagaatacctatccttttcaagaatacataaaataatgaccatatatataccacagagtaagctgcaaccaattctagataacttaaatacagaccatgtttggaaatttaagaaaaaaaaaacacatttataacttgtggatcaaaaaagtcatagaacttagacaatacttggaactgaatgtaaatacaaatgctattaaaatttgtagtatgcagttaaacaggacttgtatacgcatttatatatctaaatgcatgtattagtaaagaaaaacaaatagaaaattaagtttccaactgaaaaagttagagaacaacagatccatcagaggaagtagacagaagttataaagagttataaaggtaaccaggcatggtggtgcacacctatagtcctagctactcggaaggctgagaggcaggaggattgcttgagcccaggaatttgaggttgtagtgggctatgatggcacctgtgaataggcacttcaccccagcctgggcaacacagggagaacccaactcaagaaagaaaagaaagaggttacaaaattgagccagaatgagtgaaacaaacaatacaaccaaaatgttgttctttgaaaagacttaggaaaatagtcacatctttttcttttcttttgagacagggtctcattgtgtcacccaggctggagtacagtggcgcagtcatggctcactgcagccttgacctcccaggctcaattgatccacctgcctcagcctcctgcatagctgggactataggcgcacaccaccacatccagctaatttttgtaattttttgtagagacaaggttttgtcatgttgtcctggctggtcacatctttttcaggacagagttttttattttaatgaaaacagacatcattatagatatagtaaagcctaaaaaaatggaaggattcccattttctgctaaacagttggaaaacatagatggaacggacagtatcctcaagttatgcactgacctaagaagtaataaaaacctgaatagaactttaaccattacagaaattgacacttaaaaagaaacaggccaggcgcagtggctcacacctgtaatcccagctctcagggaggcagaggcgggaggatagcttgagcccaggagttcgagacctgcctgggcaatatagcgagaccccgttctccacaaaaagaaaaaaaaaagagacgaaaaaaaataagtgtaaaagaaacatcaaacccaaatgatttttaagagaaaaaggaaaaaaaaaacccttagctcatttggtaaccttggcaatccttgttactttggtaacataattgaaaacaggaaaggaaagttacgggccatgaacaatagatgaaaaaatatcaacatacatgaacaataacaatatgaccaactaggacttatgctgggaatagcaagcactgtttaattttagaatttgccaggttagtttttcttgggagaaatccactaattcatcattaaaggagaaggctcgtaagatcatctccaatagatgcagaaacaacatgcggtaaaactttaacatctgctcatgttaaagtttgaacaatcaaaatcagaatagatgagatgtttcttaacctgataaagtgttcttgaaacctaacagcagacctcatacttaaccacaaaacactggaagcattgaagtaaggagtaagaaatggatgcctgttaaccactgcttctgttcaaaacagtttggagatcctagccagcataattaaaccagaaaaagaattaaggattgaaaagggagacatcaacttattatttacaggcgatgtaatttgttaacagaaaatgtaaggaaacctagattttgtgttaacttatatgtatttcagcaacaattagataccaaggtaagatataaaagtctattgctttcatttatactagaaacaaaatattttttgaaagataccatttacaatagcaataaataatgtactaaggaataaattcatggtaacaatgtgtgtaagacttttacagaaaaaattacacaacttttttctttttgagacatggtcttcctttgtcacccaggctagagtgcggtggcaagatcatggctccctacagcctagaactcttaatctcacgttatcctcccacctcagcctcctgagtagctgagactgcaagtgtgcaccaccacacctggctatgtattttttgtagaggctgggtctcactgttgcccaggctgatcttaaactcttgggctcaagtgatcctcctgcctgggccccccccaaagcactgggattacaggtgtgagccaccatgcctggcctatacacaactttattgaacatataaaaatttacctaagtaacaaaaagaggtaccatctttacagatgaaaggactcagtattaaaatatggcagtttgccccatattaattcataaaattcagtgtaattccaataaaaaagaatctgccaaaagctttttggatagaacttgacagacgaatcctaaaattcatataaagggtaaggataagaataaccaaagaattttgaagaataaggagggcacgttgatcttactatgtaacgagacacactatcatggcatcttgacaagatgagaggagagcagtagagccgattgggagcctagaaacagactcccctgttagtcggaagttggtaggtcacagatcgttaaggagagagtggactgcagtgagtgatgctggtgaaaatggtttttcatatttggagaagtaagttgttgtatcacactgagtgtgaaactaaggctgagtgtgatggctcatgcctgtaattgcagtgctttgggagtccaaggaaggaggatcagttgagcccagaagttccagacgagcctgggcaacatagggaggtctcgtctctacaaaaaaaatccggcacaacattaggcatggttgtgcatgcctgtagtcccagctacttgggaggctgaggtgggaggatcacttgagcctgggaggttgaggctgcggtgagccaagatgaccactgcactccagcctaggtgacagagcgagacccctgtgtctttaaaaaaaaaaaaaaaaaaaaaaaggaaactacaatctttggtaaacaactcaggagactatgatgctggggtgggaagggcttttttaaggcacatgtgaaaaacatcacaaagggaaagaatgatcaattaattaaaagttaaatcttgtgtagtctgtgacaagaaaggcagaatgttgataattgttgacactggtgataagaacatgggagctcattactgtgctttcgtgtatgtttgaaaactttcctgataggaagtcaacacacacaaacttacatgtagcacagaagtcaccatgaaacaaaggcctgagtcacattttgaagatgtttagaatgtataaaagttagaaatggctcataaacgtgttagctatctattgctgcatagcaagtaaccccaaaacttagcaacttaaatgcactcgtgtatccgagggctccactggagaaggagccacttccgagctccctcccatggggatggcaggactcggttcctccttggcctttgtctggacgttatccttagtcccctgctccatggggctcttcacaggacagctcacagcatggcactggacttttgagagagtgccagccaggcagaagccacagtgttttatagctgctctcaggagtggcattccatgacttttgctggaatctgttcattacgggcaagtcaccgggtcccacccccactcagggaaggagtcacacagggtgtgaacaccaggaagtgggggtcgttgggccattttgggagctgcctgcacagggccaagatgttcagccttactgttgatgaggtaaatgcagcatgatgtatttagatagcaggtcacactgaaggcaagtaagtgtggtggcatcaagtagcaagattgtgggaagtaggaaatccctggtgctagaggtggaggtggttgttctccgggaccaggcaacacatacagagatggtcattgagtcacagtttgtagttttgaaaaagtaggcgcttgtcattcttcatttgcaaagtcatgggtaggtaggctgatgtgtttatatgataaatcatttcacatcagttacaatgaacgaaccatatgtgcatgtttcacccggtgtcagtctcaaaaatacatggctgaataaagaaacaagttgcagggacaggcatgtggctcacgcctgtaatctcaacactttggaaggctgaggtgggtggatcacttgaggtcaggagttcgagaccagcctggccaacatggtgaaaccccatctttactaaaaatacaacaaaaaattagccgggcttggtggcaggtgcctgtaatcctagcttcttgggaggctgaggcagaattgcttgaacccaggaggcgaggttgcagtgagatgagatcgtgccattgcgctccagcctggacaacagagtgagattctgtctcaaaaaaaaaaaaaaaaaaaaaggaaacaagttgcagtcagatgtgtcccacatgttactatttaggttaaaacttacagctgtggcatgtgtctgtggacatgtggtaaaaatttaaaggtgtgtgggggcagacagaagagggctgtacccattatttgcaatattttctttcttacaaaaagcattctggagcaaacatggcaaaatgcaaagatttacttattggtggtattgagtgacgttttatttttcggtttgatcttttcactttttttttgaaagagggtctcaccctctcgcccaggctggaatgcagtggcgcaaccttggctcactgcaacccctacctcctaggctcaagtgatccttccacctcagcctcccaagtagctgggaccacaggcccacacaaccacacccagctaatttttctattttttgtagagacggagtttcaccatgttggccaggctagtctcaaactcctgggctcaagtgatccgcccacctcagcctctcaaagtgctgggatgacaggcgtgagccaccacacccggccttcactattaaaggttcaataaacttgtgtaaacgaacatcccatttcaggtgatatacttatactagatttcgagaagtagaatttgtggggatgagatcctgagatttttgtttgcttgtttttatgaggcaaggtctcacttgcccaggctggagttcagtggtgtgatcatagttcgccgcagcctccaactcctgggttcaagtgatcctcctgcctcagcctaccaagtagcttgggactacaggcgcactaccacgcctggctaatttgtaatatattttgtagagacagggtcttgctgttacccaggctggtctcaaactcctggccccaagcaattctcctgtcttggcctcccaaagtgctggcattccaggcatgagccaccctgcgcagcccgagatcctgagatttaaggcttcactgggtctttccaggtcacgatggccgaggcctcagaagacagtccgaggccaagtgctcctgacatggaggacttcggcctcgtaaagctgcctcacccagcagcccctgtcactgtgaagaggaagcgagttctttgggagagccaggaggagtcccaggacctcacgccgactgtgccctggcaggaaatcttggggcagcctcccgccctgggaaccagccaggtaaggcacacagctgtgatactgtctgtctctgaggggtctgcacagcccagggagcccgagatgcgtcctgacccctagggaggctgcttgtgagaaagtcatggcgggcattcccatctcaccacttgcacactggctgtgctcaccatccatcccaggaggaatggcttgtctggctccggttccacaagaagaagtggcagctgcaggcccggcagcgcctcgcccgcaggaagaggcagcgtctggagtcggcagagggtgtgctcaggcccggggccatccgggatggtcctgccacggggctggggagcttcttgcgaagaactgcccgcagcatcctggaccttccg

SEQ ID NO: 13456 - DNA, 2334 bp, Homo sapiens
aggggaccccgtgcttcctgggctcctggagaccaaggtgaccgaagaacacagggccagtcctaatgaaatcccaagacctcctgagcacaattacccccttggagttcccctcaacttctgcatccagggacacaactctgagggaaacgtttttctaaatagcgtgataagcctggcatggtgatgcgtgcctgtggtcccagctacttgggaggatcacttgagaccaggaagtagaggccacagtgagccgtgactgcaccactgcactccagcctgggatatttgtttatttctatgttactttgtattttttatatttttcaggctacataacattttgacagtttacataccttaatttacgtaactagcccacgattatttactaccagataggtttcacatttccattgttatcaatggtgttgcattgaacgagatatctcggtgcatatgtttcccaggcacaggcgtcttgggtagaaggaatactggaacactctgcagtgctttcctggcttgctttgctgtgtgggcttctgtttcttggcatattgtcttgtatagagtgaaacacacgagcaagggagcaccagggtatcacacagaatattcatgagcccagcactccttacaggatgtggggggcctgtggtcaggaacatgtgtgcaaagcacagctccagctggatgtgggtgccacactggaactgctcaggcctccactgctcaggccactctccagccggccggagtttctctttcctctcttctggctcttcctgccccttctttctcttcctttcaaggagaaaaacttcctgtcttaggccgagcaacatccttttctgcagccttggtgctcttcagtaaattcttcttgatattttgtgcacagtttaataaaataaaagccaagccaggcgtggtggctcacgcctgtaatcccagcacttgggaggcctcggcgggcagaccacttgaggtcaggagttggaaaccagcctggccaacatggcaaaaccctttctctactaaaaatacaaaaattagctggatgtgatggcatgtgcctgtaatctcagctacttgggaggctgaggcacgagaatctcttgaacccaggaggggaggttttagtgagttgagattgcaccactgcactccagcctgggtgacagaatgagactctgtctcaaaaaaaatataaaagctaaagttttgtgtgtgtgtgtatgttttaaagtattgccacacaggcatattagagagctcttgaaattgcagccttctgcgtctcaggctagagaagggcatggcctagaggagcacagtccagggtgagctcagactctgccccttgatttctgcagtgttttacccattgtctttctctaggcagccaacatgcctgactctgagctattcgagctcatctctgagaaccgttccatgtctcggaagctggaagattacggggagcagaagtctacgtccatcagcacagcaaagcgcctggccgagttcctgggagaccagatggtcaaggatgcagggctgagttgccgctacatcatctcccgcaagcccgagggctcccctgtcacggagagggccatcccacttgccattttccaagcagagcccacggtgaggaagcactttctccggaaatggctcaagagctcttcccttcaagactttgatattcgagcaattctggattgggactactacattgagcggctgggaagcgccatccagaagatcatcaccatccctgcggccctgcagcaggtaaagaacccagtgccacgtgtcaaacaccccgactggctgcacaaaaaactgctggagaagaatgatgtctacaagcagaagaagatcagtgagctcttcaccctggagggcaggagacaggtcacgatggccgaggcctcagaagacagtccgaggccaagtgctcctgacatggaggacttcggcctcgtaaagctgcctcacccagcagcccctgtcactgtgaagaggaagcgagttctttgggagagccaggaggagtcccaggacctcacgccgactgtgccctggcaggaaatcttggggcagcctcccgccctgggaaccagccaggaggaatggcttgtctggctccggttccacaagaagaagtggcagctgcaggcccggcagcgcctcgcccgcaggaagaggcagcgtctggagtcggcagagggtgtgctcaggcccggggccatccgggatggtcctgccacggggctggggagcttcttgcgaagaactgcccgcagcatcctggaccttccg

SEQ ID NO: 13457 - DNA, 8011 bp, Homo sapiens
cccctgaagcagaggtggtagccaacggctccatgtctctgaggagcggcgggcggcggcgcgcggacccaggcgcggatggcgaggccagcagggatgatggcgccacttcctcagtttcggcactcaagcgcctggaacggagtcagtggacggataagatggatttgcggtttggttttgagcggctgaaggagcctggtgagaagacaggctggctcattaacatgcatcctaccgagattttagatgaagataagcgcttaggcagtgcagtggattactactttattcaagatgacggaagcagatttaaggtggctttgccctataaaccgtatttctacattgcgaccagaaagggttgtgagcgagaagtttcatcttttctctccaagaagtttcagggcaaaattgcaaaagtggagactgtccccaaagaggatctggacttgccaaatcacttggtgggtttgaagcgaaattacatcaggctgtccttccacactgtggaggatcttgtcaaagtgaggaaggagatctcccctgccgtgaagaagaacagggagcaggatcacgccagcgacgcgtacacagctctgctttccagtgttctgcagaggggcggtgtcattactgatgaagaggaaacctctaagaagatagctgaccagttggacaacattgtggacatgcgcgagtacgatgttccctaccacatccgcctctccattgacctgaagatccacgtggctcattggtacaatgtcagataccgaggaaatgcttttccggtagaaatcacccgccgagatgaccttgttgaacgacctgaccctgtggttttggcatttgacattgagacgaccaaactgcccctcaagtttcctgatgctgagacagaccagattatgatgatttcctacatgatcgatggccagggagattgtttcagaagatattgaagattttgagttcacccccaagccagaatatgaaggccccttttgtgtcttcaatgaacccgatgaggctcatctgatccaaaggtggtttgaacacgtccaggagaccaaacccaccatcatggtcacctacaacggggacttttttgactggccatttgtggaggcccgggcagcagtccacggtctgagcatgcagcaggagataggcttccagaaggacagccagggggagtacaaggcgccccagtgcatccacatggactgcctcaggtgggtgaagagggacagttaccttcctgtgggcagtcataatctcaaggcggccgccaaggccaagctaggctatgatcccgtggagctagacccggaggacatgtgccggatggccacggagcagccccagactctggccacgtattctgtgtcagatgctgtcgccacttactacctgtacatgaagtacgtccacccattcatctttgctctgtgcaccattattcccatggagcccgacgaggtgctgcggaagggctctggcactctgtgtgaggccttgctgatggtgcaggccttccacgccaacatcatcttccccaacaagcaagagcaggagttcaataagctgacggacgacggacacgtgctggactctgagacctacgtcgggggccacgtggaggccctcgagtctggggttttccgcagcgatatcccttgccggtttaggatgaatcctgccgcctttgacttcctgctgcagcgggttgagaagaccttgcgccacgcccttgaggaagaggagaaagtgcctgtggagcaagtcaccaactttgaagaggtgtgtgatgagattaagagcaagcttgcctccctgaaggacgttcccagccgcatcgagtgtccactcatctaccacctggacgtgggggccatgtaccccaacatcatcctgaccaaccgcctgcagccctctgccatggtggacgaagccacctgtgctgcctgtgacttcaataagcctggagcaaactgccagcggaagatggcctggcagtggaggggcgagttcatgccagccagtcgcagcgaataccatcggatccagcaccagctggagtcagagaagttcccccccttgttcccagaggggccagctcgggcctttcatgaactgtcccgcgaggaacaggcgaaatacgagaagagaaggctggcggattactgccggaaagcctacaagaagatccacatcaccaaggtggaagagcgtctcaccaccatctgccagcgggaaaactccttctacgtggacaccgtgcgtgccttccgggacaggcgttacgagttcaaagggctccacaaggtgtggaaaaagaagctctcggcggccgtggaggtgggcgacgcggctgaggtgaagcgctgcaagaacatggaggtgctgtatgactcgctgcagctggcccacaagtgcatcctgaactccttctatggctatgtcatgcgcaagggggctcgctggtactccatggagatggctggcatcgtctgcttcacaggggccaacatcatcacccaggcacgggagctgatcgagcagattgggaggcccttagagctggacacagatggtatatggtgcgtcctgcccaacagcttcccagaaaattttgtcttcaagacgaccaatgtgaagaagcccaaagtgaccatctcctacccaggcgccatgttgaacatcatggtcaaggaaggcttcaccaatgaccagtaccaggagctggctgagccgtcctcactcacctacgtcacccgctcagagaacagcatcttttttgaggttgatgggccctaccttgccatgattcttccagcctccaaggaagaaggcaagaaattgaagaagaggtatgctgtgttcaatgaagacggttctctggctgagctcaagggctttgaggtcaaacgccgcggggaactgcagctgattaagatcttccaatcctcggtgtttgaggccttcctcaagggcagcacgctggaagaggtgtatggctctgtagccaaggtggctgactactggctggacgtgctgtacagcaaggcagccaacatgcctgactctgagctattcgagctcatctctgagaaccgttccatgtctcggaagctggaagattacggggagcagaagtctacgtccatcagcacagcaaagcgcctggccgagttcctgggagaccagatggtcaaggatgcagggctgagttgccgctacatcatctcccgcaagcccgagggctcccctgtcacggagaggtctccttatgtttgcagtattcaccacagatgtttcctccagtgaaagggaagcactgacggttgccagttgctttgctagtgacatgaaaacaggctcgttttttctagaaagcagcctgagtcttctgtgtgttactcagcaaggaacatgtagacatggttatgaacgtgcacgtttgcctgtatgcatgcacgtggttactcagaaacgcagacatgtttacgcacacacgcatgtctttgcctatacgcatgcgcgtggttactcagaaacgtagacatgtttacgcacgcatgcgtttatgtatgtgcatgcacatggttatgccgtgagaaacatgtagacatagttacgaacatgcacgtgtttgcctgtacgcatgcacgtggttactcaatgagaaacgcagacatgtctacgcacacgcatgtgtttatgtatatgcatgcccatggttacgctgtgaggaacatgtagacatgtttacgtgcacacacgcacgtgtttacacatacgcacgtgttactccccgaggaacctgtaggcatgtttgtgcatacatatgcacgcagatgtatacattgatgtttgtgaacagctgttacacgtccttatttccatgttcatttgataagagttaggatcagattttgggtgattttcactgttactgagctgtgtgcctgtcttccttacccagggccatcccacttgccattttccaagcagagcccacggtgaggaagcactttctccggaaatggctcaagagctcttcccttcaagactttgatattcgagcaattctggattgggactactacattgagcggctgggaagcgccatccagaagatcatcaccatccctgcggccctgcagcaggtaaagaacccagtgccacgtgtcaaacaccccgactggctgcacaaaaaactgctggagaagaatgatgtctacaagcagaagaagatcagtgagctcttcaccctggagggcaggagacaggtcacgatggccgaggcctcagaagacagtccgaggccaagtgctcctgacatggaggacttcggcctcgtaaagctgcctcacccagcagcccctgtcactgtgaagaggaagcgagttctttgggagagccaggaggagtcccaggacctcacgccgactgtgccctggcaggaaatcttggggcagcctcccgccctgggaaccagccaggaggaatggcttgtctggctccggttccacaagaagaagtggcagctgcaggcccggcagcgcctcgcccgcaggaagaggcagcgtctggagtcggcagagggtgtgctcaggcccggggccatccgggatggtcctgccacggggctggggagcttcttgcgaagaactgcccgcagcatcctggaccttccgtggcagattgtgcagatcagcgagaccagccaggccggcctgttcaggctgtgggcgctcgttggcagtgacttgcactgcatcaggctgagcatcccccgtgtgttctacgtgaaccagcgagtcgctaaagcggaggagggtgcttcgtatcgcaaggtaaatcgggtccttcctcgctccaacatggtctacaatctctatgagtattcagtgccagaggacatgtaccaggaacacatcaacgagatcaacgctgagctgtcagcgccagacatcgagggcgtatatgagactcaggttccgttactgttccgggccctggtgcacctgggctgtgtgtgtgtggtcaataaacagctggtgaggcacctttcaggctgggaagcagagacctttgctcttgagcacctggagatgcgctctctggcccagttcagctacctggaaccagggagtatccgccatatctacctgtaccaccacgcacaggcccacaaagcgctcttcgggatcttcatcccctcacagcgcagggcatccgtctttgtgctggacactgtgcgcagcaaccagatgcccagccttggcgccctgtactcagcagagcacggcctcctcctggagaaggtgggccctgagctcctgccaccccccaaacacaccttcgaagttcgggcagaaactgacctgaagaccatctgcagagccatccagcgattcctgctcgcctacaaggaggagcgccgggggcccacactcatcgctgttcagtccagctgggagctgaagaggctggccagtgaaattcctgtcttggaggaattcccactggtgcctatctgtgtggctgacaagatcaactatggggtcctggactggcagcgccatggagcccggcgcatgatccgtcactacctcaacctggacacctgcctgtcgcaggccttcgagatgagcaggtactttcacattcccattgggaacctaccagaggacatctccacattcggctccgacctcttctttgcccgccacctccagcgccacaaccacctgctctggctgtcccctacagcccgccctgacctgggtggaaaggaggctgatgacaactgtcttgtcatggagttcgatgaccaagccactgttgagatcaacagttcaggctgttactccacagtgtgtgtggagctggaccttcagaacctggccgtcaacaccattctccagtctcaccatgtcaacgacatggagggggccgacagcatggggatcagcttcgacgtgatccagcaggcctccctggaggacatgatcacgggtggtcaggctgccagtgccccggccagctacgatgagacagccctgtgctctaacaccttcaggatcctgaagagcatggtcgtgggctgggtgaaggagatcacccagtaccacaacatctatgcagacaaccaggtgatgcacttctaccgctggcttcggtcgccatcctctctgcttcatgaccctgccctgcaccgcacactccacaacatgatgaagaagctcttcctgcagctcatcgctgagttcaagcgcctggggtcatcagtcatctacgccaacttcaaccgcatcatcctctgtacaaagaagcgccgtgtggaagatgccatcgcttacgtggagtacatcaccagcagcatccattcaaaggagaccttccattctctgacaatttctttctctcgatgctgggaatttcttctctggatggatccatctaactatggcggaatcaaaggaaaagtttcatctcgtattcactgtggactgcaagactcccagaaagcagggggagcagaggatgagcaggaaaatgaggacgatgaggaggaaagagatggggaggaggaggaagaggcggaggaatccaacgtggaggatttactggaaaacaactggaacattttgcagtttttgccacaggcagcctcctgccagaactacttcctcatgattgtttcagcgtacatcgtggccgtgtaccactgcatgaaggacgggctgaggcgcagtgctccagggagcacccccgtgaggaggaggggggccagccagctctcccaggaggccgagggggcggtcggagcccttcccggaatgatcaccttctctcaggattatgtcgcaaatgagctcactcagagcttcttcaccatcactcagaagattcagaagaaagtcacaggctctcggaactccactgagctctcagagatgtttcctgtcctccccggttcccacttgctgctcaataaccctgccctggagttcatcaaatacgtgtgcaaggtgctgtccctggacaccaacatcacaaaccaggtgaataagctgaaccgagacctgcttcgcctggtggatgtcggcgagttctccgaggaggcccagttccgagacccctgccgctcctacgtgcttcctgaggtcatctgccgcagctgtaacttctgccgcgacctggacctgtgtaaagactcttccttctcagaggatggggcggtcctgcctcagtggctctgctccaactgtcaggcgccctacgactcctctgccatcgagatgacgctggtggaagttctacagaagaagctgatggccttcaccctgcaggacctggtctgcctgaagtgccgcggggtgaaggagaccagcatgcctgtgtactgcagctgcgcgggagacttcgccctcaccatccacacccaggtcttcatggaacagatcggaatattccggaacattgcccagcactacggcatgtcgtacctcctggagaccctggagtggctgctgcagaagaacccacagctgggccattagccagccccgggccccgggtgcctctgcgtccgtgccaggcctcctgatgccaaggccacatccccgtgcttccagtgaccagaccactgaccaccctgactgtccaaacctgtgaccccaggccagggaacggggaggaaaccaaagaaaaccattttcagggagctcagacgtcacaggagggagcgggagcaggatgtggccctggcctcgccagagcacctgaagaagcaggccgtgagcgaggctgcgagtgccctgggcgccgtttctcacgcagtgaatgcttttccaggcctctgttgcttcctgcaccacacctggtggggtgggagcgtcctctaggtgcccctagttctttgtcctgcctcccagagggaggaaaagcccctgggggcttctggctccctgagattgggctctgagacgagacg

SEQ ID NO: 13458 - DNA, 7119 bp, Homo sapiens
tctcggaactccactgagctctcagagatgtttcctgtcctccccggttcccacttgctgctcaataaccctgccctggagttcatcaaatacgtgtgcaaggtgagagtgccagcgtgcgtgtgaggagaggacactaacgtacatgtgtaaggcgagaatgttactgtgtgcaaggtgaggctgtaatgcgtgcaccatgaacgtgctagcgtatgtgtgcaagataaggacaccgacatacctgtgcatggtaaggatgttaatgaatgcaggatgaggctttcagctgtgcaagggggaggtacctacatgtgtagggtcagggtgccagcgtgtgcaaggtgaggagcaggtgtaagttacttgttcattccaccaacatttatcatgtccctgtcacatgcagccacagttgcggcatctgtgctcaggtgtgagcaagacaggaaaggtcctgccttgtggggcctgtctgctgccagccgacccgagaagggagagggccgttcagaggcgcaggtgctgtggggatggagcctgtgaggggcgctgggaccaggtgcaggaggagggaagacgcaaaggccctggggggtgagcttggtgtgttggtgaaggcacagccgaacacccagtgccaccggctgggaggatgggtcaccggagaccagtaggctggaccaggacccagagctgatgagatgagagcttgctcggatgctgaggcctttctgggaaaggcaggctgagtccaaggagggataatattaccagataacgaccgcgggtgtcagcccttacagagcagagtgcttcactgtccatttcctcactcagccttcccagcaaactgcatctcacacacggctaaggttacgctggagatcaggtgacagcctcaaggtctggttgtggtgaagaagtgtttttagctcaccattttaattcctttattgacttttacatattttaaattcatttttattaaggtgtaatttatatacagtaaaatgtactctgtggcgtgcagttctgtgatttttcctaggtgaatggaattgcatcatcatcagcaggatacaggatagtcaccgcccgaaaacattccccgcactgccctcctcacctgacaccctttagccactggtgtgtcttccgtccctgcattttttttctcttctagagcgtcacataagtagagacattgtgcagccttttggatgtggcttcttagcaaaacacacctggaattggttcatccacgcgctcgtgtgtatcagaactccctttctgttgcgagcagtgtccattgtgtgggcaaaccacagcttgcttttcattcactggtggaaggacatttgcgttgctttcactttggggtgattaataacaaagctgctgtaaacattctgtaggtgtaggtttttgtgtgaacataaatttcaattctctgaggtcattttttaagtgtttgtttaacttgataagaaactgccaaactcttttctgaagtggctgcaccgtgtcagggtctcctcagcagtgtgtggcaagagttgctgttccacatcctcaccaggacttggtatcattgggtttttaaattgcagctattccagtaggtgtgtagtggtatcgcattgtgtttctgatttgcatttccctggcgactaatgatgtggagcttttttttggagatggagattcactctcattgcccaggctggggtgcagtggcgcgatctcagctcactgcaacctctgcctcctggttagctgggattacaggtgcctgccaccacgcccccccaattttttgtatttttagtggagacggagtttcaccatgttggccaggctggtctcgaactcctgacctcaagtgatccacctgcttcggcctcccaaagtgctgggattacaggcgtgagccaccacgcctggctgtggggcattttttaatgggcttctttgctgtcctggtgtctgtcctctttggtgaagttttaggttttatccatttgagttaatttttatacaatgtgcatgctgtagatccaagtccatatttctgcatgggatatctgattgcaggcatatcctgtcttattgtgcttcgaagcggttacctgtatttttataaatggaaggtttgtgggaatcttgtcttgagcaagtctcatctttccaacagcatgtgctcactgtgtctgtgtcacatgttggtaactctcaggatatttcagacttttccactattattatatcagccgtgataacctttgatgcttctatggcaattgttttggggcgccatgaaccgtgcgcatagaagacaatgagcttcatcaatgttgtgtgtgtcctgattgctccactcacgggccattctgccatctcgccctttctccttgggcctccccagtcccggtgacacaacactatagaaattaggtaagttaatagccctgcaatggcctctacgtgttcaagtgaaaggaagagtcacacgtctctcactttacataaagagctagaaatggctaaacttaggaaggcatgttgaaagtcgagacaggctgaaagctaggcctctcacaccagttagccaagtcaactgcaaaggaaaggttcttgaaggaaattacaagtgctcctccagtgaacacatgaaagataaagaagtgaagcatcctgttgctgatatggagaaagttgagtctggatagatcaaaccagatataacatcccctcaagccagagcctaatccagagcaaggctctcactctgttcagttccatgaaggctgagagctgaggaggctgtagaaggaaagcttgaagctggcggaggttggttcatggggtttagggagagaagccgtcccagtaacataaaagggcaaatgaggcaacaggtgcgggtggagaggctgcagcgagttctccagaagatctgtctgggatcattggcgaaggtggctacactgacaacatattttccgtgtagacaaaacagccttcttttggaagaagatgccatctaggactttcatagctagagaggaggcctcagagcctggcttcagaggaaaggctgactcttgttagcggcagatgcagctggtgactttaagtcgaagccactgctcattcagtcttttaaggccactacctgcagctcagaaaaagattccttccaaaatagtactgctcattgacagtggacctggtcacccaagagctctgatggagacgtacaaggagatgaatgttgctttcatgcctgcggacacagcatcccttctgcagcccatggatcaaggagcaatttcgactttcaacgtttattatttaaaaatatatttcatgaggctatagctgccatagatagtgattcccctgatggaactgggcacagtaaattgaaaaccttctagaaaggattcaccattctggatgccattaagaacatttgtgactcatgggagaaggggtcaaaatatcaacattaacaggagtgtggaagaagttgattctgaccctcatggatgactttgagggattcaagactattgtgggaggcgtgactgcagatgtggtggaaacagcaagggaactagaattagaagtggagcctgaagatgtgaccaagttgctgcaatctcaggacaaaatttaacagataaagagtggcttttcatggatgagcagtaaagtagttttttgttttgttttgttttgttttgttttgttttgttttgttttgagatggagcctccttgctctgtcgcccaggctggaatacagtggtgcggtcttggctcgctgcaacctccgcctcctgggttcaagtgattttcctacatcagcctcccaagtagctgggattacaggtgcccgccacaatgctcagctaatttttgtatttttaatagagacagagtttcaccatattggtcaggctggtctcaaactcctgacctcaggtgatccacccgccttggcctcccaaagtgctgggattacaggcacaagccaccacgcccagcccaaaaaagtagttttttttttaagatggagtctcgcactctcgcccaggctggagtgcagtggcgcgatcttggctcactgcaagctccctcccaggttcacgccattctcctgcctcagcctcccgagtagctgggactacaggcaagcgccaccacacctggctaattttcgtatttttagtagagacagggtttcaccatgttagccaggatggtctcgatctcctgaccttgtgatctgcccacctcggcctcccaaagtgctgggattacaggcgtgagccaccgcacctggccaaaaagtagtttcttgagatgaaagtgaacattgtggaaatgacaaaggattgagaatattccataaacttagttgccaaagcagcagcagaatttgagaggaccgactccaattttgaaagaagttctactgtgggtgaaatgttatcaaacagcatcacatgctacagagtctttcatggaaggaagagtcagttgatgcagcaaacttcattgttgtcttgttttaagaaattgccacagccaccccaactctcagcaataccaccctgatcagtcagcagccgtttacattgaggcaagaccctccaccagcaaaacgattgcgactcactgaaggctcagatgatcgttaatatttctgagcaataaaacattttaaaattaaggtacatacattgttttttagacataatgctgttatgcacttaatagactacagtatagggtaaacctaagttttgtctgggtagagtgactcacacctgtaatcccagcactttgggaggtcagggtgggttgactgtttgagcccagcagttcaagaccagcctgggcaacatggcaaaacccatctttacaacgattacaaacattacctgggcatggtggcgcatgcctgtcgtcccagctactgggaaggctgaggtagaaggatcaattgagccccaagaggtcaatgctgcagtgagccatgattgtgccactgcagtccattctgggtgacagagtgaaatcctgtcccaaaataaaaaaaatcacatagctttttttttttttgagatggagtctcactctgtcactcaggctggagtgcagtggtgcaatcttggctaactgcaacctccacctcctgggttcaagcgattccctgcttcagcctcccaggtagctgggatcacaggtgcacccgccaccatgcccagccaatttttgtatttttaatagaaatggggtttcactgtgttggccaggatggtcttgaactcctgacctcaggccatccacctgccttggcctaccaaagtgctgggattacaggcgtgagccaccacaaatcacgtaacttttatatgtactgagaaaacaagcgtgagccaaaaatcatgtaacttttatatgcactgagaaaccaaataatttgtgtgatttgctttattgtgatgttagtccattgaggtggtttgaaaccgaacttgccatatctccaagatacgcttgtattcaagaaccatttgttgaaaagactattctttttctatcgaatcatctttgtacctttttccataacttagtaaccttatctatgtgagtctctttctggattatgtattctttttttcgatcttgcattcaatttgctaatatctcgttgcgcatttttgtgtctgtgctcaggctgttattggtctgtagtttcttagtacggtctttggttctagtatcaggggatgctggcctcatagaatgggttgagtgctctctctcttcagtgttttgaaagatactgtgtagaatcagcagcatttcttccttaaatgtttagtaaattccccagggaagcctgtcctcaccgatggaaaactgctaatgtagagaagtcagctgaggcgtctaaagggactaaggaagggaggaaaggacaccaggaaactgtagcctaaggtccagagggttctggtccagacagagcagcagggaggccccgggagctccttcccgatgtgggctgtggtctctgcaggtgctgtccctggacaccaacatcacaaaccaggtgaataagctgaaccgagacctgcttcgcctggtggatgtcggcgagttctccgaggaggcccagttccgagacccctgccgctcctacgtgcttcctgaggtcatctgccgcagctgtaacttctgccgcgacctggacctgtgtaaagactcttccttctcagaggtgcggctgagctccagcgggcccttcactgtggagcagaacatccgagggcactgcggtgtcttgagggcttctgcagctccagctctgtgggtcacacctgctgcccctctgactcacatggattggcaacaggccccttcccaggcctccccacaccatgttcggaatgttgtcctaggaagggctcaagtgcaggtgggaggccagagtgcgtgcagctgcactcaggagactcgcccgtcaccaggcgcttctcacagccccttcctctcctgagatcctgcccatggcactgtggtctggaggctgggctggtgacctctcgcactcttgctctgcctaggatggggcggtcctgcctcagtggctctgctccaactgtcaggcgccctacgactcctctgccatcgagatgacgctggtggaagttctacagaagaagctgatggccttcaccctgcaggacctggtgagtcgtgcatgccgcctgcccgtgtgccctggagtccacaggggggtttctgtgcactcccgggagccggggtgtgtgcaggtcctgaggcacgccctggtgtcttccaaggggcctgccctgcagaccagtccatgccctgagcctgatggactgttctgtccacactggttgagcacctgccttgggtcaagagctggccttgtgggtgcttcgttctagcggaaggaggcagacactcccaagtgtgaagagaaggaaaggaggaagagggagttgcacagctcggccacaggaaggtcttgccgaggggcatctgagcagaggctgggggacgcgccaag

SEQ ID NO: 13459 - DNA, 551 bp, Homo sapiens
tctcggaactccactgagctctcagagatgtttcctgtcctccccggttcccacttgctgctcaataaccctgccctggagttcatcaaatacgtgtgcaaggtgctgtccctggacaccaacatcacaaaccaggtgaataagctgaaccgagacctgcttcgcctggtggatgtcggcgagttctccgaggaggcccagttccgagacccctgccgctcctacgtgcttcctgaggtcatctgccgcagctgtaacttctgccgcgacctggacctgtgtaaagactcttccttctcagaggatggggcggtcctgcctcagtggctctgctccaactgtcaggcgccctacgactcctctgccatcgagatgacgctggtggaagttctacagaagaagctgatggccttcaccctgcaggacctgcggaaggaggcagacactcccaagtgtgaagagaaggaaaggaggaagagggagttgcacagctcggccacaggaaggtcttgccgaggggcatctgagcagaggctgggggacgcgccaag

SEQ ID NO: 13460 - DNA, 1361 bp, Homo sapiens
gctaggctatgatcccgtggagctagacccggaggacatgtgccggatggccacggagcagccccaggcacgtaagccacatcccggctgcccctgctgccgtgtgcacgcatccagatggccacggagcagccccaggcatgtgagccacatcccggctccccctgctgccgtgtgcacgcatgtatgccagcccgctccacccagcaggctgtgtctccgggacacacgtgttttgtcctgtgccggtctccttactgtgtgtgcggcaggctggtcaggccaggctttgctttctgtgcttcacacttgaccctgggctcttgatttttgatggccctgctctctggcgttctctcctcagactctggccacgtattctgtgtcagatgctgtcgccacttactacctgtacatgaagtacgtccacccattcatctttgctctgtgcaccattattcccatggagcccgacgaggtgagcattatctgtcctgtcggcaccctggcctcctcagcccttgccccattccaaatgcactggagctgaatggaggtggatgtcccaggagtgctggcaccagaggcggcagtagaattctggtgtgtgacgtcagggatgtcctttgggaattctctggccctggtgtgaggaagaaaccacaggaggcagaatttgcagccatttaccacgaggttttctctcctttcacactgaagttcagcttaggttcctggactttgcctgcaagtcagggcctttggtgttgcttttggctggaagccttggtttctcttgcaggtgctgcggaagggctctggcactctgtgtgaggccttgctgatggtgcaggccttccacgccaacatcatcttccccaacaagcaagagcaggagttcaataagctgacggacgacggacacgtgctggactctgagacctacgtcgggggccacgtggaggccctcgagtctggggttttccgcagcgatatcccttgccggtttaggatggtgtgcttcttccctgggattcagattcttcccactcttgtgctgtggtaggacccagaagctgcaggggctgaaataaagccccttctccccatcctgtcccacggcccctcaccgggtgtggcttctctggcccagcaccccccgggggcttctttagggcagtgcactgcagattgtgcacatgagtccttccggagctttctcgggcacaacctgccacgtgcagccacagcgtcaaacctgaggcaggctagtgtgggtgtgtttcccctctgaccccgtcgtctcactgttgtgctagaatcctgccgcctttgacttcctgctgcagcgggttgagaag

SEQ ID NO: 13461 - DNA, 483 bp, Homo sapiens
gctaggctatgatcccgtggagctagacccggaggacatgtgccggatggccacggagcagccccagactctggccacgtattctgtgtcagatgctgtcgccacttactacctgtacatgaagtacgtccacccattcatctttgctctgtgcaccattattcccatggagcccgacgaggtgctgcggaagggctctggcactctgtgtgaggccttgctgatggtgcaggccttccacgccaacatcatcttccccaacaagcaagagcaggagttcaataagctgacggacgacggacacgtgctggactctgagacctacgtcgggggccacgtggaggccctcgagtctggggttttccgcagcgatatcccttgccggtttaggatggtgtgcttcttccctgggattcagattcttcccactcttgtgctgtgaatcctgccgcctttgacttcctgctgcagcgggttgagaag

SEQ ID NO: 13462 - DNA, 6338 bp, Homo sapiens
ggagcgcgccaaatttctcccctgaagcagaggtggtagccaacggctccatgtctctgaggagcggcgggcggcggcgcgcggacccaggcgcggatggcgaggccagcaggtgaggggcgccctcctgaggctctcgggccggccctccggagggtgccatggggccgtcctcggctggcgccgccgaggcgggagggaggcccggttcccgcagccgcccgcactcgccgcgcctgactggggtagggcggcgcgccccgaccgccgacggaggggctcggggcgggcggaggcgctacgggcgcggcttctttgcggggaaacgaggcgggccgcgcggcctttccctgctcggctctttctgaggtttttcgggcctcgccttccgcgcagctgcgtttgggacctgccgcgcggcgggggcgatgagagcggcgggacccgggccaggccctgcggggtggacgcgcggctggggagggtgcggggaggggcggggccggggaccctgcctgggggcctagcgctgggggaggccgaggcgggcggatcgctggagcccaggatcctgttctagatcagcctgggctacagagagagacctcgtctcctctgttttatttttttgggcagggagtcccgctctgtcgcccaggctggagtgcagtggcgcgatctcggctcactgcaacctctgcttcccgggttcaagcgatcccgctgcctcagcctcccgagtagctggaattacaggcgcccgccaccaggcccggctagtttttgtatttttagtagagaccgggtttcaccatgttggccaggctggtctcgaactcctgacctcaggtgatccgcccgcctcggccttccaaagtgctgggattacagacgtgagactccgcgcccggcccttctcttgtaaaaacaagaaaaattagacaggctggtggtgcgcgcccgaggtcccagctattaatactcccgaatccgagccggaggttcacctgagcccggcaggtcaaggctgctgtgagccgggatcgcgccaccgcactccagcctgggcgacggagccagacccagtctcaaaaaaaatagagcaaggataagacgcggctgcttggtggccagagcaaacggtaaacatgaccggaggactggcctgccataagcagaaaacggatgaggcccggcgcggtggctcacacctgtaatcccagcactttgggaggccgaggcaggaggatcacctgaggtcaggagttcgagaccagcctgaccaacatggagaaatcccgtctccactaaaaaaatacaaaattagcggggcgtggtggcgcatgcctgtaatcccagctacgcaggaggctgaggcaggagaatcacttgaacgcggcaggcggaggttgcggtgaaccgagatcgcgccattgcactccaggctgggcaacaaagaatgaaactctgtctcaaaaaaaaaaaaatagaaaaaacgtgtgagaacgtgaagctttttacagacacttagctgaacaaaattcttcccagaggagaaaccaagtggtaaggatccctaactgctgttgtgctcatcgctgtctgtccatatcaggcaagccctagagaggcaggtacccttagggtctacatggtgtgttggaacttggagcttagagacggttactgactgccctgcttcaggacacaggactgcactcacgtgctccactccactgccctgccccaagctcagtgatggcctccaggcagggggaaggctgctgctgggataagtacaagtgatggcttttaccttacatgctttatgtgggttacctcatctcatccttaaaacagtcctgggaggtgagtgtgccccaggaggcagtgggtgctgtttgcctgcgtttcttcttgtgtgaaatggggacaccagtggcctccctcgtaggggttgtcatgaaaactgaatgagagcatatgtggagtactgggacggtgtgatacagtaaccagtcaatggtagctctctgtgaatgagagcctgtgtggagtactgggacagtgtgatacagtaaccagtcaatggtagctctctgtgaatgagagcctgtgtgtagtactgggacggtgtgatacagtaaccagtcaatggtagctctgtgaatgaaagcctgtgtggagtactgggacggtgtgatatagtaaccagtcaatggtagctctctgtgaatgagagcctgtgtggagtactgggacggtgtgatatagtaaccagtcaatggtagctctgtgaatgagagcctgtggagtactgggattgtgtgatacagtaaccagtcaatggtagctctctgtgaatgagagcctgtgtggagtactgggacggtgtgatacagtaaccagtcaatggtagctctctgtgaatgagagcctgtgtggagtactgggacggtgtgatatagtaaccagtcaatggtagctctctgtgaatgagagcctgtgtggagtactgggacggtgtgatatagtaaccagtcaatggtagctctgtgaatgagagcctgtgtggagtactgggacggtgtgatacagtaaccagtcaatggtagctctctgtgaatgagagcctgtgtggagtactgggacggtgtgatacagtaaccagtcaatggtagctctctgtgaatgagagcctgtgtggagtactgggacggtgtgatacagtaaccagtcaatggtagctctctgtgaatgagagcctgtgtggagtactgggacggtgtgatacagtaaccagtcaatggtagctctctgtgaatgagagcctgtgtggagtactgggacggtgtgatatagtaaccagtcaatggtagctctgtgaatgagagcctgtgtggagtactgggacggtgtgatatagtaaccagtcaatggtagctctgtgaatgagagcctgtgtggagtactgggacggtgtgatacagtaaccagtcaatggtagctctctgtgaatgagagcctgtgtggagtactgggacggtgtgatatagtaaccagtcaatggtagctctgtgaatgagagcctgtgtggagtactgggacggtgtgatacagtaaccagtcaatggtagctctctgtgaatgagagcctgtgtggagtactgggacggtgtgatacagtaaccagtcaatggtagctctctgtgaatgagagcctgtgtggagtactgggacggtgtgatacagtaaccagtcagtggtagctctctgtgaatgagagcctgtgtggagtactgggacggtgtgatacagtaaccagtcaatggtagctctctgtgaatgagagcctgtgtggagtactgggacggtgtgatatagtaaccagtcaatggtagctctctgtgaatgagagcctgtgtggagtactgggacggtgtgatatagtaaccagtcgatggtagctccctgtgtgacacttatccccatttttcagatttcttactgtccctggattaaaagtgagatacacagctcagagaaagcagttttgggaggaaatatggtcccagtgagcagttttctagtctacttaatccaacttacttgaggcaaggatatttggaggactggcatagagggccgtgcgcccctgttaagaggtgatgcctcgtaaatagcacttcattcactcttgattttgataaagatctgggactcagaactgaggctgttctctagcaagatttggaatatagtttttctgtgtttttgattacgggtgcattcaactatttaaaagattaaacctttattatacagtatggtggtgtatcagtttcctattgctgcagtaacacatgatcacttagtgactatataaatttattctcttacggttttagaagtcagaagtcgtaatatgaaagtgtctggttggttatatttattgtgatggttcccgggggagaatctgtttccttgctgcttcttcatcttcagaaccaagggttgcatctcctctcccccctaccctctctctcccatccctttctccttcctgactctagctctcctgcctcactctacaaggattcttgtgattacactgcgcccacccagctaagcagaatctcaaggcccttaatttagtcagatctgcaaagacccttttgtcttgtaagataacattcacaggtttgggggattaggatgtgggtctttcatggggggtgtcatcctgcctgcctaccacaagtggttataatctttcatgagaagtaaggatcctagtcttggaatatggtcattctgctcttgagttgaaggtgatccaaggaataccttcagacaaaggaagggtcttcctttctttttttatcttgttctttttttattttattttttttttagacggagtctcgctctgtcgcccaggctggagtgcagtggcatgatcccagctcactgcaagctctgcctcctggattcacgccattctcctgcctcagcctcccgagtagctgggactacaggcgcccgccaccacgcccggctaatttttcgtatttttagtagagacggggtttcaccatgttagccaggatggtctcaaactcctggcctcaagtcatccaccctccttggcctcccaaagtgctgggattacagttgtgagccactgcgcctggccctcaacctttttttgaggtaattgtagattgattctcatgcatttgtcagaaatgatacagagattcccgtatcacttcaccataacatcttgtgtaagtagagtacaattgtcacaactaagaaattgacattgagacgacccatctaatttattttatcttattttattttatttatttttttgagacgaagtttcactcttgtcacccaggctggagtgcagtggcgcaatcttggctcactgcaacctccacctctagggttcaagtgattctcctgcctcagcctcctgagtagctgggattataggcccaccccaccacacccagctaatttatttatttatttatttatttttatttatttttttttttttgccggagtctcgctctgctgcccaggctggagtgtggtggcgcgttctcggctcactgcaagctccacctcctgggttcacgccattctcctgcctcagcctcctgagtagctgggactataggcacccaccaccacgcctggctaagtttttgtatttttagtaaagacggggtttcactgtattagcaggatggtctagatctcctcacctcgtgatccgcccgcctcggcctcccacggtgctgggatttaattttttgtatttttagtagagacagggtttcaccatgctggccaggctggtctcaaactcctgacctcaggtgatccacccgccttggcctcccaaagttttgggattacaggcgtgagccactgtgcctggcctgacaatccgtctgttttattcaaatcatgtcagtgttacatgcactctcatgagccaccgcgtctggctagttttatgcatttttagtgtcccaagaggcaacagtgtctagccatcatgactctttttgttagtattctggttataaagttgaacaggttttgaagggcctgccctaattgtgtttttccaatgagtccttttatcttaatgagcctttttccaagctcggggtttttcaggaatatatataccctgtcatatccgaaacacttaacactaggtgggatgagggttgcagaagtaggtggcagtcggatcacaaggtcaggagatcgagaccatcctggctaacacggtgaaaccccgtctctactaaaaatacaaaaaattagccaggcgtggtggctgtcgcctgtggtcccagctactcgggaggctgaggcaggagaatggcgtgaacccgggaggcggagcttgcagtgagccgagatcacaccactgcactccagcctaggcgacagagcaagactccgtctcaaaaaaaaagaaaaaaaagaaaaaaagaagcagcagcaggtggcattacaaattaagcacggggttcccttctttcactcagggatgatggcgccacttcctcagtttcggcactcaagcgcctggaacggagtcagtggacggataagatggatttgcggtttggttttgagcggctgaaggagcctggtgagaagacaggctggctcattaacatgcatcctgtaagcactaggtccttctcccacccaggaatatggctgcaacccttctggtcatagcgtggtccttatctaaagagtgggggacacatgagggaactttgagtgaatca

SEQ ID NO: 13463 - DNA, 364 bp, Homo sapiens
ggagcgcgccaaatttctcccctgaagcagaggtggtagccaacggctccatgtctctgaggagcggcgggcggcggcgcgcggacccaggcgcggatggcgaggccagcagggatgatggcgccacttcctcagtttcggcactcaagcgcctggaacggagtcagtggacggataagatggatttgcggtttggttttgagcggctgaaggagcctggtgagaagacaggctggctcattaacatgcatcctgtaagcactaggtccttctcccacccaggaatatggctgcaacccttctggtcatagcgtggtccttatctaaagagtgggggacacatgagggaactttgagtgaatca

SEQ ID NO: 13464 - DNA, 749 bp, Homo sapiens
ggatgatggcgccacttcctcagtttcggcactcaagcgcctggaacggagtcagtggacggataagatggatttgcggtttggttttgagcggctgaaggagcctggtgagaagacaggctggctcattaacatgcatcctgtaagcactaggtccttctcccacccaggaatatggctgcaacccttctggtcatagcgtggtccttatctaaagagtgggggacacatgagggaactttgagtgaatcaggtgggagatgtgaaggttcccagctctcctttcctctttaacgtcattgagggccacagagaggccactgtgagaagccggaggtgatgggcatctcttttagccatcagaataaagctttcaaggattatgagggagaaattgagagagatccccatttggaggccgttacagtgtggttcttgtgaataaggctggtagtgttaatgtaggggtggagtaaagacctagatgagagggtttgtttctaaagtgctgagtttcccgaaaggtaggaggaaagtttctctaactgtgtagaggatggtcttgtgtctgtgttgactgattctcttgtagaccgagattttagatgaagataagcgcttaggcagtgcagtggattactactttattcaagatgacggaagcagatttaaggtaagcccctgactgcgacaagctaaaacccacttttatgggtgttcatgtagctctgtgactgtcagggagggca

SEQ ID NO: 13465 - DNA, 299 bp, Homo sapiens
ggatgatggcgccacttcctcagtttcggcactcaagcgcctggaacggagtcagtggacggataagatggatttgcggtttggttttgagcggctgaaggagcctggtgagaagacaggctggctcattaacatgcatcctaccgagattttagatgaagataagcgcttaggcagtgcagtggattactactttattcaagatgacggaagcagatttaaggtaagcccctgactgcgacaagctaaaacccacttttatgggtgttcatgtagctctgtgactgtcagggagggca

SEQ ID NO: 13466 - DNA, 820 bp, Homo sapiens
gggagcttcttgcgaagaactgcccgcagcatcctggaccttccgtggcagattgtgcaggtatagaccttgatccaaggggagggcagtggctctgctgatggcccagggagggggtgtccagctgggccctgaggtctgggatgggagggttagagtgggcctggagtttcctgcccatcgtagggaggcctaaggccctgtgctgggagctgcaagctacctggaaggtggccccgtctgtgggttccagtgtgtcctgtgatgtgctgtatgtccgtgtggcctttcagatcagcgagaccagccaggccggcctgttcaggctgtgggcgctcgttggcagtgacttgcactgcatcaggctgagcatcccccgtgtgttctacgtgaaccagcgagtcgctaaagcggaggagggtgcttcgtatcgcaaggtagggaggagctggtgctgcctctgcagtcatctgggcagcctgaggtggctttcccatgatctagcctggcctccagcctccatctcctcagtaccttatggggatgttctaggaattcctcaaaacaacgtgtgtgagcgctgagcaccgagcctggggcagagcgagtgccgggaatggagctgctggtgtccttgtcacgatgagcttgtctgcccgcgaggtccatgttgcggggacaaaccaagtggcattggttagagattgtgaactctgtctccgtaggctctttggttgttaacagctttattgggatgtaaagttacgccatccaactcacccatttaaagtgcagaattcaatgacttttagtggcatga

SEQ ID NO: 13467 - DNA, 587 bp, Homo sapiens
gggagcttcttgcgaagaactgcccgcagcatcctggaccttccgtggcagattgtgcagatcagcgagaccagccaggccggcctgttcaggctgtgggcgctcgttggcagtgacttgcactgcatcaggctgagcatcccccgtgtgttctacgtgaaccagcgagtcgctaaagcggaggagggtgcttcgtatcgcaaggtagggaggagctggtgctgcctctgcagtcatctgggcagcctgaggtggctttcccatgatctagcctggcctccagcctccatctcctcagtaccttatggggatgttctaggaattcctcaaaacaacgtgtgtgagcgctgagcaccgagcctggggcagagcgagtgccgggaatggagctgctggtgtccttgtcacgatgagcttgtctgcccgcgaggtccatgttgcggggacaaaccaagtggcattggttagagattgtgaactctgtctccgtaggctctttggttgttaacagctttattgggatgtaaagttacgccatccaactcacccatttaaagtgcagaattcaatgacttttagtggcatga

SEQ ID NO: 13468 - DNA, 6722 bp, Homo sapiens
cctgcaccgcacactccacaacatgatgaagaagctcttcctgcagtgagtgctcctcctccctgggctgtccaccgcgtcctcagctgggctggtcccttactccccagaaccagagacatggccagccagtgcctctgggataagtagtgtatttctgagtttgtggagcataacaatccaaaggatcccagagaaacacgcagctgctgctgcagcgtcgcctgcacatcctgcagagaacactaggtggcacctcctctcctgcccctttcctgcacaaagtcatgctacacattgtattgctgtgtgccttgttgttttagtgaaaatatgcctgtgtcaggagatctgtgtgaggacatgccatatgaaagaacatttagcctctctccagccttgtgccgttgttacaaatagcaaatcagtgagaggcttcatgcatgagctcatgcagatagatccgtggggtaattgctggggcgtagccctcttgcaggcctcagaggtgttgtaactcgggatgaatcctgatttgatggacttcaccagagcggccccacagaggccccttgtggacacttcttccctggccgcgcctcaccaacatggccggggattattacccaactgctgggataaaagtgcttcttggtgcagtcttaacttaggattcttacaatgaatgaagtcgaattttctcttctagtcctttgtctatttttctgtagttttggtggttcttctcttattaaatatcgaatgagttgtctccatacaaaaagttgccatttttctgtgataagaatttgctaattttttcctgtttttggttatcttttgcctttgtttgtggtggatttttgccatgcagaaatctttgctcttcattagcttctgggttctagtgtatctcggaggcttttctgcttcaggaccctcagctcttttccctcttggattttctgggtgccctctggctctccatgactgtggcgtctccaccacggactctcaacttgctccacaggctcatcgctgagttcaagcgcctggggtcatcagtcatctacgccaacttcaaccgcatcatcctctgtacaaagaagcgccgtgtggaagatgccatcgcttacgtggagtacatcaccagcaggtgcggctggctggtcctggtgacgcagcactgtggctttgagagggatgctaaaatgaccccctgaggtgccagctctcctcctgggtgggctgggaggtcgttagaagtgcaggactcaccatggtgaatctgagcagcgtgaaaagggggttaccgccacctgtgcgcggtagcagatcggaggccactcagctgtgcagcttgagttgggcaagttcaggaagtggcctgcctttgctaagaaggttccacagtgatttttgtttgtttgctttttttccccatggatattcagggcacagattcaaggtgccctgaatatatgcaccccgtaagtgttgacgttgtaagccttttcatagacgtcagtgttggcgagtggagtggtgtggttcccgggtgctcaggtgtgcacagctctcagctgtcagagcctggtgtggttttgacttcctgccttccaggccatgttcctgaggttccctcctaggccttgctgtgcttctcacacactcagcactatttaaatctaaatagaagacaaagcaacagaaaaatctccaccagcaacttttgttcaactgatagtaggaagctccctcctaggtgcgctcaccctggggatgaatgcagccctttctgagcacagaggggagttgcttgtggaggcacagagagtctgcatgggtctgatctttgcatggttacaggggtagcatctgggggcgctgcagaaaaggctgacactaaattgataataggccttatcactgagaagtaggaaggtagagcttataagactttcattcctaatcaaaccatatgcactggattaatttgaaacacaaaagcactgttgtcctcctgcagacccactgtggccccttatgtctatccaagatgagccttgatggtcagtggtcacgctgtgtgcctgggaaagctggcttgggctagaattgtatttcggagcatggctgagataatgggaaggatgtgcctctccccacgttggccatgggcagctccaggggtgccctgtacctgaggaggccggggttgctcatgtcgagaaacaggctgctattcttccttagcgcgaagagcagagttagggagaacataaagttctcctgcaggagctgcgatgtgggctactcagctgcattttgaaactgtgatttaggatgttcctccttccttcctctctttctttgtttattcttccattttttggggttttgtttgttttttaggagatggggtcttgctctgtcacccaggctggagtgcagtggtgcagtcatggctcactgcggcctcaaactctgggctcaagctatctgcccacctcagcccactgagtagatgggactagaggtgcatgccagcatgcccagccaatttttgtattttttgtagagacagggttttgccacgttgcctggggtggtcttgaactcctgaactcaggcgatcctcctgcctcagcctcccaaagtgctaggattacaggcgtgagccaccgtgcctggcctgttctttttttttttttttttttttttttttccttaaatggatctaatgtgcagaggattgggtcagcgctagggaggcttaaccgaggagtgacaaggatgacgatagcttaaaagagcttggcagtgggaagcactgtggttggttaccagcaggtgcaggtcacctaaggccgcagagcagaggcagaacaccctgtgggccatccccagcacgaggaggcacccagctctctttgtggcgccagctcccaggggcctggtgggcctccttagttttacgtttaccacatttccccaggaagcctgagggatgatgtggtctgaatgaactttcaaattcagtgttaagtaagtggagggtacagatagatacaaggggaaataaaggaaagttgagaacaaggtcgatttcactgaagcagcgtcttcaatgcttcctctgcagcatccattcaaaggagaccttccattctctgacaatttctttctctcgatgctgggaatttcttctctggatggatccatctaactatggcggaatcaaaggaaaagtttcatctcgtattcactgtggactggtaagcgagctgcagtgtggcacccgagccagctttgggggtcgcgttcattcctgcagcaagtgctgagtgctcagggccccggcgggcctggccgtgagcagcagacactgcacccgcatcctgccctcatgaacacggggagggaccatgcgcagacaagcacgtcagtgtggagtgtggcgtcagccctggtgatggcaaggcttgccgtgggcaacagggaggtggaggcccatgaggtggtgacagggaatccgagagctgatgaagtgcaccatagttgtgcgagcataaggcgcctccagcggatggacaccagggaggcaaagcacaagtcagtggagcagtggttgcagatgcaggcagagagctgacagagccaggcaacttgggcatggcagggcagggcctcggctttcgtggggatgggagcttctgtgtgggtgatgttggagctttcttggccccatgtggataacccaccattggagggcacaggcaggtaaagccggttagtgcctgtgtcagggagatgctgggcagcgaggttggtgagaagggcctgggtgggctttgaagtggagccaaggggccagcggatcggatgtgtgtaaatgcccaggtgcgggccaggctgtgggtgagtggaggtggctgtcgggagcagtctggggaaggggtcacgtctggctggggctcatggtgtttgcaaggttgagacgtgggtggtcagctggtgcaggagtggccagagagtggctgggtgggttgagaggaggcctgtgtcctccacaggggccctcatagtggactgagaggaagctgtgggtaccagagccaggggctcagatgtcagagggaaagccctttgtaaggacgcagacgcttctgggagctggcaggatgaagccaagactgcccaggacacctggatgggagcgattctggttggagttgggggataaaccctgattgaagggattcagaacaaagtgggagggtagaaactcaggcagtgtagaccgctctgaggaggggatcagcgtgtggtcagggcaggtggcagtgggtgtcggtgtctacacagacgtggatggtgccgtggcacgaacacaggctgcgcgggaggctgggtctgtgatggggtcgtgccgtcccaggagattcatggactcagaggagagaacagtcaccgggaagctctggctggttctttcgtccttggggggtgggagttcaacaattaaagtgaactctggaagagcagagtgaagctcacagtcccaggtcacgagcacttctgtgtgccaggcgcttcccacaaagcactttgtactgggagccaccctgggggattcacgcaggctccaggggatgccttgactgcgaggaaggcctctggtcaaacggggcagatggacccaggttggaggagccttcgctgtggcatcctacccctctaccaggccgcgatggtgcaaacacagccgcgttgtctcatgtgttacagcaagactcccagaaagcagggggagcagaggatgagcaggaaaatgaggacgatgaggaggaaagagatggggaggaggaggaagaggcggaggaatccaacgtggaggatttactggaaaacaactggaacattttgcagtttttgccacaggcagcctcctgccagaactacttcctcatgattgtttcaggtaagcccagagcccagggctgcgcagcccccactgaagggactcatggttagtagatgtggctcctgtgccatggtatcgcaagaagggagacagggaaaatcagatcgggcggagcctgcccagcagttgggactttgtgagccgaggggcctcctctccaggctccaggcatgttccactggagggcccggagaggggtgactgtcttccctccagcctttgctctcaggaaactccatggggagcggctgcccctggccgtgtcattgaggagtttcctagctctgctcccgccatctgattcggtaactcagtcacatacattcccagggaacatttgtgtgtgtgcacgttcagtagctgaagataaagccctgggtcaggtcagctgccccctggctggtctgtgaggcctaactttctggtgggggagttcctatgccttggtttgggtctgcaggcttagagtttgcaaatcaagctatgcaggttagtgtgcagatgaagtgtatcgaggaagcactgtttgtagttgacagccctaagttaaagaatgccctaagtaaaaacagcaggttgtgatgtgcacacacaggtggatgcggtcacagaggccttcgttgatgatcattttatatttttgtctacttgtccttgagtctttaactttctcagttctctcttgcaactttctatgtctcttttgaaaagttccgggttggccgggcgcagtggctcatgcctgtaatcccagcactttagggggctgaggcgggtggatcacgtgaggtcaagagtttgagaccagcctggccaacatggtgaaaccccatctctactaaaaatacaaaaagtagccaggtgtggtgcgcacacctttaataccagctactcaggaagctgaggcaggagaatcacttgaacccaggaggcggaggttgcagtgagctgagattgcgccattgcactacagtctgggcaacaagaatgaaactgtgtctcaaaaaaaaaaaaaaaaaagggtaagtgccaggtgacaggcccggagtagtttttggagaagcttgctgatgccaggggccctgcctttgcttgtgttgggagctgtctttcacgcgctacccagtgagaggcttagtgtacatggccccatttatacagttttctctctgacaatgaactcaggtgtcagcgagtgttccttctcatttccacttctcacttctctaatttacttttagctcatctaaaggctgcagataaaattattaacaatgacattttagcctcatctgtgaggcaatctgaccagccatgggtcccctcagattctagggtgtttgcagcagcccgactcagggcctgtggtgtgtgtgcctctccacagcgtacatcgtggccgtgtaccactgcatgaaggacgggctgaggcgcagtgctccagggagcacccccgtgaggaggaggggggccagccagctctcccaggaggccgagggggcggtcggagcccttcccggtgagcagtcttttgtcttttgaggccactgccatgtgccagtgacctaactcctctgtgtgccatgggtggtccccggtgccagtcccccaggtgggaggtccccagtgccagacaggtcccagacccctccctcagcatccttatacttccaggaatgatcaccttctctcaggattatgtcgcaaatgagctcactcagagcttcttcaccat

SEQ ID NO: 13469 - DNA, 1675 bp, Homo sapiens
cctgcaccgcacactccacaacatgatgaagaagctcttcctgcagtgagtgctcctcctccctgggctgtccaccgcgtcctcagctgggctggtcccttactccccagaaccagagacatggccagccagtgcctctgggataagtagtgtatttctgagtttgtggagcataacaatccaaaggatcccagagaaacacgcagctgctgctgcagcgtcgcctgcacatcctgcagagaacactaggtggcacctcctctcctgcccctttcctgcacaaagtcatgctacacattgtattgctgtgtgccttgttgttttagtgaaaatatgcctgtgtcaggagatctgtgtgaggacatgccatatgaaagaacatttagcctctctccagccttgtgccgttgttacaaatagcaaatcagtgagaggcttcatgcatgagctcatgcagatagatccgtggggtaattgctggggcgtagccctcttgcaggcctcagaggtgttgtaactcgggatgaatcctgatttgatggacttcaccagagcggccccacagaggccccttgtggacacttcttccctggccgcgcctcaccaacatggccggggattattacccaactgctgggataaaagtgcttcttggtgcagtcttaacttaggattcttacaatgaatgaagtcgaattttctcttctagtcctttgtctatttttctgtagttttggtggttcttctcttattaaatatcgaatgagttgtctccatacaaaaagttgccatttttctgtgataagaatttgctaattttttcctgtttttggttatcttttgcctttgtttgtggtggatttttgccatgcagaaatctttgctcttcattagcttctgggttctagtgtatctcggaggcttttctgcttcaggaccctcagctcttttccctcttggattttctgggtgccctctggctctccatgactgtggcgtctccaccacggactctcaacttgctccacaggctcatcgctgagttcaagcgcctggggtcatcagtcatctacgccaacttcaaccgcatcatcctctgtacaaagaagcgccgtgtggaagatgccatcgcttacgtggagtacatcaccagcagcatccattcaaaggagaccttccattctctgacaatttctttctctcgatgctgggaatttcttctctggatggatccatctaactatggcggaatcaaaggaaaagtttcatctcgtattcactgtggactgcaagactcccagaaagcagggggagcagaggatgagcaggaaaatgaggacgatgaggaggaaagagatggggaggaggaggaagaggcggaggaatccaacgtggaggatttactggaaaacaactggaacattttgcagtttttgccacaggcagcctcctgccagaactacttcctcatgattgtttcagcgtacatcgtggccgtgtaccactgcatgaaggacgggctgaggcgcagtgctccagggagcacccccgtgaggaggaggggggccagccagctctcccaggaggccgagggggcggtcggagcccttcccggaatgatcaccttctctcaggattatgtcgcaaatgagctcactcagagcttcttcaccat

SEQ ID NO: 13470 - DNA, 2199 bp, Homo sapiens
cggaatgttgtcctaggaagggctcaagtgcaggtgggaggccagagtgcgtgcagctgcactcaggagactcgcccgtcaccaggcgcttctcacagccccttcctctcctgagatcctgcccatggcactgtggtctggaggctgggctggtgacctctcgcactcttgctctgcctaggatggggcggtcctgcctcagtggctctgctccaactgtcaggcgccctacgactcctctgccatcgagatgacgctggtggaagttctacagaagaagctgatggccttcaccctgcaggacctggtgagtcgtgcatgccgcctgcccgtgtgccctggagtccacaggggggtttctgtgcactcccgggagccggggtgtgtgcaggtcctgaggcacgccctggtgtcttccaaggggcctgccctgcagaccagtccatgccctgagcctgatggactgttctgtccacactggttgagcacctgccttgggtcaagagctggccttgtgggtgcttcgttctagcggaaggaggcagacactcccaagtgtgaagagaaggaaaggaggaagagggagttgcacagctcggccacaggaaggtcttgccgaggggcatctgagcagaggctgggggacgcgccaagctgccgtgtggtggtgcacggcgttcaggcctgcaggatggagggagtgagcagggcctggaggaggcctcaggactgggcatctggggtggaacatccacagcgagggtgggtgtagggaaggcgctggcaccgtgggatgaggtcgtgcattttactcataaccgagggctggctgcacacagcaggggctcgaggcttactgatgggcccacgaatgtgtctcgcgagcctgtgaagaagcagcaggcaggtctggccagcgcgggagggctggcgcccatcggggctgctccctttcaggtctgcctgaagtgccgcggggtgaaggagaccagcatgcctgtgtactgcagctgcgcgggagacttcgccctcaccatccacacccaggtgggctctccctcatctgcctcggctcagcctggcctccttggcctcctctctgagtggactggggtctcactgtgcctgtttattcctgcaggtcttcatggaacagatcggaatattccggaacattgcccagcactacggcatgtcgtacctcctggagaccctggagtggctgctgcagaagaacccacagctgggccattagccagccccgggccccgggtgcctctgcgtccgtgccaggcctcctgatgccaaggccacatccccgtgcttccagtgaccagaccactgaccaccctgactgtccaaacctgtgaccccaggccagggaacggggaggaaaccaaagaaaaccattttcagggagctcagacgtcacaggagggagcgggagcaggatgtggccctggcctcgccagagcacctgaagaagcaggccgtgagcgaggctgcgagtgccctgggcgccgtttctcacgcagtgaatgcttttccaggcctctgttgcttcctgcaccacacctggtggggtgggagcgtcctctaggtgcccctagttctttgtcctgcctcccagagggaggaaaagcccctgggggcttctggctccctgagattgggctctgagacgagacgggttcccaaggccctggtggggctggagtctcacctgtttgcatggagaaatgggctggccccacagcctcacaggagcagtttgtgggctggtttccccaggaatccagaccctaacccgtgagaatctggattttggcttgtgagccctgcttatttggagccgggtctagagggaaccctctatcagcctcaggaaaacaagacctctgtgcacctcacttttggctcactgcagcccttgtccttcacctccacacaggaccagctggaagcagaaagaagaaaggccaatttcacagggcaccaaacaagtatgaaatgtaaatcagaaatgcagacaccccagacgagagcctcacaggagggagggggccccacaggctccccaggaggctcgtgtctttggcccagagccagccttagtttgtccctgccatctactgtctgaggccatcgctgctacactttgtttttatttgtatttcatactgaagtttctctaggttg

SEQ ID NO: 13471 - DNA, 2105 bp, Homo sapiens
cggaatgttgtcctaggaagggctcaagtgcaggtgggaggccagagtgcgtgcagctgcactcaggagactcgcccgtcaccaggcgcttctcacagccccttcctctcctgagatcctgcccatggcactgtggtctggaggctgggctggtgacctctcgcactcttgctctgcctaggatggggcggtcctgcctcagtggctctgctccaactgtcaggcgccctacgactcctctgccatcgagatgacgctggtggaagttctacagaagaagctgatggccttcaccctgcaggacctggtgagtcgtgcatgccgcctgcccgtgtgccctggagtccacaggggggtttctgtgcactcccgggagccggggtgtgtgcaggtcctgaggcacgccctggtgtcttccaaggggcctgccctgcagaccagtccatgccctgagcctgatggactgttctgtccacactggttgagcacctgccttgggtcaagagctggccttgtgggtgcttcgttctagcggaaggaggcagacactcccaagtgtgaagagaaggaaaggaggaagagggagttgcacagctcggccacaggaaggtcttgccgaggggcatctgagcagaggctgggggacgcgccaagctgccgtgtggtggtgcacggcgttcaggcctgcaggatggagggagtgagcagggcctggaggaggcctcaggactgggcatctggggtggaacatccacagcgagggtgggtgtagggaaggcgctggcaccgtgggatgaggtcgtgcattttactcataaccgagggctggctgcacacagcaggggctcgaggcttactgatgggcccacgaatgtgtctcgcgagcctgtgaagaagcagcaggcaggtctggccagcgcgggagggctggcgcccatcggggctgctccctttcaggtctgcctgaagtgccgcggggtgaaggagaccagcatgcctgtgtactgcagctgcgcgggagacttcgccctcaccatccacacccaggtcttcatggaacagatcggaatattccggaacattgcccagcactacggcatgtcgtacctcctggagaccctggagtggctgctgcagaagaacccacagctgggccattagccagccccgggccccgggtgcctctgcgtccgtgccaggcctcctgatgccaaggccacatccccgtgcttccagtgaccagaccactgaccaccctgactgtccaaacctgtgaccccaggccagggaacggggaggaaaccaaagaaaaccattttcagggagctcagacgtcacaggagggagcgggagcaggatgtggccctggcctcgccagagcacctgaagaagcaggccgtgagcgaggctgcgagtgccctgggcgccgtttctcacgcagtgaatgcttttccaggcctctgttgcttcctgcaccacacctggtggggtgggagcgtcctctaggtgcccctagttctttgtcctgcctcccagagggaggaaaagcccctgggggcttctggctccctgagattgggctctgagacgagacgggttcccaaggccctggtggggctggagtctcacctgtttgcatggagaaatgggctggccccacagcctcacaggagcagtttgtgggctggtttccccaggaatccagaccctaacccgtgagaatctggattttggcttgtgagccctgcttatttggagccgggtctagagggaaccctctatcagcctcaggaaaacaagacctctgtgcacctcacttttggctcactgcagcccttgtccttcacctccacacaggaccagctggaagcagaaagaagaaaggccaatttcacagggcaccaaacaagtatgaaatgtaaatcagaaatgcagacaccccagacgagagcctcacaggagggagggggccccacaggctccccaggaggctcgtgtctttggcccagagccagccttagtttgtccctgccatctactgtctgaggccatcgctgctacactttgtttttatttgtatttcatactgaagtttctctaggttg

SEQ ID NO: 13472 - DNA, 3478 bp, Homo sapiens
tttctctcgatgctgggaatttcttctctggatggatccatctaactatggcggaatcaaaggaaaagtttcatctcgtattcactgtggactggtaagcgagctgcagtgtggcacccgagccagctttgggggtcgcgttcattcctgcagcaagtgctgagtgctcagggccccggcgggcctggccgtgagcagcagacactgcacccgcatcctgccctcatgaacacggggagggaccatgcgcagacaagcacgtcagtgtggagtgtggcgtcagccctggtgatggcaaggcttgccgtgggcaacagggaggtggaggcccatgaggtggtgacagggaatccgagagctgatgaagtgcaccatagttgtgcgagcataaggcgcctccagcggatggacaccagggaggcaaagcacaagtcagtggagcagtggttgcagatgcaggcagagagctgacagagccaggcaacttgggcatggcagggcagggcctcggctttcgtggggatgggagcttctgtgtgggtgatgttggagctttcttggccccatgtggataacccaccattggagggcacaggcaggtaaagccggttagtgcctgtgtcagggagatgctgggcagcgaggttggtgagaagggcctgggtgggctttgaagtggagccaaggggccagcggatcggatgtgtgtaaatgcccaggtgcgggccaggctgtgggtgagtggaggtggctgtcgggagcagtctggggaaggggtcacgtctggctggggctcatggtgtttgcaaggttgagacgtgggtggtcagctggtgcaggagtggccagagagtggctgggtgggttgagaggaggcctgtgtcctccacaggggccctcatagtggactgagaggaagctgtgggtaccagagccaggggctcagatgtcagagggaaagccctttgtaaggacgcagacgcttctgggagctggcaggatgaagccaagactgcccaggacacctggatgggagcgattctggttggagttgggggataaaccctgattgaagggattcagaacaaagtgggagggtagaaactcaggcagtgtagaccgctctgaggaggggatcagcgtgtggtcagggcaggtggcagtgggtgtcggtgtctacacagacgtggatggtgccgtggcacgaacacaggctgcgcgggaggctgggtctgtgatggggtcgtgccgtcccaggagattcatggactcagaggagagaacagtcaccgggaagctctggctggttctttcgtccttggggggtgggagttcaacaattaaagtgaactctggaagagcagagtgaagctcacagtcccaggtcacgagcacttctgtgtgccaggcgcttcccacaaagcactttgtactgggagccaccctgggggattcacgcaggctccaggggatgccttgactgcgaggaaggcctctggtcaaacggggcagatggacccaggttggaggagccttcgctgtggcatcctacccctctaccaggccgcgatggtgcaaacacagccgcgttgtctcatgtgttacagcaagactcccagaaagcagggggagcagaggatgagcaggaaaatgaggacgatgaggaggaaagagatggggaggaggaggaagaggcggaggaatccaacgtggaggatttactggaaaacaactggaacattttgcagtttttgccacaggcagcctcctgccagaactacttcctcatgattgtttcaggtaagcccagagcccagggctgcgcagcccccactgaagggactcatggttagtagatgtggctcctgtgccatggtatcgcaagaagggagacagggaaaatcagatcgggcggagcctgcccagcagttgggactttgtgagccgaggggcctcctctccaggctccaggcatgttccactggagggcccggagaggggtgactgtcttccctccagcctttgctctcaggaaactccatggggagcggctgcccctggccgtgtcattgaggagtttcctagctctgctcccgccatctgattcggtaactcagtcacatacattcccagggaacatttgtgtgtgtgcacgttcagtagctgaagataaagccctgggtcaggtcagctgccccctggctggtctgtgaggcctaactttctggtgggggagttcctatgccttggtttgggtctgcaggcttagagtttgcaaatcaagctatgcaggttagtgtgcagatgaagtgtatcgaggaagcactgtttgtagttgacagccctaagttaaagaatgccctaagtaaaaacagcaggttgtgatgtgcacacacaggtggatgcggtcacagaggccttcgttgatgatcattttatatttttgtctacttgtccttgagtctttaactttctcagttctctcttgcaactttctatgtctcttttgaaaagttccgggttggccgggcgcagtggctcatgcctgtaatcccagcactttagggggctgaggcgggtggatcacgtgaggtcaagagtttgagaccagcctggccaacatggtgaaaccccatctctactaaaaatacaaaaagtagccaggtgtggtgcgcacacctttaataccagctactcaggaagctgaggcaggagaatcacttgaacccaggaggcggaggttgcagtgagctgagattgcgccattgcactacagtctgggcaacaagaatgaaactgtgtctcaaaaaaaaaaaaaaaaaagggtaagtgccaggtgacaggcccggagtagtttttggagaagcttgctgatgccaggggccctgcctttgcttgtgttgggagctgtctttcacgcgctacccagtgagaggcttagtgtacatggccccatttatacagttttctctctgacaatgaactcaggtgtcagcgagtgttccttctcatttccacttctcacttctctaatttacttttagctcatctaaaggctgcagataaaattattaacaatgacattttagcctcatctgtgaggcaatctgaccagccatgggtcccctcagattctagggtgtttgcagcagcccgactcagggcctgtggtgtgtgtgcctctccacagcgtacatcgtggccgtgtaccactgcatgaaggacgggctgaggcgcagtgctccagggagcacccccgtgaggaggaggggggccagccagctctcccaggaggccgagggggcggtcggagcccttcccggtgagcagtcttttgtcttttgaggccactgccatgtgccagtgacctaactcctctgtgtgccatgggtggtccccggtgccagtcccccaggtgggaggtccccagtgccagacaggtcccagacccctccctcagcatccttatacttccagg

SEQ ID NO: 13473 - DNA, 575 bp, Homo sapiens
tttctctcgatgctgggaatttcttctctggatggatccatctaactatggcggaatcaaaggaaaagtttcatctcgtattcactgtggactgcaagactcccagaaagcagggggagcagaggatgagcaggaaaatgaggacgatgaggaggaaagagatggggaggaggaggaagaggcggaggaatccaacgtggaggatttactggaaaacaactggaacattttgcagtttttgccacaggcagcctcctgccagaactacttcctcatgattgtttcagcgtacatcgtggccgtgtaccactgcatgaaggacgggctgaggcgcagtgctccagggagcacccccgtgaggaggaggggggccagccagctctcccaggaggccgagggggcggtcggagcccttcccggtgagcagtcttttgtcttttgaggccactgccatgtgccagtgacctaactcctctgtgtgccatgggtggtccccggtgccagtcccccaggtgggaggtccccagtgccagacaggtcccagacccctccctcagcatccttatacttccagg

SEQ ID NO: 13474 - DNA, 9463 bp, Homo sapiens
ggctgcgcagcccccactgaagggactcatggttagtagatgtggctcctgtgccatggtatcgcaagaagggagacagggaaaatcagatcgggcggagcctgcccagcagttgggactttgtgagccgaggggcctcctctccaggctccaggcatgttccactggagggcccggagaggggtgactgtcttccctccagcctttgctctcaggaaactccatggggagcggctgcccctggccgtgtcattgaggagtttcctagctctgctcccgccatctgattcggtaactcagtcacatacattcccagggaacatttgtgtgtgtgcacgttcagtagctgaagataaagccctgggtcaggtcagctgccccctggctggtctgtgaggcctaactttctggtgggggagttcctatgccttggtttgggtctgcaggcttagagtttgcaaatcaagctatgcaggttagtgtgcagatgaagtgtatcgaggaagcactgtttgtagttgacagccctaagttaaagaatgccctaagtaaaaacagcaggttgtgatgtgcacacacaggtggatgcggtcacagaggccttcgttgatgatcattttatatttttgtctacttgtccttgagtctttaactttctcagttctctcttgcaactttctatgtctcttttgaaaagttccgggttggccgggcgcagtggctcatgcctgtaatcccagcactttagggggctgaggcgggtggatcacgtgaggtcaagagtttgagaccagcctggccaacatggtgaaaccccatctctactaaaaatacaaaaagtagccaggtgtggtgcgcacacctttaataccagctactcaggaagctgaggcaggagaatcacttgaacccaggaggcggaggttgcagtgagctgagattgcgccattgcactacagtctgggcaacaagaatgaaactgtgtctcaaaaaaaaaaaaaaaaaagggtaagtgccaggtgacaggcccggagtagtttttggagaagcttgctgatgccaggggccctgcctttgcttgtgttgggagctgtctttcacgcgctacccagtgagaggcttagtgtacatggccccatttatacagttttctctctgacaatgaactcaggtgtcagcgagtgttccttctcatttccacttctcacttctctaatttacttttagctcatctaaaggctgcagataaaattattaacaatgacattttagcctcatctgtgaggcaatctgaccagccatgggtcccctcagattctagggtgtttgcagcagcccgactcagggcctgtggtgtgtgtgcctctccacagcgtacatcgtggccgtgtaccactgcatgaaggacgggctgaggcgcagtgctccagggagcacccccgtgaggaggaggggggccagccagctctcccaggaggccgagggggcggtcggagcccttcccggtgagcagtcttttgtcttttgaggccactgccatgtgccagtgacctaactcctctgtgtgccatgggtggtccccggtgccagtcccccaggtgggaggtccccagtgccagacaggtcccagacccctccctcagcatccttatacttccaggaatgatcaccttctctcaggattatgtcgcaaatgagctcactcagagcttcttcaccatcactcagaagattcagaagaaagtcacaggctctcggaactccactgagctctcagagatgtttcctgtcctccccggttcccacttgctgctcaataaccctgccctggagttcatcaaatacgtgtgcaaggtgagagtgccagcgtgcgtgtgaggagaggacactaacgtacatgtgtaaggcgagaatgttactgtgtgcaaggtgaggctgtaatgcgtgcaccatgaacgtgctagcgtatgtgtgcaagataaggacaccgacatacctgtgcatggtaaggatgttaatgaatgcaggatgaggctttcagctgtgcaagggggaggtacctacatgtgtagggtcagggtgccagcgtgtgcaaggtgaggagcaggtgtaagttacttgttcattccaccaacatttatcatgtccctgtcacatgcagccacagttgcggcatctgtgctcaggtgtgagcaagacaggaaaggtcctgccttgtggggcctgtctgctgccagccgacccgagaagggagagggccgttcagaggcgcaggtgctgtggggatggagcctgtgaggggcgctgggaccaggtgcaggaggagggaagacgcaaaggccctggggggtgagcttggtgtgttggtgaaggcacagccgaacacccagtgccaccggctgggaggatgggtcaccggagaccagtaggctggaccaggacccagagctgatgagatgagagcttgctcggatgctgaggcctttctgggaaaggcaggctgagtccaaggagggataatattaccagataacgaccgcgggtgtcagcccttacagagcagagtgcttcactgtccatttcctcactcagccttcccagcaaactgcatctcacacacggctaaggttacgctggagatcaggtgacagcctcaaggtctggttgtggtgaagaagtgtttttagctcaccattttaattcctttattgacttttacatattttaaattcatttttattaaggtgtaatttatatacagtaaaatgtactctgtggcgtgcagttctgtgatttttcctaggtgaatggaattgcatcatcatcagcaggatacaggatagtcaccgcccgaaaacattccccgcactgccctcctcacctgacaccctttagccactggtgtgtcttccgtccctgcattttttttctcttctagagcgtcacataagtagagacattgtgcagccttttggatgtggcttcttagcaaaacacacctggaattggttcatccacgcgctcgtgtgtatcagaactccctttctgttgcgagcagtgtccattgtgtgggcaaaccacagcttgcttttcattcactggtggaaggacatttgcgttgctttcactttggggtgattaataacaaagctgctgtaaacattctgtaggtgtaggtttttgtgtgaacataaatttcaattctctgaggtcattttttaagtgtttgtttaacttgataagaaactgccaaactcttttctgaagtggctgcaccgtgtcagggtctcctcagcagtgtgtggcaagagttgctgttccacatcctcaccaggacttggtatcattgggtttttaaattgcagctattccagtaggtgtgtagtggtatcgcattgtgtttctgatttgcatttccctggcgactaatgatgtggagcttttttttggagatggagattcactctcattgcccaggctggggtgcagtggcgcgatctcagctcactgcaacctctgcctcctggttagctgggattacaggtgcctgccaccacgcccccccaattttttgtatttttagtggagacggagtttcaccatgttggccaggctggtctcgaactcctgacctcaagtgatccacctgcttcggcctcccaaagtgctgggattacaggcgtgagccaccacgcctggctgtggggcattttttaatgggcttctttgctgtcctggtgtctgtcctctttggtgaagttttaggttttatccatttgagttaatttttatacaatgtgcatgctgtagatccaagtccatatttctgcatgggatatctgattgcaggcatatcctgtcttattgtgcttcgaagcggttacctgtatttttataaatggaaggtttgtgggaatcttgtcttgagcaagtctcatctttccaacagcatgtgctcactgtgtctgtgtcacatgttggtaactctcaggatatttcagacttttccactattattatatcagccgtgataacctttgatgcttctatggcaattgttttggggcgccatgaaccgtgcgcatagaagacaatgagcttcatcaatgttgtgtgtgtcctgattgctccactcacgggccattctgccatctcgccctttctccttgggcctccccagtcccggtgacacaacactatagaaattaggtaagttaatagccctgcaatggcctctacgtgttcaagtgaaaggaagagtcacacgtctctcactttacataaagagctagaaatggctaaacttaggaaggcatgttgaaagtcgagacaggctgaaagctaggcctctcacaccagttagccaagtcaactgcaaaggaaaggttcttgaaggaaattacaagtgctcctccagtgaacacatgaaagataaagaagtgaagcatcctgttgctgatatggagaaagttgagtctggatagatcaaaccagatataacatcccctcaagccagagcctaatccagagcaaggctctcactctgttcagttccatgaaggctgagagctgaggaggctgtagaaggaaagcttgaagctggcggaggttggttcatggggtttagggagagaagccgtcccagtaacataaaagggcaaatgaggcaacaggtgcgggtggagaggctgcagcgagttctccagaagatctgtctgggatcattggcgaaggtggctacactgacaacatattttccgtgtagacaaaacagccttcttttggaagaagatgccatctaggactttcatagctagagaggaggcctcagagcctggcttcagaggaaaggctgactcttgttagcggcagatgcagctggtgactttaagtcgaagccactgctcattcagtcttttaaggccactacctgcagctcagaaaaagattccttccaaaatagtactgctcattgacagtggacctggtcacccaagagctctgatggagacgtacaaggagatgaatgttgctttcatgcctgcggacacagcatcccttctgcagcccatggatcaaggagcaatttcgactttcaacgtttattatttaaaaatatatttcatgaggctatagctgccatagatagtgattcccctgatggaactgggcacagtaaattgaaaaccttctagaaaggattcaccattctggatgccattaagaacatttgtgactcatgggagaaggggtcaaaatatcaacattaacaggagtgtggaagaagttgattctgaccctcatggatgactttgagggattcaagactattgtgggaggcgtgactgcagatgtggtggaaacagcaagggaactagaattagaagtggagcctgaagatgtgaccaagttgctgcaatctcaggacaaaatttaacagataaagagtggcttttcatggatgagcagtaaagtagttttttgttttgttttgttttgttttgttttgttttgttttgttttgagatggagcctccttgctctgtcgcccaggctggaatacagtggtgcggtcttggctcgctgcaacctccgcctcctgggttcaagtgattttcctacatcagcctcccaagtagctgggattacaggtgcccgccacaatgctcagctaatttttgtatttttaatagagacagagtttcaccatattggtcaggctggtctcaaactcctgacctcaggtgatccacccgccttggcctcccaaagtgctgggattacaggcacaagccaccacgcccagcccaaaaaagtagttttttttttaagatggagtctcgcactctcgcccaggctggagtgcagtggcgcgatcttggctcactgcaagctccctcccaggttcacgccattctcctgcctcagcctcccgagtagctgggactacaggcaagcgccaccacacctggctaattttcgtatttttagtagagacagggtttcaccatgttagccaggatggtctcgatctcctgaccttgtgatctgcccacctcggcctcccaaagtgctgggattacaggcgtgagccaccgcacctggccaaaaagtagtttcttgagatgaaagtgaacattgtggaaatgacaaaggattgagaatattccataaacttagttgccaaagcagcagcagaatttgagaggaccgactccaattttgaaagaagttctactgtgggtgaaatgttatcaaacagcatcacatgctacagagtctttcatggaaggaagagtcagttgatgcagcaaacttcattgttgtcttgttttaagaaattgccacagccaccccaactctcagcaataccaccctgatcagtcagcagccgtttacattgaggcaagaccctccaccagcaaaacgattgcgactcactgaaggctcagatgatcgttaatatttctgagcaataaaacattttaaaattaaggtacatacattgttttttagacataatgctgttatgcacttaatagactacagtatagggtaaacctaagttttgtctgggtagagtgactcacacctgtaatcccagcactttgggaggtcagggtgggttgactgtttgagcccagcagttcaagaccagcctgggcaacatggcaaaacccatctttacaacgattacaaacattacctgggcatggtggcgcatgcctgtcgtcccagctactgggaaggctgaggtagaaggatcaattgagccccaagaggtcaatgctgcagtgagccatgattgtgccactgcagtccattctgggtgacagagtgaaatcctgtcccaaaataaaaaaaatcacatagctttttttttttttgagatggagtctcactctgtcactcaggctggagtgcagtggtgcaatcttggctaactgcaacctccacctcctgggttcaagcgattccctgcttcagcctcccaggtagctgggatcacaggtgcacccgccaccatgcccagccaatttttgtatttttaatagaaatggggtttcactgtgttggccaggatggtcttgaactcctgacctcaggccatccacctgccttggcctaccaaagtgctgggattacaggcgtgagccaccacaaatcacgtaacttttatatgtactgagaaaacaagcgtgagccaaaaatcatgtaacttttatatgcactgagaaaccaaataatttgtgtgatttgctttattgtgatgttagtccattgaggtggtttgaaaccgaacttgccatatctccaagatacgcttgtattcaagaaccatttgttgaaaagactattctttttctatcgaatcatctttgtacctttttccataacttagtaaccttatctatgtgagtctctttctggattatgtattctttttttcgatcttgcattcaatttgctaatatctcgttgcgcatttttgtgtctgtgctcaggctgttattggtctgtagtttcttagtacggtctttggttctagtatcaggggatgctggcctcatagaatgggttgagtgctctctctcttcagtgttttgaaagatactgtgtagaatcagcagcatttcttccttaaatgtttagtaaattccccagggaagcctgtcctcaccgatggaaaactgctaatgtagagaagtcagctgaggcgtctaaagggactaaggaagggaggaaaggacaccaggaaactgtagcctaaggtccagagggttctggtccagacagagcagcagggaggccccgggagctccttcccgatgtgggctgtggtctctgcaggtgctgtccctggacaccaacatcacaaaccaggtgaataagctgaaccgagacctgcttcgcctggtggatgtcggcgagttctccgaggaggcccagttccgagacccctgccgctcctacgtgcttcctgaggtcatctgccgcagctgtaacttctgccgcgacctggacctgtgtaaagactcttccttctcagaggtgcggctgagctccagcgggcccttcactgtggagcagaacatccgagggcactgcggtgtcttgagggcttctgcagctccagctctgtgggtcacacctgctgcccctctgactcacatggattggcaacaggccccttcccaggcctccccacaccatgttcggaatgttgtcctaggaagggctcaagtgcaggtgggaggccagagtgcgtgcagctgcactcaggagactcgcccgtcaccaggcgcttctcacagccccttcctctcctgagatcctgcccatggcactgtggtctggaggctgggctggtgacctctcgcactcttgctctgcctaggatggggcggtcctgcctcagtggctctgctccaactgtcaggcgccctacgactcctctgccatcgagatgacgctggtggaagttctacagaagaagctgatggccttcaccctgcaggacctggtgagtcgtgcatgccgcctgcccgtgtgccctggagtccacaggggggtttctgtgcactcccgggagccggggtgtgtgcaggtcctgaggcacgccctggtgtcttccaaggggcctgccctgcagaccagtccatgccctgagcctgatggactgttctgtccacactggttgagcacctgccttgggtcaagagctggccttgtgggtgcttcgttctagcggaaggaggcagacactcccaagtgtgaagagaaggaaaggaggaagagggagttgcacagctcggccacaggaaggtcttgccgaggggcatctgagcagaggctgggggacgcgccaagctgccgtgtggtggtgcacggcgttcaggcctgcaggatggagggagtgagcagggcctggaggaggcctcaggactgggcatctggggtggaacatccacagcgagggtgggtgtagggaaggcgctggcaccgtgggatgaggtcgtgcattttactcataaccgagggctggctgcacacagcaggggctcgaggcttactgatgggcccacgaatgtgtctcgcgagcctgtgaagaagcagcaggcaggtctggccagcgcgggagggctggcgcccatcggggctgctccctttcaggtctgcctgaagtgccgcggggtgaaggagaccagcatgcctgtgtactgcagctgcgcgggagacttcgccctcaccatccacacccaggtgggctctccctcatctgcctcggctcagcctggcctccttggcctcctctctgagtggactggggtctcactgtgcctgtttattcctgcaggtcttcatggaacagatcggaatattccggaacattgcccagcactacggcatgtcgtacctcctggagaccctggagtggctgctgcagaagaacccacagctg

SEQ ID NO: 13475 - DNA, 2221 bp, Homo sapiens
ggctgcgcagcccccactgaagggactcatggttagtagatgtggctcctgtgccatggtatcgcaagaagggagacagggaaaatcagatcgggcggagcctgcccagcagttgggactttgtgagccgaggggcctcctctccaggctccaggcatgttccactggagggcccggagaggggtgactgtcttccctccagcctttgctctcaggaaactccatggggagcggctgcccctggccgtgtcattgaggagtttcctagctctgctcccgccatctgattcggtaactcagtcacatacattcccagggaacatttgtgtgtgtgcacgttcagtagctgaagataaagccctgggtcaggtcagctgccccctggctggtctgtgaggcctaactttctggtgggggagttcctatgccttggtttgggtctgcaggcttagagtttgcaaatcaagctatgcaggttagtgtgcagatgaagtgtatcgaggaagcactgtttgtagttgacagccctaagttaaagaatgccctaagtaaaaacagcaggttgtgatgtgcacacacaggtggatgcggtcacagaggccttcgttgatgatcattttatatttttgtctacttgtccttgagtctttaactttctcagttctctcttgcaactttctatgtctcttttgaaaagttccgggttggccgggcgcagtggctcatgcctgtaatcccagcactttagggggctgaggcgggtggatcacgtgaggtcaagagtttgagaccagcctggccaacatggtgaaaccccatctctactaaaaatacaaaaagtagccaggtgtggtgcgcacacctttaataccagctactcaggaagctgaggcaggagaatcacttgaacccaggaggcggaggttgcagtgagctgagattgcgccattgcactacagtctgggcaacaagaatgaaactgtgtctcaaaaaaaaaaaaaaaaaagggtaagtgccaggtgacaggcccggagtagtttttggagaagcttgctgatgccaggggccctgcctttgcttgtgttgggagctgtctttcacgcgctacccagtgagaggcttagtgtacatggccccatttatacagttttctctctgacaatgaactcaggtgtcagcgagtgttccttctcatttccacttctcacttctctaatttacttttagctcatctaaaggctgcagataaaattattaacaatgacattttagcctcatctgtgaggcaatctgaccagccatgggtcccctcagattctagggtgtttgcagcagcccgactcagggcctgtggtgtgtgtgcctctccacagcgtacatcgtggccgtgtaccactgcatgaaggacgggctgaggcgcagtgctccagggagcacccccgtgaggaggaggggggccagccagctctcccaggaggccgagggggcggtcggagcccttcccggaatgatcaccttctctcaggattatgtcgcaaatgagctcactcagagcttcttcaccatcactcagaagattcagaagaaagtcacaggctctcggaactccactgagctctcagagatgtttcctgtcctccccggttcccacttgctgctcaataaccctgccctggagttcatcaaatacgtgtgcaaggtgctgtccctggacaccaacatcacaaaccaggtgaataagctgaaccgagacctgcttcgcctggtggatgtcggcgagttctccgaggaggcccagttccgagacccctgccgctcctacgtgcttcctgaggtcatctgccgcagctgtaacttctgccgcgacctggacctgtgtaaagactcttccttctcagaggatggggcggtcctgcctcagtggctctgctccaactgtcaggcgccctacgactcctctgccatcgagatgacgctggtggaagttctacagaagaagctgatggccttcaccctgcaggacctggtctgcctgaagtgccgcggggtgaaggagaccagcatgcctgtgtactgcagctgcgcgggagacttcgccctcaccatccacacccaggtcttcatggaacagatcggaatattccggaacattgcccagcactacggcatgtcgtacctcctggagaccctggagtggctgctgcagaagaacccacagctg

SEQ ID NO: 13476 - DNA, 9734 bp, Homo sapiens
ttctctgacaatttctttctctcgatgctgggaatttcttctctggatggatccatctaactatggcggaatcaaaggaaaagtttcatctcgtattcactgtggactggtaagcgagctgcagtgtggcacccgagccagctttgggggtcgcgttcattcctgcagcaagtgctgagtgctcagggccccggcgggcctggccgtgagcagcagacactgcacccgcatcctgccctcatgaacacggggagggaccatgcgcagacaagcacgtcagtgtggagtgtggcgtcagccctggtgatggcaaggcttgccgtgggcaacagggaggtggaggcccatgaggtggtgacagggaatccgagagctgatgaagtgcaccatagttgtgcgagcataaggcgcctccagcggatggacaccagggaggcaaagcacaagtcagtggagcagtggttgcagatgcaggcagagagctgacagagccaggcaacttgggcatggcagggcagggcctcggctttcgtggggatgggagcttctgtgtgggtgatgttggagctttcttggccccatgtggataacccaccattggagggcacaggcaggtaaagccggttagtgcctgtgtcagggagatgctgggcagcgaggttggtgagaagggcctgggtgggctttgaagtggagccaaggggccagcggatcggatgtgtgtaaatgcccaggtgcgggccaggctgtgggtgagtggaggtggctgtcgggagcagtctggggaaggggtcacgtctggctggggctcatggtgtttgcaaggttgagacgtgggtggtcagctggtgcaggagtggccagagagtggctgggtgggttgagaggaggcctgtgtcctccacaggggccctcatagtggactgagaggaagctgtgggtaccagagccaggggctcagatgtcagagggaaagccctttgtaaggacgcagacgcttctgggagctggcaggatgaagccaagactgcccaggacacctggatgggagcgattctggttggagttgggggataaaccctgattgaagggattcagaacaaagtgggagggtagaaactcaggcagtgtagaccgctctgaggaggggatcagcgtgtggtcagggcaggtggcagtgggtgtcggtgtctacacagacgtggatggtgccgtggcacgaacacaggctgcgcgggaggctgggtctgtgatggggtcgtgccgtcccaggagattcatggactcagaggagagaacagtcaccgggaagctctggctggttctttcgtccttggggggtgggagttcaacaattaaagtgaactctggaagagcagagtgaagctcacagtcccaggtcacgagcacttctgtgtgccaggcgcttcccacaaagcactttgtactgggagccaccctgggggattcacgcaggctccaggggatgccttgactgcgaggaaggcctctggtcaaacggggcagatggacccaggttggaggagccttcgctgtggcatcctacccctctaccaggccgcgatggtgcaaacacagccgcgttgtctcatgtgttacagcaagactcccagaaagcagggggagcagaggatgagcaggaaaatgaggacgatgaggaggaaagagatggggaggaggaggaagaggcggaggaatccaacgtggaggatttactggaaaacaactggaacattttgcagtttttgccacaggcagcctcctgccagaactacttcctcatgattgtttcaggtaagcccagagcccagggctgcgcagcccccactgaagggactcatggttagtagatgtggctcctgtgccatggtatcgcaagaagggagacagggaaaatcagatcgggcggagcctgcccagcagttgggactttgtgagccgaggggcctcctctccaggctccaggcatgttccactggagggcccggagaggggtgactgtcttccctccagcctttgctctcaggaaactccatggggagcggctgcccctggccgtgtcattgaggagtttcctagctctgctcccgccatctgattcggtaactcagtcacatacattcccagggaacatttgtgtgtgtgcacgttcagtagctgaagataaagccctgggtcaggtcagctgccccctggctggtctgtgaggcctaactttctggtgggggagttcctatgccttggtttgggtctgcaggcttagagtttgcaaatcaagctatgcaggttagtgtgcagatgaagtgtatcgaggaagcactgtttgtagttgacagccctaagttaaagaatgccctaagtaaaaacagcaggttgtgatgtgcacacacaggtggatgcggtcacagaggccttcgttgatgatcattttatatttttgtctacttgtccttgagtctttaactttctcagttctctcttgcaactttctatgtctcttttgaaaagttccgggttggccgggcgcagtggctcatgcctgtaatcccagcactttagggggctgaggcgggtggatcacgtgaggtcaagagtttgagaccagcctggccaacatggtgaaaccccatctctactaaaaatacaaaaagtagccaggtgtggtgcgcacacctttaataccagctactcaggaagctgaggcaggagaatcacttgaacccaggaggcggaggttgcagtgagctgagattgcgccattgcactacagtctgggcaacaagaatgaaactgtgtctcaaaaaaaaaaaaaaaaaagggtaagtgccaggtgacaggcccggagtagtttttggagaagcttgctgatgccaggggccctgcctttgcttgtgttgggagctgtctttcacgcgctacccagtgagaggcttagtgtacatggccccatttatacagttttctctctgacaatgaactcaggtgtcagcgagtgttccttctcatttccacttctcacttctctaatttacttttagctcatctaaaggctgcagataaaattattaacaatgacattttagcctcatctgtgaggcaatctgaccagccatgggtcccctcagattctagggtgtttgcagcagcccgactcagggcctgtggtgtgtgtgcctctccacagcgtacatcgtggccgtgtaccactgcatgaaggacgggctgaggcgcagtgctccagggagcacccccgtgaggaggaggggggccagccagctctcccaggaggccgagggggcggtcggagcccttcccggtgagcagtcttttgtcttttgaggccactgccatgtgccagtgacctaactcctctgtgtgccatgggtggtccccggtgccagtcccccaggtgggaggtccccagtgccagacaggtcccagacccctccctcagcatccttatacttccaggaatgatcaccttctctcaggattatgtcgcaaatgagctcactcagagcttcttcaccatcactcagaagattcagaagaaagtcacaggctctcggaactccactgagctctcagagatgtttcctgtcctccccggttcccacttgctgctcaataaccctgccctggagttcatcaaatacgtgtgcaaggtgagagtgccagcgtgcgtgtgaggagaggacactaacgtacatgtgtaaggcgagaatgttactgtgtgcaaggtgaggctgtaatgcgtgcaccatgaacgtgctagcgtatgtgtgcaagataaggacaccgacatacctgtgcatggtaaggatgttaatgaatgcaggatgaggctttcagctgtgcaagggggaggtacctacatgtgtagggtcagggtgccagcgtgtgcaaggtgaggagcaggtgtaagttacttgttcattccaccaacatttatcatgtccctgtcacatgcagccacagttgcggcatctgtgctcaggtgtgagcaagacaggaaaggtcctgccttgtggggcctgtctgctgccagccgacccgagaagggagagggccgttcagaggcgcaggtgctgtggggatggagcctgtgaggggcgctgggaccaggtgcaggaggagggaagacgcaaaggccctggggggtgagcttggtgtgttggtgaaggcacagccgaacacccagtgccaccggctgggaggatgggtcaccggagaccagtaggctggaccaggacccagagctgatgagatgagagcttgctcggatgctgaggcctttctgggaaaggcaggctgagtccaaggagggataatattaccagataacgaccgcgggtgtcagcccttacagagcagagtgcttcactgtccatttcctcactcagccttcccagcaaactgcatctcacacacggctaaggttacgctggagatcaggtgacagcctcaaggtctggttgtggtgaagaagtgtttttagctcaccattttaattcctttattgacttttacatattttaaattcatttttattaaggtgtaatttatatacagtaaaatgtactctgtggcgtgcagttctgtgatttttcctaggtgaatggaattgcatcatcatcagcaggatacaggatagtcaccgcccgaaaacattccccgcactgccctcctcacctgacaccctttagccactggtgtgtcttccgtccctgcattttttttctcttctagagcgtcacataagtagagacattgtgcagccttttggatgtggcttcttagcaaaacacacctggaattggttcatccacgcgctcgtgtgtatcagaactccctttctgttgcgagcagtgtccattgtgtgggcaaaccacagcttgcttttcattcactggtggaaggacatttgcgttgctttcactttggggtgattaataacaaagctgctgtaaacattctgtaggtgtaggtttttgtgtgaacataaatttcaattctctgaggtcattttttaagtgtttgtttaacttgataagaaactgccaaactcttttctgaagtggctgcaccgtgtcagggtctcctcagcagtgtgtggcaagagttgctgttccacatcctcaccaggacttggtatcattgggtttttaaattgcagctattccagtaggtgtgtagtggtatcgcattgtgtttctgatttgcatttccctggcgactaatgatgtggagcttttttttggagatggagattcactctcattgcccaggctggggtgcagtggcgcgatctcagctcactgcaacctctgcctcctggttagctgggattacaggtgcctgccaccacgcccccccaattttttgtatttttagtggagacggagtttcaccatgttggccaggctggtctcgaactcctgacctcaagtgatccacctgcttcggcctcccaaagtgctgggattacaggcgtgagccaccacgcctggctgtggggcattttttaatgggcttctttgctgtcctggtgtctgtcctctttggtgaagttttaggttttatccatttgagttaatttttatacaatgtgcatgctgtagatccaagtccatatttctgcatgggatatctgattgcaggcatatcctgtcttattgtgcttcgaagcggttacctgtatttttataaatggaaggtttgtgggaatcttgtcttgagcaagtctcatctttccaacagcatgtgctcactgtgtctgtgtcacatgttggtaactctcaggatatttcagacttttccactattattatatcagccgtgataacctttgatgcttctatggcaattgttttggggcgccatgaaccgtgcgcatagaagacaatgagcttcatcaatgttgtgtgtgtcctgattgctccactcacgggccattctgccatctcgccctttctccttgggcctccccagtcccggtgacacaacactatagaaattaggtaagttaatagccctgcaatggcctctacgtgttcaagtgaaaggaagagtcacacgtctctcactttacataaagagctagaaatggctaaacttaggaaggcatgttgaaagtcgagacaggctgaaagctaggcctctcacaccagttagccaagtcaactgcaaaggaaaggttcttgaaggaaattacaagtgctcctccagtgaacacatgaaagataaagaagtgaagcatcctgttgctgatatggagaaagttgagtctggatagatcaaaccagatataacatcccctcaagccagagcctaatccagagcaaggctctcactctgttcagttccatgaaggctgagagctgaggaggctgtagaaggaaagcttgaagctggcggaggttggttcatggggtttagggagagaagccgtcccagtaacataaaagggcaaatgaggcaacaggtgcgggtggagaggctgcagcgagttctccagaagatctgtctgggatcattggcgaaggtggctacactgacaacatattttccgtgtagacaaaacagccttcttttggaagaagatgccatctaggactttcatagctagagaggaggcctcagagcctggcttcagaggaaaggctgactcttgttagcggcagatgcagctggtgactttaagtcgaagccactgctcattcagtcttttaaggccactacctgcagctcagaaaaagattccttccaaaatagtactgctcattgacagtggacctggtcacccaagagctctgatggagacgtacaaggagatgaatgttgctttcatgcctgcggacacagcatcccttctgcagcccatggatcaaggagcaatttcgactttcaacgtttattatttaaaaatatatttcatgaggctatagctgccatagatagtgattcccctgatggaactgggcacagtaaattgaaaaccttctagaaaggattcaccattctggatgccattaagaacatttgtgactcatgggagaaggggtcaaaatatcaacattaacaggagtgtggaagaagttgattctgaccctcatggatgactttgagggattcaagactattgtgggaggcgtgactgcagatgtggtggaaacagcaagggaactagaattagaagtggagcctgaagatgtgaccaagttgctgcaatctcaggacaaaatttaacagataaagagtggcttttcatggatgagcagtaaagtagttttttgttttgttttgttttgttttgttttgttttgttttgttttgagatggagcctccttgctctgtcgcccaggctggaatacagtggtgcggtcttggctcgctgcaacctccgcctcctgggttcaagtgattttcctacatcagcctcccaagtagctgggattacaggtgcccgccacaatgctcagctaatttttgtatttttaatagagacagagtttcaccatattggtcaggctggtctcaaactcctgacctcaggtgatccacccgccttggcctcccaaagtgctgggattacaggcacaagccaccacgcccagcccaaaaaagtagttttttttttaagatggagtctcgcactctcgcccaggctggagtgcagtggcgcgatcttggctcactgcaagctccctcccaggttcacgccattctcctgcctcagcctcccgagtagctgggactacaggcaagcgccaccacacctggctaattttcgtatttttagtagagacagggtttcaccatgttagccaggatggtctcgatctcctgaccttgtgatctgcccacctcggcctcccaaagtgctgggattacaggcgtgagccaccgcacctggccaaaaagtagtttcttgagatgaaagtgaacattgtggaaatgacaaaggattgagaatattccataaacttagttgccaaagcagcagcagaatttgagaggaccgactccaattttgaaagaagttctactgtgggtgaaatgttatcaaacagcatcacatgctacagagtctttcatggaaggaagagtcagttgatgcagcaaacttcattgttgtcttgttttaagaaattgccacagccaccccaactctcagcaataccaccctgatcagtcagcagccgtttacattgaggcaagaccctccaccagcaaaacgattgcgactcactgaaggctcagatgatcgttaatatttctgagcaataaaacattttaaaattaaggtacatacattgttttttagacataatgctgttatgcacttaatagactacagtatagggtaaacctaagttttgtctgggtagagtgactcacacctgtaatcccagcactttgggaggtcagggtgggttgactgtttgagcccagcagttcaagaccagcctgggcaacatggcaaaacccatctttacaacgattacaaacattacctgggcatggtggcgcatgcctgtcgtcccagctactgggaaggctgaggtagaaggatcaattgagccccaagaggtcaatgctgcagtgagccatgattgtgccactgcagtccattctgggtgacagagtgaaatcctgtcccaaaataaaaaaaatcacatagctttttttttttttgagatggagtctcactctgtcactcaggctggagtgcagtggtgcaatcttggctaactgcaacctccacctcctgggttcaagcgattccctgcttcagcctcccaggtagctgggatcacaggtgcacccgccaccatgcccagccaatttttgtatttttaatagaaatggggtttcactgtgttggccaggatggtcttgaactcctgacctcaggccatccacctgccttggcctaccaaagtgctgggattacaggcgtgagccaccacaaatcacgtaacttttatatgtactgagaaaacaagcgtgagccaaaaatcatgtaacttttatatgcactgagaaaccaaataatttgtgtgatttgctttattgtgatgttagtccattgaggtggtttgaaaccgaacttgccatatctccaagatacgcttgtattcaagaaccatttgttgaaaagactattctttttctatcgaatcatctttgtacctttttccataacttagtaaccttatctatgtgagtctctttctggattatgtattctttttttcgatcttgcattcaatttgctaatatctcgttgcgcatttttgtgtctgtgctcaggctgttattggtctgtagtttcttagtacggtctttggttctagtatcaggggatgctggcctcatagaatgggttgagtgctctctctcttcagtgttttgaaagatactgtgtagaatcagcagcatttcttccttaaatgtttagtaaattccccagggaagcctgtcctcaccgatggaaaactgctaatgtagagaagtcagctgaggcgtctaaagggactaaggaagggaggaaaggacaccaggaaactgtagcctaaggtccagagggttctggtccagacagagcagcagggaggccccgggagctccttcccgatgtgggctgtggtctctgcaggtgctgtccctggacaccaacatcacaaaccaggtgaataagctgaaccga

SEQ ID NO: 13477 - DNA, 659 bp, Homo sapiens
ttctctgacaatttctttctctcgatgctgggaatttcttctctggatggatccatctaactatggcggaatcaaaggaaaagtttcatctcgtattcactgtggactgcaagactcccagaaagcagggggagcagaggatgagcaggaaaatgaggacgatgaggaggaaagagatggggaggaggaggaagaggcggaggaatccaacgtggaggatttactggaaaacaactggaacattttgcagtttttgccacaggcagcctcctgccagaactacttcctcatgattgtttcagcgtacatcgtggccgtgtaccactgcatgaaggacgggctgaggcgcagtgctccagggagcacccccgtgaggaggaggggggccagccagctctcccaggaggccgagggggcggtcggagcccttcccggattatgtcgcaaatgagctcactcagagcttcttcaccatcactcagaagattcagaagaaagtcacaggctctcggaactccactgagctctcagagatgtttcctgtcctccccggttcccacttgctgctcaataaccctgccctggagttcatcaaatacgtgtgcaaggtgctgtccctggacaccaacatcacaaaccaggtgaataagctgaaccga

SEQ ID NO: 13478 - DNA, 690 bp, Homo sapiens
cctgtacatgaagtacgtccacccattcatctttgctctgtgcaccattattcccatggagcccgacgaggtgagcattatctgtcctgtcggcaccctggcctcctcagcccttgccccattccaaatgcactggagctgaatggaggtggatgtcccaggagtgctggcaccagaggcggcagtagaattctggtgtgtgacgtcagggatgtcctttgggaattctctggccctggtgtgaggaagaaaccacaggaggcagaatttgcagccatttaccacgaggttttctctcctttcacactgaagttcagcttaggttcctggactttgcctgcaagtcagggcctttggtgttgcttttggctggaagccttggtttctcttgcaggtgctgcggaagggctctggcactctgtgtgaggccttgctgatggtgcaggccttccacgccaacatcatcttccccaacaagcaagagcaggagttcaataagctgacggacgacggacacgtgctggactctgagacctacgtcgggggccacgtggaggccctcgagtctggggttttccgcagcgatatcccttgccggtttaggatggtgtgcttcttccctgggattcagattcttcccactcttgtgctgtggtaggacccagaagctgcaggggctgaaataaagcc

SEQ ID NO: 13479 - DNA, 366 bp, Homo sapiens
cctgtacatgaagtacgtccacccattcatctttgctctgtgcaccattattcccatggagcccgacgaggtgctgcggaagggctctggcactctgtgtgaggccttgctgatggtgcaggccttccacgccaacatcatcttccccaacaagcaagagcaggagttcaataagctgacggacgacggacacgtgctggactctgagacctacgtcgggggccacgtggaggccctcgagtctggggttttccgcagcgatatcccttgccggtttaggatggtgtgcttcttccctgggattcagattcttcccactcttgtgctgtggtaggacccagaagctgcaggggctgaaataaagcc

SEQ ID NO: 13480 - DNA, 5455 bp, Homo sapiens
tgcaagaacatggaggtgctgtatgactcgctgcagctggcccacaagtgcatcctgaactccttctatggctatgtcatgcgcaagggggctcgctggtactccatggagatggctggcatcgtctgcttcacaggggccaacatcatcacccaggcacgggagctgatcgagcagattgggaggcccttagagctggacacagatggtatatggtgcgtcctgcccaacagcttcccagaaaattttgtcttcaagacgaccaatgtgaagaagcccaaagtgaccatctcctacccaggcgccatgttgaacatcatggtcaaggaaggcttcaccaatgaccagtaccaggagctggctgagccgtcctcactcacctacgtcacccgctcagagaacagcatcttttttgaggttgatgggccctaccttgccatgattcttccagcctccaaggaagaaggcaagaaattgaagaagaggtatgctgtgttcaatgaagacggttctctggctgagctcaagggctttgaggtcaaacgccgcggggaactgcagctgattaagatcttccaatcctcggtgtttgaggccttcctcaagggcagcacgctggaagaggtgtatggctctgtagccaaggtggctgactactggctggacgtgctgtacagcaaggcagccaacatgcctgactctgagctattcgagctcatctctgagaaccgttccatgtctcggaagctggaagattacggggagcagaagtctacgtccatcagcacagcaaagcgcctggccgagttcctgggagaccagatggtcaaggatgcagggctgagttgccgctacatcatctcccgcaagcccgagggctcccctgtcacggagaggaagtcagagtggccaagtgttgaagcttgatggagccgagtggatcatagtggccatcccacttgccattttccaagcagagcccacggtgaggaagcactttctccggaaatggctcaagagctcttcccttcaagactttgatattcgagcaattctggattgggactactacattgagcggctgggaagcgccatccagaagatcatcaccatccctgcggccctgcagcaggtaaagaacccagtgccacgtgtcaaacaccccgactggctgcacaaaaaactgctggagaagaatgatgtctacaagcagaagaagatcagtgagctcttcaccctggagggcaggagacaggtcacgatggccgaggcctcagaagacagtccgaggccaagtgctcctgacatggaggacttcggcctcgtaaagctgcctcacccagcagcccctgtcactgtgaagaggaagcgagttctttgggagagccaggaggagtcccaggacctcacgccgactgtgccctggcaggaaatcttggggcagcctcccgccctgggaaccagccaggaggaatggcttgtctggctccggttccacaagaagaagtggcagctgcaggcccggcagcgcctcgcccgcaggaagaggcagcgtctggagtcggcagagggtgtgctcaggcccggggccatccgggatggtcctgccacggggctggggagcttcttgcgaagaactgcccgcagcatcctggaccttccgtggcagattgtgcagatcagcgagaccagccaggccggcctgttcaggctgtgggcgctcgttggcagtgacttgcactgcatcaggctgagcatcccccgtgtgttctacgtgaaccagcgagtcgctaaagcggaggagggtgcttcgtatcgcaaggtaaatcgggtccttcctcgctccaacatggtctacaatctctatgagtattcagtgccagaggacatgtaccaggaacacatcaacgagatcaacgctgagctgtcagcgccagacatcgagggcgtatatgagactcaggttccgttactgttccgggccctggtgcacctgggctgtgtgtgtgtggtcaataaacagctggtgaggcacctttcaggctgggaagcagagacctttgctcttgagcacctggagatgcgctctctggcccagttcagctacctggaaccagggagtatccgccatatctacctgtaccaccacgcacaggcccacaaagcgctcttcgggatcttcatcccctcacagcgcagggcatccgtctttgtgctggacactgtgcgcagcaaccagatgcccagccttggcgccctgtactcagcagagcacggcctcctcctggagaaggtgggccctgagctcctgccaccccccaaacacaccttcgaagttcgggcagaaactgacctgaagaccatctgcagagccatccagcgattcctgctcgcctacaaggaggagcgccgggggcccacactcatcgctgttcagtccagctgggagctgaagaggctggccagtgaaattcctgtcttggaggaattcccactggtgcctatctgtgtggctgacaagatcaactatggggtcctggactggcagcgccatggagcccggcgcatgatccgtcactacctcaacctggacacctgcctgtcgcaggccttcgagatgagcaggtactttcacattcccattgggaacctaccagaggacatctccacattcggctccgacctcttctttgcccgccacctccagcgccacaaccacctgctctggctgtcccctacagcccgccctgacctgggtggaaaggaggctgatgacaactgtcttgtcatggagttcgatgaccaagccactgttgagatcaacagttcaggctgttactccacagtgtgtgtggagctggaccttcagaacctggccgtcaacaccattctccagtctcaccatgtcaacgacatggagggggccgacagcatggggatcagcttcgacgtgatccagcaggcctccctggaggacatgatcacgggtggtcaggctgccagtgccccggccagctacgatgagacagccctgtgctctaacaccttcaggatcctgaagagcatggtcgtgggctgggtgaaggagatcacccagtaccacaacatctatgcagacaaccaggtgatgcacttctaccgctggcttcggtcgccatcctctctgcttcatgaccctgccctgcaccgcacactccacaacatgatgaagaagctcttcctgcagctcatcgctgagttcaagcgcctggggtcatcagtcatctacgccaacttcaaccgcatcatcctctgtacaaagaagcgccgtgtggaagatgccatcgcttacgtggagtacatcaccagcagcatccattcaaaggagaccttccattctctgacaatttctttctctcgatgctgggaatttcttctctggatggatccatctaactatggcggaatcaaaggaaaagtttcatctcgtattcactgtggactgcaagactcccagaaagcagggggagcagaggatgagcaggaaaatgaggacgatgaggaggaaagagatggggaggaggaggaagaggcggaggaatccaacgtggaggatttactggaaaacaactggaacattttgcagtttttgccacaggcagcctcctgccagaactacttcctcatgattgtttcagcgtacatcgtggccgtgtaccactgcatgaaggacgggctgaggcgcagtgctccagggagcacccccgtgaggaggaggggggccagccagctctcccaggaggccgagggggcggtcggagcccttcccggaatgatcaccttctctcaggattatgtcgcaaatgagctcactcagagcttcttcaccatcactcagaagattcagaagaaagtcacaggctctcggaactccactgagctctcagagatgtttcctgtcctccccggttcccacttgctgctcaataaccctgccctggagttcatcaaatacgtgtgcaaggtgctgtccctggacaccaacatcacaaaccaggtgaataagctgaaccgagacctgcttcgcctggtggatgtcggcgagttctccgaggaggcccagttccgagacccctgccgctcctacgtgcttcctgaggtcatctgccgcagctgtaacttctgccgcgacctggacctgtgtaaagactcttccttctcagaggatggggcggtcctgcctcagtggctctgctccaactgtcaggcgccctacgactcctctgccatcgagatgacgctggtggaagttctacagaagaagctgatggccttcaccctgcaggacctggtctgcctgaagtgccgcggggtgaaggagaccagcatgcctgtgtactgcagctgcgcgggagacttcgccctcaccatccacacccaggtcttcatggaacagatcggaatattccggaacattgcccagcactacggcatgtcgtacctcctggagaccctggagtggctgctgcagaagaacccacagctgggccattagccagccccgggccccgggtgcctctgcgtccgtgccaggcctcctgatgccaaggccacatccccgtgcttccagtgaccagaccactgaccaccctgactgtccaaacctgtgaccccaggccagggaacggggaggaaaccaaagaaaaccattttcagggagctcagacgtcacaggagggagcgggagcaggatgtggccctggcctcgccagagcacctgaagaagcaggccgtgagcgaggctgcgagtgccctgggcgccgtttctcacgcagtgaatgcttttccaggcctctgttgcttcctgcaccacacctggtggggtgggagcgtcctctaggtgcccctagttctttgtcctgcctcccagagggaggaaaagcccctgggggcttctggctccctgagattgggctctgagacgagacgggttcccaaggccctggtggggctggagtctcacctgtttgcatggagaaatgggctggccccacagcctcacaggagcagtttgtgggctggtttccccaggaatccagaccctaacccgtgagaatctggattttggcttgtgagccctgcttatttggagccgggtctagagggaaccctctatcagcctcaggaaaacaagacctctgtgcacctcacttttggctcactgcagcccttgtccttcacctccacacaggaccagctggaagcagaaagaagaaaggccaatttcacagggcaccaaacaagtatgaaatgtaaatcagaaatgcagacaccccagacgagagcctcacaggagggagggggccccacaggctccccaggaggctcgtgtctttggcccagagccagccttagtttgtccctgccatctactgtctgaggccatcgctgctacactttgtttttatttgtattt

SEQ ID NO: 13481 - DNA, 8673 bp, Homo sapiens
gagtctgggtgggagcgcgccaaatttctcccctgaagcagaggtggtagccaacggctccatgtctctgaggagcggcgggcggcggcgcgcggacccaggcgcggatggcgaggccagcagggatgatggcgccacttcctcagtttcggcactcaagcgcctggaacggagtcagtggacggataagatggatttgcggtttggttttgagcggctgaaggagcctggtgagaagacaggctggctcattaacatgcatcctaccgagattttagatgaagataagcgcttaggcagtgcagtggattactactttattcaagatgacggaagcagatttaaggtggctttgccctataaaccgtatttctacattgcgaccagaaagggttgtgagcgagaagtttcatcttttctctccaagaagtttcagggcaaaattgcaaaagtggagactgtccccaaagaggatctggacttgccaaatcacttggtgggtttgaagcgaaattacatcaggctgtccttccacactgtggaggatcttgtcaaagtgaggaaggagatctcccctgccgtgaagaagaacagggagcaggatcacgccagcgacgcgtacacagctctgctttccagggtcttgctctgttgcccaggctggagtgcagtggtgcaatcatagctcactgtggcctcgaactcctgggctcaagcgatcctttcacctcagcctcctgagtaactgggatcacagtgttctgcagaggggcggtgtcattactgatgaagaggaaacctctaagaagatagctgaccagttggacaacattgtggacatgcgcgagtacgatgttccctaccacatccgcctctccattgacctgaagatccacgtggctcattggtacaatgtcagataccgaggaaatgcttttccggtagaaatcacccgccgagatgaccttgttgaacgacctgaccctgtggttttggcatttgacattgagacgaccaaactgcccctcaagtttcctgatgctgagacagaccagattatgatgatttcctacatgatcgatggccagggctacctcatcaccaacagggagattgtttcagaagatattgaagattttgagttcacccccaagccagaatatgaaggccccttttgtgtcttcaatgaacccgatgaggtaaggaggctcatctgatccaaaggtggtttgaacacgtccaggagaccaaacccaccatcatggtcacctacaacggggacttttttgactggccatttgtggaggcccgggcagcagtccacggtctgagcatgcagcaggagataggcttccagaaggacagccagggggagtacaaggcgccccagtgcatccacatggactgcctcaggtgggtgaagagggacagttaccttcctgtgggcagtcataatctcaaggcggccgccaaggccaagctaggctatgatcccgtggagctagacccggaggacatgtgccggatggccacggagcagccccagactctggccacgtattctgtgtcagatgctgtcgccacttactacctgtacatgaagtacgtccacccattcatctttgctctgtgcaccattattcccatggagcccgacgaggtgctgcggaagggctctggcactctgtgtgaggccttgctgatggtgcaggccttccacgccaacatcatcttccccaacaagcaagagcaggagttcaataagctgacggacgacggacacgtgctggactctgagacctacgtcgggggccacgtggaggccctcgagtctggggttttccgcagcgatatcccttgccggtttaggatgaatcctgccgcctttgacttcctgctgcagcgggttgagaagaccttgcgccacgcccttgaggaagaggagaaagtgcctgtggagcaagtcaccaactttgaagaggtgtgtgatgagattaagagcaagcttgcctccctgaaggacgttcccagccgcatcgagtgtccactcatctaccacctggacgtgggggccatgtaccccaacatcatcctgaccaaccgcctgcagccctctgccatggtggacgaagccacctgtgctgcctgtgacttcaataagcctggagcaaactgccagcggaagatggcctggcagtggaggggcgagttcatgccagccagtcgcagcgaataccatcggatccagcaccagctggagtcagagaagttcccccccttgttcccagaggggccagctcgggcctttcatgaactgtcccgcgaggaacaggcgaaatacgagaagagaaggctggcggattactgccggaaagcctacaagaagatccacatcaccaaggtggaagagcgtctcaccaccatctgccagcgggaaaactccttctacgtggacaccgtgcgtgccttccgggacaggcgttacgagttcaaagggctccacaaggtgtggaaaaagaagctctcggcggccgtggaggtgggcgacgcggctgaggtgaagcgctgcaagaacatggaggtgctgtatgactcgctgcagctggcccacaagtgcatcctgaactccttctatggctatgtcatgcgcaagggggctcgctggtactccatggagatggctggcatcgtctgcttcacaggggccaacatcatcacccaggcacgggagctgatcgagcagattgggaggcccttagagctggacacagatggtatatggtgcgtcctgcccaacagcttcccagaaaattttgtcttcaagacgaccaatgtgaagaagcccaaagtgaccatctcctacccaggcgccatgttgaacatcatggtcaaggaaggcttcaccaatgaccagtaccaggagctggctgagccgtcctcactcacctacgtcacccgctcagagaacagcatcttttttgaggttgatgggccctaccttgccatgattcttccagcctccaaggaagaaggcaagaaattgaagaagaggtatgctgtgttcaatgaagacggttctctggctgagctcaagggctttgaggtcaaacgccgcggggaactgcagctgattaagatcttccaatcctcggtgtttgaggccttcctcaagggcagcacgctggaagaggtgtatggctctgtagccaaggtggctgactactggctggacgtgctgtacagcaaggcagccaacatgcctgactctgagctattcgagctcatctctgagaaccgttccatgtctcggaagctggaagattacggggagcagaagtctacgtccatcagcacagcaaagcgcctggccgagttcctgggagaccagatggtcaaggatgcagggctgagttgccgctacatcatctcccgcaagcccgagggctcccctgtcacggagaggtctccttatgtttgcagtattcaccacagatgtttcctccagtgaaagggaagcactgacggttgccagttgctttgctagtgacatgaaaacaggctcgttttttctagaaagcagcctgagtcttctgtgtgttactcagcaaggaacatgtagacatggttatgaacgtgcacgtttgcctgtatgcatgcacgtggttactcagaaacgcagacatgtttacgcacacacgcatgtctttgcctatacgcatgcgcgtggttactcagaaacgtagacatgtttacgcacgcatgcgtttatgtatgtgcatgcacatggttatgccgtgagaaacatgtagacatagttacgaacatgcacgtgtttgcctgtacgcatgcacgtggttactcaatgagaaacgcagacatgtctacgcacacgcatgtgtttatgtatatgcatgcccatggttacgctgtgaggaacatgtagacatgtttacgtgcacacacgcacgtgtttacacatacgcacgtgttactccccgaggaacctgtaggcatgtttgtgcatacatatgcacgcagatgtatacattgatgtttgtgaacagctgttacacgtccttatttccatgttcatttgataagagttaggatcagattttgggtgattttcactgttactgagctgtgtgcctgtcttccttacccagggccatcccacttgccattttccaagcagagcccacggtgaggaagcactttctccggaaatggctcaagagctcttcccttcaagactttgatattcgagcaattctggattgggactactacattgagcggctgggaagcgccatccagaagatcatcaccatccctgcggccctgcagcaggtaaagaacccagtgccacgtgtcaaacaccccgactggctgcacaaaaaactgctggagaagaatgatgtctacaagcagaagaagatcagtgagctcttcaccctggagggcaggagacaggtcacgatggccgaggcctcagaagacagtccgaggccaagtgctcctgacatggaggacttcggcctcgtaaagctgcctcacccagcagcccctgtcactgtgaagaggaagcgagttctttgggagagccaggaggagtcccaggacctcacgccgactgtgccctggcaggaaatcttggggcagcctcccgccctgggaaccagccaggaggaatggcttgtctggctccggttccacaagaagaagtggcagctgcaggcccggcagcgcctcgcccgcaggaagaggcagcgtctggagtcggcagagggtgtgctcaggcccggggccatccgggatggtcctgccacggggctggggagcttcttgcgaagaactgcccgcagcatcctggaccttccgtggcagattgtgcagatcagcgagaccagccaggccggcctgttcaggctgtgggcgctcgttggcagtgacttgcactgcatcaggctgagcatcccccgtgtgttctacgtgaaccagcgagtcgctaaagcggaggagggtgcttcgtatcgcaaggtaaatcgggtccttcctcgctccaacatggtctacaatctctatgagtattcagtgccagaggacatgtaccaggaacacatcaacgagatcaacgctgagctgtcagcgccagacatcgagggcgtatatgagactcaggttccgttactgttccgggccctggtgcacctgggctgtgtgtgtgtggtcaataaacagctggtgaggcacctttcaggctgggaagcagagacctttgctcttgagcacctggagatgcgctctctggcccagttcagctacctggaaccagggagtatccgccatatctacctgtaccaccacgcacaggcccacaaagcgctcttcgggatcttcatcccctcacagcgcagggcatccgtctttgtgctggacactgtgcgcagcaaccagatgcccagccttggcgccctgtactcagcagagcacggcctcctcctggagaaggtgggccctgagctcctgccaccccccaaacacaccttcgaagttcgggcagaaactgacctgaagaccatctgcagagccatccagcgattcctgctcgcctacaaggaggagcgccgggggcccacactcatcgctgttcagtccagctgggagctgaagaggctggccagtgaaattcctgtcttggaggaattcccactggtgcctatctgtgtggctgacaagatcaactatggggtcctggactggcagcgccatggagcccggcgcatgatccgtcactacctcaacctggacacctgcctgtcgcaggccttcgagatgagcaggtactttcacattcccattgggaacctaccagaggacatctccacattcggctccgacctcttctttgcccgccacctccagcgccacaaccacctgctctggctgtcccctacagcccgccctgacctgggtggaaaggaggctgatgacaactgtcttgtcatggagttcgatgaccaagccactgttgagatcaacagttcaggctgttactccacagtgtgtgtggagctggaccttcagaacctggccgtcaacaccattctccagtctcaccatgtcaacgacatggagggggccgacagcatggggatcagcttcgacgtgatccagcaggcctccctggaggacatgatcacgggtggtcaggctgccagtgccccggccagctacgatgagacagccctgtgctctaacaccttcaggatcctgaagagcatggtcgtgggctgggtgaaggagatcacccagtaccacaacatctatgcagacaaccaggtgatgcacttctaccgctggcttcggtcgccatcctctctgcttcatgaccctgccctgcaccgcacactccacaacatgatgaagaagctcttcctgcagctcatcgctgagttcaagcgcctggggtcatcagtcatctacgccaacttcaaccgcatcatcctctgtacaaagaagcgccgtgtggaagatgccatcgcttacgtggagtacatcaccagcagcatccattcaaaggagaccttccattctctgacaatttctttctctcgatgctgggaatttcttctctggatggatccatctaactatggcggaatcaaaggaaaagtttcatctcgtattcactgtggactgcaagactcccagaaagcagggggagcagaggatgagcaggaaaatgaggacgatgaggaggaaagagatggggaggaggaggaagaggcggaggaatccaacgtggaggatttactggaaaacaactggaacattttgcagtttttgccacaggcagcctcctgccagaactacttcctcatgattgtttcagcgtacatcgtggccgtgtaccactgcatgaaggacgggctgaggcgcagtgctccagggagcacccccgtgaggaggaggggggccagccagctctcccaggaggccgagggggcggtcggagcccttcccggaatgatcaccttctctcaggattatgtcgcaaatgagctcactcagagcttcttcaccatcactcagaagattcagaagaaagtcacaggctctcggaactccactgagctctcagagatgtttcctgtcctccccggttcccacttgctgctcaataaccctgccctggagttcatcaaatacgtgtgcaaggtgctgtccctggacaccaacatcacaaaccaggtgaataagctgaaccgagacctgcttcgcctggtggatgtcggcgagttctccgaggaggcccagttccgagacccctgccgctcctacgtgcttcctgaggtcatctgccgcagctgtaacttctgccgcgacctggacctgtgtaaagactcttccttctcagaggatggggcggtcctgcctcagtggctctgctccaactgtcaggcgccctacgactcctctgccatcgagatgacgctggtggaagttctacagaagaagctgatggccttcaccctgcaggacctggtctgcctgaagtgccgcggggtgaaggagaccagcatgcctgtgtactgcagctgcgcgggagacttcgccctcaccatccacacccaggtcttcatggaacagatcggaatattccggaacattgcccagcactacggcatgtcgtacctcctggagaccctggagtggctgctgcagaagaacccacagctgggccattagccagccccgggccccgggtgcctctgcgtccgtgccaggcctcctgatgccaaggccacatccccgtgcttccagtgaccagaccactgaccaccctgactgtccaaacctgtgaccccaggccagggaacggggaggaaaccaaagaaaaccattttcagggagctcagacgtcacaggagggagcgggagcaggatgtggccctggcctcgccagagcacctgaagaagcaggccgtgagcgaggctgcgagtgccctgggcgccgtttctcacgcagtgaatgcttttccaggcctctgttgcttcctgcaccacacctggtggggtgggagcgtcctctaggtgcccctagttctttgtcctgcctcccagagggaggaaaagcccctgggggcttctggctccctgagattgggctctgagacgagacgggttcccaaggccctggtggggctggagtctcacctgtttgcatggagaaatgggctggccccacagcctcacaggagcagtttgtgggctggtttccccaggaatccagaccctaacccgtgagaatctggattttggcttgtgagccctgcttatttggagccgggtctagagggaaccctctatcagcctcaggaaaacaagacctctgtgcacctcacttttggctcactgcagcccttgtccttcacctccacacaggaccagctggaagcagaaagaagaaaggccaatttcacagggcaccaaacaagtatgaaatgtaaatcagaaatgcagacaccccagacgagagcctcacaggagggagggggccccacaggctccccaggaggctcgtgtctttggcccagagccagccttagtttgtccctgccatctactgtctgaggccatcgctgctacactttgtttttatttgtattt

SEQ ID NO: 13482 - DNA, 1610 bp, Homo sapiens
atcgagccgggaagatggcaccgcccacggagctgctggccaggccggagcgaggcagcgcgcccggctcccgcgccatggggcggctggtggctgtgggcttgctggggatcgcgctggcgctcctgggcgagaggcttctggcactcagaaatcgacttaaagcctccagagaagtagaatctgtagaccttccacactgccacctgattaaaggaattgaagctggctctgaagatattgacatacttcccaatggtctggctttttttagtgtgggtctaaaattcccaggactccacagctttgcaccagataagcctggaggaatactaatgatggatctaaaagaagaaaaaccaagggcacgggaattaagaatcagtcgtgggtttgatttggcctcattcaatccacatggcatcagcactttcatagacaacgatgacacagtttatctctttgttgtaaaccacccagaattcaagaatacagtggaaatttttaaatttgaagaagcagaaaattctctgttgcatctgaaaacagtcaaacatgagcttcttccaagtgtgaatgacatcacagctgttggaccggcacatttctatgccacaaatgaccactacttctctgatcctttcttaaagtatttagaaacatacttgaacttacactgggcaaatgttgtttactacagtccaaatgaagttaaagtggtagcagaaggatttgattcagcaaatgggatcaatatttcacctgatgataagtatatctatgttgctgacatattggctcatgaaattcatgttttggaaaaacacactaatatgaatttaactcagttgaaggtacttgagctggatacactggtggataatttatctattgatccttcctcgggggacatctgggtaggctgtcatcctaatggccagaagctcttcgtgtatgacccgaacaatcctccctcgtcagaggttctccgcatccagaacattctatctgagaagcctacagtgactacagtttatgccaacaatgggtctgttctccaaggaagttctgtagcctcagtgtatgatgggaagctgctcataggcactttataccacagagccttgtattgtgaactctaaattgtacttttggcatgaaagtgcgataacttaacaattaattttctatgaattgctaattctgagggaatttaaccagcaacattgacccagaaatgtatggcatgtgtagttaattttattccagtaaggaacggcccttttagttcttagagcacttttaacaaaaaaggaaaatgaacaggttctttaaaatgccaagcaagggacagaaaagaaagctgctttcgaataaagtgaatacattttgcacaaagtaagcctcacctttgccttccaactgccagaacatggattccactgaaatagagtgaattatatttccttaaaatgtgagtgacctcacttctggcactgtgactactatggctgtttagaactactgataacgtattttgatgttttgtacttacatctttgtttaccattaaaaagttggagttatattaaagactaactaaaatccca

SEQ ID NO: 13483 - DNA, 1726 bp, Homo sapiens
aagtttcacatcatgagcctaatgtaaggcgtgtccgggccgtcccgaaggtatctggggaaataggtttgtgaggacaaagaccagggccaggcccagggcggagcctccgcggccccgacgcagggactcggcctaggcggaggacggggcggagcgcggccggcaccatcgagccgggaagatggcaccgcccacggagctgctggccaggccggagcgaggcagcgcgcccggctcccgcgccatggggcggctggtggctgtgggcttgctggggatcgcgctggcgctcctgggcgagaggcttctggcactcagaaatcgacttaaagcctccagagaagtagaatctgtagaccttccacactgccacctgattaaaggaattgaagctggctctgaagatattgacatacttcccaatggtctggctttttttagtgtgggtctaaaattcccaggactccacagctttgcaccagataagcctggaggaatactaatgatggatctaaaagaagaaaaaccaagggcacgggaattaagaatcagtcgtgggtttgatttggcctcattcaatccacatggcatcagcactttcatagacaacgaattcaagaatacagtggaaatttttaaatttgaagaagcagaaaattctctgttgcatctgaaaacagtcaaacatgagcttcttccaagtgtgaatgacatcacagctgttggaccggcacatttctatgccacaaatgaccactacttctctgatcctttcttaaagtatttagaaacatacttgaacttacactgggcaaatgttgtttactacagtccaaatgaagttaaagtggtagcagaaggatttgattcagcaaatgggatcaatatttcacctgatgataagtatatctatgttgctgacatattggctcatgaaattcatgttttggaaaaacacactaatatgaatttaactcagttgaaggtacttgagctggatacactggtggataatttatctattgatccttcctcgggggacatctgggtaggctgtcatcctaatggccagaagctcttcgtgtatgacccgaacaatcctccctcgtcagaggttctccgcatccagaacattctatctgagaagcctacagtgactacagtttatgccaacaatgggtctgttctccaaggaagttctgtagcctcagtgtatgatgggaagctgctcataggcactttataccacagagccttgtattgtgaactctaaattgtacttttggcatgaaagtgcgataacttaacaattaattttctatgaattgctaattctgagggaatttaaccagcaacattgacccagaaatgtatggcatgtgtagttaattttattccagtaaggaacggcccttttagttcttagagcacttttaacaaaaaaggaaaatgaacaggttctttaaaatgccaagcaagggacagaaaagaaagctgctttcgaataaagtgaatacattttgcacaaagtaagcctcacctttgccttccaactgccagaacatggattccactgaaatagagtgaattatatttccttaaaatgtgagtgacctcacttctggcactgtgactactatggctgtttagaactactgataacgtattttgatgttttgtacttacatctttgtttaccattaaaaagttggagttatattaa

SEQ ID NO: 13484 - DNA, 29638 bp, Homo sapiens
aggcagcgcgcccggctcccgcgccatggggcggctggtggctgtgggcttgctggggatcgcgctggcgctcctgggcgagaggcttctggcactcaggtaggtgggactcccgcgcgcccctcctcggcggtccccaggctcggggtggccgcgtggtgcggggagggcgcaggctgggggagggattcctgcgggacctggccctgcggccgggggtggagaatttttgaatgctgtccctcccccagctagttgaacccccatcaccccgactctccgcttctagtgaaaaaactagcaaagtttggagtgaatcgcgacactttcttgaaagtttataagcccttgctgctaacaaagttctcttctgcttaggctgacaagagaatgctttgcaattacccaagggccaaactagtggtttaaattgaaaacaaaatgactactcatgcattgaaaccttaactatgaagatttatttcaggtcattggtgctgtttctccttgttgcccaaaccagacccgtctttaataaagttgttctccacccatttctgcatagtttgagaaactcttcagctgtagatcaaagacacttgaaatattcagctactgttcttacttcctatttattcaccagggaagcctgaagccagaatgccagacagcgcagacactattccatctcgcattttagttttaatgaaaatctctggtaggtagacatcatcgtttataaattaccaactcaacgtttgttttttgtttattttattttttgtagagatggggtcttgctgtattgcccaggctgttccctaactcttgcactcaagcaatcctccagcctaggcctccccacagtgctgggattacaggtgtgagctgttctgccctgcctcaaccaaaattttataggcctcatgcaaaagagttccagaaagactgagcacctgctatgtgtaatgttctctcttaggcttctatagtagagtacgacccttatggagtttgatacaggggaagagagaattaaaatacagtaaatgtataaattaggatgttctaaggacagacacaaatgaaccgcataggcttaaagaggaaagattccatcccctgagggtggagttctagagggaggaagagacattcgacctgaccttgaagggtgggtgcaacacatatgagcatgaaggggcccatgccaaatgtatagtgcagcaggagcaaaggggctaaggtgggaagttggaagactagcaaatgggccaatttgaagggagcataaagtcaggagatgagaatagtagggtggtgggaaggataggttttgaggccattaaatataagttgaaaaatggggccccactttcataggcccaatagtgcttcaaaagggaaatattggtgggttttgcttttcaacaagaacttaatataactagttgtgttttatagagataagcctggaaggggggattggaggagagcaatggttctctgtacattagaatctcctggagggctggtgtctgagtggcaccaccaaagattctgattcagctgttctggatcagaatctacagctcacacctgtaatcccagcactgttggaggcctaagccagaagattgcttgagcccaggagttagtgacaggcctgggcaacatagcaagatcccacctctacaaaatgaataaataaataaataaataaataaaaaacaaaatttgagttggtaatttataaactatggtgtctacctaccagagatttttcgttataattaaaatgtgatatggaataatgtattgtttggcaagctggcttcagggttcccaggtaaatagataaataaggaagtgcataatgtaagaacagtggctgacagtagcagtggcattttttatttttaaaaacattcctgataattctaatgagcagtcaaggtcgagaactactagaatagagagcagacatggggtaactggttaaggtattgcagtaggtcagagaggataacagggacccaaactctggaaccccagggatgagggagaagtcaaaggtgctaccagagtttgtgccacagctccactgtcccatggttgtagtttcatctactgataaagcagtgcaaagaggaagcgtgtggtggctgagatgggagtgagatttgaggaaagaacgcttatgggtaggaaatggacatgttgaccttaattttcatgttaggtaatgcccattgtgctctacagaacattcatgagttggatgactttgtatatgatctgtcctgctctccatttcaaaggcaagaccaccaaaattcacaagcttattatgttgtcactaatgtgtaagccaccagtttttctgcaagttggaagttttctcaacagtcaaatattcccccttctcactaatcttaaggttttaaagttatagctgcaaatctaaaaaaaaaagaaaaagtaaataaaacttattgacagaatgcctgatagtttatttacaggtttttgtttgtttgttttttgtttttctttgttttttattttgacacaaggtcttgctctgccgcccaagccagagtacagtggtacatcaaagctcactgcaatctcaaacacctaggcacaagcagtcctccctcctcagcctcctgagtagctgggactacagatgcatgctaccatgcccagctagtatttttatttcttgcagagacagggtctcactttgttgcccaggctaatctcaaactcccagcctcaagtgatgctcctgcctcagcctcccaaagtggtaggattatacacatgagccaccaccctcggcctactttacaatttgatgcaccttttctttacgtgactgtgatgcactttaatgggcagtgactttataaaatggtaactttattggatatgtggagccccaaatgggctgacgtgagaatgttggggtaggtggtgggtggctggatttagcaaagaaaaatgtaggctacccagttaactttgaatttcacatggatttttttttttttttttagtataagcatgaaatacttataccatacttttagcattaagcgtggaatttgggacataattatactaaaatatcattcattgtttatctcaaattaaaatatcactgggtaccctgtattttatcatatgttcgagtgccttctgtcagaatttggtgaccctttgagtctgttttaaaaaggagcatgtttggccggacacagtggctcacgtctgtaatcccagcactttgggaggctgaggcgggcagatcactagaggtcaggggttcaagaccagcctggccaacatggtgaaaccccgtctctaataaaaatacaaaaattagccaggtgtggtggtgcatccctgtaatcccagctacttgggaggctgagtcaggagaattgcttgaaccccagaggtagaggttgcagtgagccaagattgagccactggactccagcctggacaacagagaaagactccctcaaaaaaaaaagaaaaaaagcatgttcccacctccccataaggaaaggctcttcagaggaagttgaaggaacagaggctttatgtttgatttttgctttaatctgatgcctactgtttgattattcaatatttagagatggtactttggcaatcaagttatttctctccccaggttgcccacttcaatttttagtataaggatgtcccagagggataaatgccatcaaagttgtctttcttcttctgaactgtaactgggattccacaccctccttttccacccctccctagttgagcaataaaggggaaaataacagtatacaaatattcccaggccagttcctggtgtcaaggtacacagccatggatgaatcatgaggcttgagtgcatcagagacctaagcgtgggcaggaacccccagagtacccatgtgaatgttctgcttgctgcctcgcaccttttatgacaattcccacaagaagctatgtggtctgtttctacttctgaaagagcagcctttttcccttttttttttttttaaaccaccatcctttaaatcatttattatgtaactcttgtgtgctggtcagtcagtgtgtcaaaagtgtaaaaacttctttatttatttttttaatctatcttttaaaaaatattttctttctttttttcttttttcttcaaggcaggttcttgctctgtcacccaggctggagtgcagcagcacaatcatagctcattgtaacccagaacacctgggctcaagcaatcctcccacctcagcctcctaagcagtgaggactataggcatgcaccactacacctggctaattaaaaaaacatggccgggcacggtggctcattactataatcccagcactttgggaggctgaggcgggtggatacctgaggtcgggagttcaagaccagcctgaccaacatggtgaaaccccatctctactaaaaatacaaaattagccaggcacggtggcacatgcctgtaatcccagctactcaggaggctgaggcaggagaatcacttgaacccgggaggcggaggttgcagtgagccattgcactccagcctggcaacagagcgagactctgtctcaaaaaaaaaaaaacaaaaaaatttttttgtagagatgggggtcttgctgtgttgcccaggctgatctcaaacttctagccataagtgatcctaccgcatcaacttcccaaagcactgggattatgggtatgagctactgagccctgccaaatttctttatattaaaccaaaacgtacatttactgatatttggaaagaaagctcttttacttttatgccttcatccagtcttcatagatatcttcccttttacattataactgtaaatactgaggttagagaggttaactagttagttcaacagaataatataaatattgaataatataattaatgaataattagtgctgaacctgtcgcctcagccaggtctcctgattccaaatacagtttgccccagctccccacagtcttctagcttctctgccagtggagcaaattttccctaggtttacaggcctaagcacagattcttagttacttagtgcaagtattgccagagcccaaggggtgaattccaaagggtttttacaaggctatacataaaagataaagccctggcttgtatatcacttgcacataggagataaagccccagcagttgtatgtaaatttcaaaagcagagaagtatggcacaaagaaactcctgatagtaacactgtgttcccactttgcttaggggcatattggcaccgtagcatggtacacccttactgctacctgccatgaggccagataatagctagcagcccctggtctcattctactctggatgggtactgctgtttcctgaatgaaagacactgagattgatttcatgctaatgactgttggttaagagttcatgctttctattcacaatagcaaagacttggaaccaacccaaatgtccgtcaatgatagactggattaagaaaacgtggcacatatacaccatggaatactatgcagccataaaaaaggatgagttcatgtcctttgtagggacatggatgaagctggaaaccgtcattcttagcaaactattggaaggacagaaaaccaaacaccacatgttctcacttataggtgggaattgaacaatgagaacacttggatacaggaaggggaacatcacacaccggggcctcttgtggggtagggggaggggggagggatagcattaggagatatacctaatgtaaatgacgagttaatgggtgcagcagaccaacatggcacatgtatacatatgtaacaaacctgcacgttgtgcacatgtaccctagaacttaaagtataaaaaaaaaaaaaagttcatgctttgtggacaggtagcctgagttcattcatagctctactatttacctgaaaccttggactaattatttcacttttctgtgccccagtgttgtaatctgtaggatggggtactgcctgctccacagtgggactatgagaatgcttaaaataatgccaagcgcacagtcagctcaataaatgtcatctatgtagacaatgaaattcaagcataattccttaaacctttgtgccatacatccctttggcagtctggtaaagccttcattccttctcagcatcatgtttttaaatgagtaaaataaaatatataggattacacaggaaaccaattaaatactgctaccaagctatttaaaaatctatgatataatatgctttttaaattaaacccttaaatggatctagaggtaggtaaatgtctaacagcagatattttgaagttgcaatgaatgtaaatggcactttgagctatctacaactgaaatgcgatagaaaagtatctataatttctattagtgacagtcacaaatactactaatagtattgtggtttgttgcttatactcatcatcaaaggaaatactcaatttgagttaaaggtttaaataaagatgtatttttcccccatccaagttcatggatccctgaattctacccatggattccttggtcactggactccataggggtcacttggggaatgattgtgacaccaatgaaggaagccagcggatactgtttgctgtattatacctaccataggctcgtgatgaggaaataataaaataaataactgtaatgaaaaagaaaagaaaggaaaacaaaaggaacctaaaacagagaaggcaaatagctttccttttgagtgtcaattttaacagactccctgtggttgcgaaacaatgtgtctgaggctggctctgggttagagggagagtgctgttattgattagcaattcctgcatgacagcagagtggcaacagccatgcatctctgacctggcacagtcataagcatgttatagacataaagtgttagggaacaaataggctctagcaaaagtaaagagtgttcctcctctcatatcatcacttatatgtgtttataccatttatgttgtattttttacatgaatacttttagatttattaatctaatccaaaaaggtttgtatagctttctctatattaagagaaatatatgtatttcttaaatacacaaagttcttaaatctgatgccagcgaggattgcttccagccacaagtaacatatatcagattaatagtagttcattcaaagagggatttattttcctcacatgaaaaacagctctgtgggtgacccaatatagagcttgttcattgagccagtgattatatcaaggaactgggttcttcatatattttcattctttgatctccccctattgactttatagctgtatctttctcaaggatgcagaatggctgccgcagtctcaaacactgcgtgtgtgttcaaatcatgaagaaaggagattgagtgatgccagctagctctcttctcgtgactctcctttgtatctagaacacagtgtctttccccaaaacctgggtcatatgactacacctcaatacagcggagtctgggaaagcaaatatttgctttgcccaccactacaatagaaacgacaagggagaaagaaagggggttgggcatggcgttaattttgtcagccgctagggtctgccacccagaaaacagaagtccactaacaagcagggaactgattgttctgccagggaaaaagtctggcagtttcctactgaagaaatttggaagtcttgatggtccaggaaggataaaggcaaaaccttcattttcttttatcaaaaaggaaagccaagaaaaaaattagttaagtagaagttatgcacaaccctcatgtaactcttccatgttaatagcaggtaggctgcatatgaaaacatgatattatacaagaaaactagttgatgaagattgccctatttagcaccaattacttacgcaaacctaagttgactctgaaacaggaaccccatattaaacttttcaaacacatcagaatatgttactttgaacagattttatttaatccaaagagattatctttgaaaaaggtagatggtaaacatcgttatccctatttttgtatagtcaaataggcatagtagtaagttgtgtaaaattgacatccaaaccaatgcatgatactaaaacttggtgtacaaacagcagttacatcctattgctttgtatctacatctgtttctggagtcatataacatttgtagaatcttggaggtgttttaggctcatccttattttatccataaagaagactgacacctatagagattaactgacctgccaagggtcatggcagtttcactgctgagacaagaacacagatccctttacttctttctgagaaaagtacaaagtagtttaaagcaaaagcttccctgcttccagcacttctggctaagttgcgccgtgggaaaattgttttgtctgattcagttttctcatcttttaaactggaataatgctacctaatttacagggttgtttgaagaattaaatgaatgcatggaggtaaatcacttagaacagcggtaaattatacttttttattatttatttcctttgaccacccacaattatcatcagtgtcatcctcatcatcacaattaagattactaccacattaggctacataaactttttttttctctctctgttttataatttcaattttattttagattcaaggggtacatgtgcaggttttacatgggtatattgtctgatgctgaggtttggggaacaactgatgccatcacccaggtagtgagtatagtaccctatagtttttcagcccttgtctactcccttcccttccccttctagtagtccccagtgtctaccatcgtcatctttatgtccatgtgcaccattgtttagctcccagttaaagtgagaacatgcagtatttggttttctagcttatttttcctctcttaaatcacttctgtgacacgtaggccatgagatttattgtattttttaatgccttatttaaaaatttgtattatttaatacatttaatgcattattttttattatatttaaatattgatttatttgtactttttgccttattgctatattgtttcaaaaaatttaacattatttgagttacatgatttcaaatacatactgattaacattttaattagaaactttatgtctgatatgaattgccaaaatgtgtagttggtacaacctatgagtcattctgggttatctagaagaaactggtagcctgccccatactccagaagccttccccagtgtctagacctcagaagctgtcaggaatatgcacaggagaaggacacatggcaaatagctatttcgtctcttaaatgtatggtatgtgggaaccactgaaaaatgtaaagtttctacaaggtgctatttttattatttatggctctagagaacagagaaggtgaaaaatgtgagagagaagggaaagccaatagtatgtggccttcaaaacaaaagatcccacagatattgtcccaaactgcttcctggccctctagagtggagagggagggggaagacatcctattagagttcaacattctcttattatttccttcttttaattttctgggtatacaacagcaaatagttttgctgaagtagttacagaactagttggtgttctccaaccttcctattccaatacatactgtcatggatgggtacactaaaatctcagaattcactgctatatcactcatccatgtaaccaaaaaccacatgtacccccaaaagctattgaaataagataaatacattcttatttaaaaaaatactgtcatagggatgctaccttcttttcttttttgttagtaactatttgtgggatgtctttggtgtgtcaggctctgagcaatgccattttctcttggcttctttgcagtctctgtgtgaggcttacagtcatttttcacgtttgactcttcagaaggaagacagggctactggttctacatctggaactcttttcccacaacaccaacactgagaaatgtgacatggtgctgtgtttacatttgcataggaacttgcattataagttttatttgttgagttattggctttttttttttaataacccacatcagtatatagaactttgcaataggcatttttgttttaacttcatttctggtgcagttttattttcctacccttgtctttctattttctctttcatctgctttagacttaaactgtgttttatgtattgctgtaagcctctttaaaccctttctaaaacaaagcagggaatacataaacaaatagttttttgttttttgtttttttttctttgtaacagaaatcgacttaaagcctccagagaagtagaatctgtagaccttccacactgccacctgattaaaggaattggtatgtatatgaaaatgcttgttgggcacattgcattttttggccattaacattaaaacactcattaatggcattttagcatgaaattactgcttttcagtggataaatcacattagatcaacaaaaacctctttggtcaacctcttgatctgatgaaccctgtatttattcttctttcctaccctcactgtaaattattcttttttgtgtgtaattctatgtttagcatttgatttcttgcttgttttgtgacttctctgaactatttttgttgcgtctgtattgtttgtcaggtatggccgctgcagtctgtgttctgtgagccttgtggtcagctagtgaaggaagctttatgtaggcagtgacagcatttaccctgctcactactctataactaggatctgatcttatggctaacacgtaactgaccaatatggtttggttgtgtccccacccgaatctcatcttgaattgtagttcccataatccccacgtgttgtgggagggacccagtgagaggtcattgaatcatgaggtggttaccctgtgctgctgttctcgtgatagtgagtgagttctcatgagatctgatggttttataagggcttttcccccttttgctcggcacttctccttgctgccgccatgtgaagaagggtgtgttttcttccccttccaccaagattgtaagtttcctgaagcctccccaaccacacggaacagtgagtcaattaaacctctttcctttataaattacccggtctcaggtatgtctttattagcagcctgagaacggactgatgtaccggcacttcacaatatgtattgtaaaaacttgtttttattttatcttctaagctatgactgcagagggggagtctccctcttcccttgactttatgtaggatgtattgtggagtctgagtctttgagtaggggttcctaagagcaagccccaattttgctatagataaggagggatctgtccagattcttctccagcactgagggtctctctggtgtgtttgcagtttttctccaaggtagagtctgtgtcttgctgtcttttaccctttatcatctactaagtacatgtccctagtacataatagactagtagttagattatcaatgaacaataaatattggctttccttttttttaaattttaattttttttttttttttttttgagaggtggcctcactttgtcacccaggccagaatgcagtagcgcaatcttggctcactgcagccctgatatcctgggctcaagcgatcctcccgcctcgtcctcccaggtagctgagactacaggcacatgcccccactcatggctagttttttatttttgtagagacagggtcttgttatgttgtccaggctggtcttgaactcctggcctcaagcaatcctcccagcttggtctcccaaagtgctgggattgcaggcatgaggcactgagcccagccaatattggctttccttagatatggttcatggtatgattagaaacaaaaagaattagcagtcaaaacacctagtttctagttctattctgccacaatgtaaccttaggcaaagttggtttttgtatttgtcacctataatgatgagtttgtgattagactaatggtttttagactttaaaaagcctgggaccatttatttataatcttactctgagagccacagtgtggaaataactagactgtcattgagtcacttctagtcctttacaacaacatccttctctagaggtaggagagacaatttaatattttgttttactctttagaaattaaaactcgggttacatggaaatgttctcttctctgaataggtaacattgttaaacaagttttgagtgtccttccatctttttctttttatgaatactcctgtacataatttttaaaaacataagtgaggtcaaattatgcataatatttcaaaactagctttttgtacttaatactaggttttggaaacttatgtttgtacataatgttaccttttcttcacaactgcacagtattttttgtgcaaagttcatataaacagtgtatgtgcaaacaatatagaaagatataaaatggaaagtaaataaaaataaaaatctctcatcaaactcttcatcacccccaacagaaataaccccaaagataaagctcccttttttatctttcctgatagtttcagtgcatttgcaaacaaatatattgactctttttttcacaaatagaattttagtgtaaatatttcacaaccttcttcattcctaaaacagtgtgagcagctttccacatcagcatatatagttactttgttctttttaatattttcacattccatgatttatttaaccattccccttttaatgtacatttgggttgttacagttttttgcaactatgaacaaatcagtgaacatcattgctgttgagtttgtgtgtctgtagaatatgtccttaacaatgggattgttgttcccttagaatatgtgtttagagttttgacagtcattgctaagttgctctcaatttggcaacagtaataaactcagtacctcatagttgtaaccacattcactccagacagagttctcagcactcttttagtaaaaataaaccatcagttgacagtgccaccttcagagtttctctacaaataccttgcttgcctccctttctttttttcttcttttaaatcagcttcctcaggttgatctgcctctcattccttaggcatctgtttcctatgtgttctttctcctttttttcattgatacttttgtatttccccagttctacctcccctcccctagactggttggctgtcctggaatttcccttccttctttcaattgcccaaacactaagtgggaggaggcaaactcatatcaaatagcagattgactacatctgtgctggatcatgcagacagttcaagagtcccaagtaacttagcagcttcatcttgccttccagctgcaatcaagaagagccctctcagaactggtcactcagcaaaagccagatggcattagtaaaagatgttgggcaagggtgggagtttgggccagtgatctcttaggttacttttgctgctgagttaataattgtcacattattaaacagcccttggccctgggaagcccaccttctgtgaatacaagtctcagagtagacaatagggcacaaccagccatgttacatgacagactgccaagtgcattcctcttacaactcactgggatggagcgctcctcagagaaaaacaagcccagcaacatttgtattctgaacaggcatctgtctatgtttgtgacctttatgttgtgatgtgtgtgagctgctgtctggaattggaaagaatgaggaaatatgtcacctatggcccctcttgtgaagtgttaaatgcctctgaggcacttcaaaaggcaacagagcggagaggatgagtgattagaagcacatttgggatacatttttagatctaattagaattgtccttttttttttcttttttgcttttgccctgtggttagcacacaccatatgaacgtttgtcgaatgctatgttagtgatgcataatggttaataataacttttggttatatatctttaacaacagttgcttattcacaggtctttgataagaagaaataacaatgtgctggacacacatttctatacaggcaaaagtgactttttatgatagagagggctgtttcttattttctgttttgaaaacagtagtagctatgcacttgaggccaactaatccctctaagaggtgaaccttccttcccccttgcccttgattcccatcaacacacacatacatatgcacacactaccgtgcttcagtcaccatcactggaagtgaactatgtgcaacttttgggtgctttatatatatcatatcatattgtgtctgctttaataaatcatagttattgactacatatcatacaggatgtgtgccttctgtgggtcagaaaataagttcactatttagtccttttcaaaaattccttcccgatctatcttatagacagaaactaagcttttatacacccaagatttggcagattaacatctgcatattaaaatgtcaagagctagttaactttatttgaggcttaaaagttaaaaaatctgattttctaaatgtctggccttcaaaatttgagtggactgtctttctcaagataactaacaattttatgcacttggcagtcaagacctttacaataactgctgcttgggagattgaggggaaaaaagcattaaagtttgtggcccttataatcaagtactttacagtctactgatgggagaaaaggaaaacaaaacaaaacaaaaaaccactgtgagatatagatatgtcttttctttctctagcagataagtacctgaggctcaaggaggttaagcaacttttgcaaattcactttccaatatagtgtcttttcccagggtgactaatgtatatacttgatgagtgaaccagaaaagtaggaaataatatgttacatatgggatgctctattgggtatagtaaaggatgcgttgctgttataaaattatagtcacttagaaaagagatgtttatttttatttttctctcatcagtcttaaggtaagtgaatggcctagggtagttaggtgactgtgttccatatggtcattcaggggcaaatgctgatgaagcaacacagctgtcttcatctaagactagaactctgcttgttgccatttcccagcaggaaggggttgaaagaaaatttatgtagatttttttttctacccagtagttgcatatatattgtattctcacatcctattgacccaaacttagacatatggccacatctgtcagccagaaagggtgggcaatgttatctatagctgtgttgctacgtgcctattgctaaaaaggctaaaaaggaagaaggggaacatggatgctggtgaacacttggccacctctgacacagataattgctaaagtaataagaagagatggaaattaaatgtgctaagctaggagactttctaaagaaagggtttgtcatgctacgctgtgccattcatgtgtttttttgctcatgctgttccttgtgcctggaaattctccccctaattcccctgagcagtggatgcagtggataccctccccagatcccccccaacttccctgagtgttggctaccaaaagctctgagtgcacccagggagctaagtcctcctgcccacaggcaataatggactgacacggggtagacttaaagaaataagaggcacatcaatcaattgaaatgtgtgggaccttacctggactctgaattaaacaaactgtaattttttaaagctacaccttttaaacatgattggctatttgaacactaactagatatttgatgatattgaggaattattgtgaatttttagtgtagtaatgatattgtggtttgtataaatatatttagggataatatgatgcctcagatttgctttaaaataacacaggatgaggataagtggtaggactgcaagggaaacaagactggccatgagctgataactgttgaaggtgggtactgggtatataagggctcaccacaccattctcttgatttgtgtctatttcccataataaaaagtttaaagagagagaaccgatgaaggggagggagagagtcaagcacacaataagagtgacaaacagtgccaaatcagcccacagtattaagttttcacatatttacataaatatcacctggaatgcaatattgaaattaatgtatatcactagaataaaaaaagtaaagatttaataaatttgttttgaaataaaataagttgaaatacgaaaaagacagaaaaggttttgaaagaggttttaaagaaaagtgcaggatattcattggtaaagatgttggtgagaggcttggaagcaaaacttcaggggaaaaagacaacatatggaattgaccacaattgaatttacaagtgaagtggctttacagaggaatcaggggatgtttctgagagaggaaattcattaaattctaacttgaatattttctgtttgcctttaagtcagagcaaaggctttgagtcccagcttcccagtttgtgaccttgagcaattgcttaacttttccaaagcctccaatagtcttcactctaaaataaaagataatcatatgagatattgtatgcagggtatttacaaggagcctggtacttggtgtacctaatgtatgttagttattattattaaattagaggagcaaaaatttctctagcattgactgctcctgacataatcacaccgaagaggggatacacgatgataaaaccttcctgcagtagtggctatagaaatgatgacggggagaagatctggaaaatattccaaagaaggctacagatagatacattttttccattggaattaggcaatggagttaaacagaagttacaatatggttgaaataaatgtatttttttaaaaaaagatttctctttccttaattattaaaaaatatacaattttgtagaaaattttaaacaaagtataaagaaaaaaataaaaatcattcataatcctatcaaagaagcattgttaattttttctatatatcttctttttccacgtgtatacttggaaattaaattttctaaaataattttcaggaaaaacaaattttaattaattgagcttctactaaataggactgaaaagcaaaacctggactagaattctctctcggtgtgtgtgtgtgtgtgtgtgtgtgtgtgtgtgtgtctgtgtgtacatgtgtatgtgctgtgtatacatgtgtatgtggtgtagcgttcccctgattcttaacttattaccagtggacaaccaccgtggaactagagtctagtcattcttaacctttttgggggaatcacagtctcttttttgaatctgatgaaaatcaaggaccgtttttacagaaacgttctcatctgtgcatacatgagacattttgcattgcatagaatttccgagggttcacagatactttgaagcccaaaagtgatccacagaccccagattgagaactcctccgctatgccatgcttaagcttatttctgtgtatcttctttctgaggagcaggcagatgggtcatctttacaatgtgaagttcttggcatttttattttgttttgtttttctgcactacgatggagcaagcaacactggaggcaactggctaaatgcaaactcatgaagcaagaccaaaatggctggatagatagatgctgtttggttttgacaacctagaaataaccttgaagaaatcctatggagaagtcttaaagaggaagattggattttgtagactcaaagaatgtgtcatggtttggcttaatctaagccatttttattcttcttttcttgtgtttgggtctattatctgtctgtagaatttatacagtgagactgctggggaaagtcttatgtctaattatttgctgtgctgtgtggagtgtactgcagacagtcaataaacaatcaatagtaattgtagcctgcctcagagacaggagttagaaacttcaactggcttaggtgcatggtatttttcattaattttcttctgctagtttttttctctaatttaaagcctaaatttaaagattaaatagaaaagctttctttgcttatgagcacaagtaggcactgtttttaaaagaaggaatatataatcccaggtgttttacctctgttaatgagaaagatgtctgtttgcttcagattgaatgagcaaagaagaggacaaggatatttgcatggttaaatgcctatgagcccttccttcagaaagtaatattcccctgatgtcaattacttttatacggacatctggatgtttatcatgagagtgtacagatgtcaactttttcagtattatagctggaaatgtggtgataacttgactttgatttgagtaaacataaaatatctaacatttaaagtcagaagttcacttcaggaaggggtttaaactgacatttattaaaaagaatggttccttggaaaaaacatcagaaccatccctaaagatacagtcactctgataaagtaaacagagtcccagttatgctctgtgtaacaaataacagaacttgaacatgacatttatctgttccttaaacttacagaagctggctctgaagatattgacatacttcccaatggtctggctttttttagtgtggtgagtgtcttcttccttccccaaattcagcagaggagatacaagggtatttgatgagggctgcagaacagtaagttgcttttaaaattcattttccaaaatgcattctgaagaaaagagaggtcaaacaagatcttggaaaacttcctccagcttttctaaatgtagagatgaagactctttgcccattgagatagtgttctttatttccccattgcattgcactaaaatattccaatgcaatctgtgttttgttttgttttttcttttttaattttttttattttttgagacggagtcttgttctggttgccccggctggagtgcagtggcatgatctcagcttactgcaacctccgcctcccgggttcaagcaattcttttgcctcagcctcccgagtagctgggattacaggcgcccgccaccatgcccggctaatttttgtatttttagtagagatggggtttcgccgtgttggccaggctggtctcaaacacctgacctcaggtgatcgcctgcctcagcctcccaaagtgctggcattacgggagtgagccaccacgcccagcgcaatctgtgttttaaatgtgcactattaagagggatatttgaggtcttactgtggatactcaatactaacattatactattttaaatacagcatctactcatctttctattactattcaacttgaagcaaatattcttgccattattatttattttcaaatattataccaaccttgcccttttgctttctttcttttttcccctgaatagccaatcataagtggaaagtcattgagtttatttacacccttcattttgccttgattcttgtaagctgaaaaacaatatcctttctgggtatacaatagaaagactttaaaaacaattggcttgtgaatattgttgtgaatattgttgaaactagcttgtaacaatgtccattctaattggaaatccagataaggggacagatgaggaggttctgaccacctacctccctggcttgggcagacataggagttcttggcatcttcataggtccagtttttctggaggaagaagtaaccaactctgacacctgactgtaattattccatttcctctcaacatccattattttcaggctctgagactcaagagggatgtgaaatactgggagatacttagaagggagtcaccacactaataaaatagttgttagacttatgagaaaggtgagagaactcaggttggagtagaatgagaattagaacactcttcaggttcctgatggtttttatgtgaaagacagtgagcagctggttattaccactgaggcaataaagagatactgtgggctttagcagaaacaccagtatatgtatttagtttttaaaataaggttttaaaaggaatgttttatttaattgcctacacagaatgaataaagtgatatttatagtaggactctgggtttgtttaggagcacatgcttgcacatgtgtggcttaggaaaaaccactgggaccactagtctaaaatattcataagtaaagatgcaaacattctgaataaagtagaaggcagttgcattgatttttttatttgtttatttgtgttttttgttgttgttttgcaaggatgtgttcttggagatttttataatctagaattcacctatttcaagatttctctccagcccccatagtaataaatctgaagtaggagggatgaggtctccaaacacataaatctacagccattttagcttgggggcatgttatagttacaaagatcttatagccatatcaatagaactttttctgctttttttctgttaccctcctttgctcatttgactttttttaaaatttagaaacattcccagtttgctgctgtttttcatttacttggcattgtctctaataaaacctagagtgtactctcttctaaataaagaggtcctacattgtggaggttgttcattcttcttcctagcattttagctcatctaacccaacctattttacagttatgggttgagggtcacctcaaaactaatgtcacacttcatgaagaattggatgacatagaataaaatataaaaaatgtaaacaatgtgagtgtgcttaacaccactgaactgtacacttaaaaatggtgaaagtgatgaatgttgtatgtattttatcataattaaaaataaatttttaaaaagagaaaaaatacttaaataaataaggagtgcgaacataaccatgactagttatcaccatctgatagtgcttcctttgcatgtaaatcatgcttttgttttggggacattcataaagaatagggattaactgaagtggcactgccatgtaacaatagcataattccagtttgttctacttaccaggcttgccctccatgaaaatatacaattgtagataatcttttttaattggagagatttcctcttatgtccaattttatacataaagtaagacttttttattgtgtgcctaaatttgtgtaaatatgactgcatcgtattagtaaactgaattaggtagtgcattcacataaaatttaacatcaccaagaaggctttaccttaagaatgtaatgatgaatcaccattttagatagactgataggtaatttattaactgatttaaaagagaaaagacctatatcatctcagtgagtaccaaaaagcatttaataaaattcaatactcattcctaaagttccaagcaaactagaaagataaggaaaattcccacaaaactacagcaaacatcattcttgatggtgaagcattggctgcatttgcattaatgctcagaacaggaagaaaatacccaacaccacaaccatcagtaatctactagagttcttagtaattcagtaaaacgagaaaaagaaatgtgagatagaaaagaaaaagacaaaactgtcattagagaagcagggactggctcaattgcccaggctgatgtgcagtagtgcaatcatagctcactgcagcctgaactcctaaactcctgcgctcaagaggtccttccacctcagccttccgagcagctaggactacaagtgctcaccataacactcagctaatttttttttttttttttttttttttttttgtagagacagagtcttgctatgttgcccaggctggtctcaaactgctggcctcaagcagtcctcccacgtcagcctcccaaagtgctggaattataggcatgagccaccaggcctgacctaaagctgtagtaatttaaaaagtgttatattggcacaggaatagacatgagacattaaaataacaaaacagagagtccctaaatagaccaatatgtaaatgtcagagatctagcacatgataaaggtgatattttgaatcagtgggagaaggatggactgtatgccaggcactgttccaggcactgggatctagcagtgaacaaatttccacagtcagtatgtagatgtcacttttctccaccctcagctctccctggaatcacctagtccaccaaccttctgattactctctgaagagaataaatccctgatcttcttttcagttattttcaggctttcagtattccacctccccgttattattttttctgttatcttttctctgttttttgagtttttgtggctttatgccactactttaaccacaatctctatttatccttcatgtacagttcccatgttagtccataaaaatacttaagcttttgtatttaacatttttcaccgttttggaaagggtctaaaattcccaggactccacagctttgcaccagataagcctggaggaatactaatgatggatctaaaagaagaaaaaccaagggcacgggaattaagaatcagtcgtgggtttgatttggcctcattcaatccacatggcatcagcactttcatagacaacggtaagagccaatgggctaccaacatttagtaacgtgtgatggttcacaaatgactgtgaaaaatagatttggatcatatttctaggaagagaagaacaattaactcatgagtgatttctgtattcttcattacaaagaacttgttcatttgcctcttcagctggcagtaagttatgctacattttgaaattcctaacaggtaacacctgaaagaatgtttagatttcataatcttttcatatacctacgatcatcacatttaaaaaagaactgtatttttgaattaaagtagaaacagattatgcatgaattctgtatatggagtaggaaacactttcttaaaggtcagggagccaatgatcagaaataacaccagacggacagcaataggaaagacagagaatgatctgttaggtcgtctaacagcttatacattcaacctttccttgcctgtggtatttaaatgtcagtgcctgcccagaggtcccgtagttatgtcttgtaaattaactctgttctttcaattctttagatgacacagtttatctctttgttgtaaaccacccagaattcaagaatacagtggaaatttttaaatttgaagaagcagaaaattctctgttgcatctgaaaacagtcaaacatgagcttcttccaaggtacttcctcattttgttccttctctaatttatccccagcatttgcaaacaatccctatggtgggttgtcctgtcatcttttataagcgctaatgtatatattagctaatatgtaagagctaaagagcttatatttccttatttataaatgtgtgtgtatagtttccttataaaccagggcaagcatggcatatgaaagttgatgtcactcatactattcactgttctatgcggactcctttgagaaatgatgaagtgcccgactacagggtgatactcttcaggcccatcttgagggtagaaggcaaaccctaacattttttcctgctgtcaccctccatcttagatgactcatcacccagatgagtgtcttgccaaggaagaatggcctgttttttattgggtttgtatgctttgcatgggactttataccaatcgctttcatagggttagtgatggttgcatgctagtaatcccacagaattagagccactcaagttgagagtgagtcattacacttcaagaacataaagctggttgaaaatgtggctaagagagaatcatgtgtacccccacccccagttcagtgtgtattagcctactgcttcttttagtttaaacttgatgaatatttttaatttctaatgaaatttcatttctaatgaaattaaaaatattgcctatctagggcctatctatgcctatctagggcataagcatgtaacttccaatcattccttccaaaaatgcacttgataaaaaaaaataggagcataaataccatccaagcattatggtgctctttcagaaaaatgagacctaccttccctgtagctctatatttttcatttagcaaagaataaagcagctctttcagaaatttttgcatagagtaattggaatttaaatttaataacaccctcacctaactggtcttaaaatgaaattgtttttagcatataaatctctcacctgaagcattgtactatggcaattttatcatccatctctctgcaagtgtttattgagtgcctgttcattctcggcatgtcagctttgtgaagcaggtagaaattgaacagtcaaccttagtttgactaataactaagccagggaaattagaaaaatccaggaactgagtaaatggaagctaggtaaatgttactgactgcctaaccagctcaccagccaatcaggctctctccagctctgtactgtggacagctctgtccttacgtataattgttaaaccctacatttcttgctgtcaaaaaacatgccctgatggcactaagttctttcttctcttatggtaatcctgccataattgctaaatgacctgtgttcagattacctggtaccatacaaaattgttctctggcaacaatattatagtatattgtatatgactatagtcgtgatttttagctcgtcttttcctcttaccaaaaatttaaagcacatgttgcataaatcttatgagtacttaatatttaatatggagaccaacaggccttttgtttcctctcacatgctatttttctttttcagtgtgaatgacatcacagctgttggaccggcacatttctatgccacaaatgaccactacttctctgatcctttcttaaagtatttagaaacatacttgaacttacactgggcaaatgttgtttactacagtccaaatgaagttaaagtggtagcagaaggatttgattcagcaaatgggatcaatatttcacctgatgataagtatggccccttatagaatatcttcatttttcttcagttgtggtgctggccaaattctttactttgctttctttgtcaatgtgaaaatagttttcttgacatttatggtatattatacatataatatatagatacactatatatataattatatatgttttgtatatatatttacatatacttagtcacatgtatttatatgcaaatacaataccatatttaagtaaactatataatacagtaatatatatgtatttatatataatatataaagtttggaatacatcattgtcaaatttaattttataaatataaattttaaagtgtgatcatactgatgcatacatattgaagtatcaggtatttccttttaaataaatgtattatttttattggctatacattattccattataaggatgatcttaaactaatttaaccaattctctattgatggatatgtgtataggggtggggagttctacataaaaaatattttatacttcttatttaccatggaattttaaacaagtattttttttaaagaaaaagtccctaggagagtgttttttttttgttttgttttttggagatggagtctcactccgtcgcccaggctggagtgcaatggcatgatctcagctcacctcaacctccgcctcctgggttcaagtgattctcctgcctcagcctcccaagtagctgggattataggcatgcgccaccatgcttggctaattttgtatttttagtagagatgaggtttctccatgttggtcaggctagtcttgaacctccaacctcaggtgatccgcccacctcagcctcccgaagtgctgggattacaggcatatgccaccacacctggctctaagagagtattataacataatggttaaacttgcagattttggactcatacaggcctgggttcaaatcccacccagggcactggctaaatggttctatgagctacttttctgtagaacagacccctagaaatagaactatttgctcaaacagtgtgattcttttaaatgttaactttaatagatattgccaaattgtcctccagaattatctcattatttttatatgcacaaccacaacctataagagaagatattaaattcttgatagctttcttatctactgcctcagcacactgaaaaatttaaactactacaaatacaacataaaataaatttggcactccttgacaactaaatgcccttatttttgtaatccaatttctcctcctttcttgttgactatagaaaaagaatgtagaatcatttaatttaaattgtctctaactgacctgatccaacctctgcagccaaatctgtttttcactcttatatttccattatgagagtcaaactttccaatcacccaagctaacaaaaaaataacaataatgaaaagggagaatcagcttttactcctctttcaccattcctatccagcctgtaggcaggtcctgttggttctacctgtgcctccttcctctacccccaaactcctttccctttgagtgagacctgcctaatttaggttgtcatcctctctgactagcatatgagactttcttccaatttgttttctgtctacttggatttttttcactcttgccaattttgtctgtctatctctattagccttgaagggctccccaaagagggaactctgtcttcctcacctttgactccttatgccagtacagtgccaggcacaaagcaaatgctcaggaattgtggaacagaactgaccatttgttgccactttattattctaagatttcagtggaatccaattgcttatcaaatcaaggcagggtaaagggttggactttgtttaacaggccacctccaacctcccttttctactatttccatgctttctatgctttagacaaagaactcattgttttaaacattccttcctcttcttgctcctgtgattctgctcttgtgcttgcttctgcctgggaagtgcctcctccgtcctcatctcaaatctcatctctctttacacagccactgcagatgccccttccttggtgagcctttctgtgtcctcggaagttagctatttctagacctgaactatttctcatgcttattaggtgtttaatgtgtacaaaccagtgagatttgttccaacacactataaactttcaaggagagaggctgtgtcttcttcatgtttatatctgctgcaacactgagttcatggcttttcacacataattgctcaacagagcaggtgccatggaaagtcaattcaatgagtaaaattacctcaaaatagtctgttaattcactcacctttgaagtagacagattattctgcattgatacttatctcttactcttaaaattcgctatgtattaataaatattttattgaatattaaggaatgatcactattttaataagatgttctttaccatatatttctatatgtacatgataattagaagtatcaaattatattgtggaatgtaaaagcttttcttctgaagccaagcatttgttttattgtcatttcagtggcaaatatggacttcatattcaaaatgatgttctatattatttttccttacaagctttttgaaaaacaatttaataattccatgattgttgtagcaccactgaattgattctgaaagcttactttttaaataaaaattgacctttatcaagcattccttgagggcccatgattgattaacttcttggcaggttattaagacttattctttcacactgtattaatgaagctttatattggcatggagctctaaccactgtgtcctttctgcaaaggtatatctatgttgctgacatattggctcatgaaattcatgttttggaaaaacacactaatatgaatttaactcagttgaaggtaaaatatttatttttacatatagacagtaatctattatgctttgcaatgacatagtttttctataagagtaccacacgtagaacaaaatatggatgccagtgtagctattctgggtttttaaatactccctacaactagagaaagctcctgtttccagcgatctcaagaactgaccatgattacatgcagcagcaggttgagagtgatattcatcagatttagggcccattccatgaagtattgatggcagtggaagaattccaataagaattttcacaattgaaaatactaatagatgaattctcaaatgaaggtttatgcacagtgtcagttctttcaataatacatgaaggtagaaattgggttccacaccattattattttcttcctactcaacaacacatattttaggttgattaagaatttcctatcttgctttgattgagttccttgagctaactgatcattgtgcatcttttaaaggaaaaggagttcagtttttaagatagatttttacagagaccgattatcaccctaactttcttaatttcagggaagaagaaaagtggctccaaaccagtttttaatacattccttttaagcaatattggtgttagaaggtggaagcagggcgatgtgtaatttcctcacatgcatagaggcaggaaggttacctctaaattatttaatcaagtttctcatgtcatttagattttgacaatttctcatttggaaggtacttgagctggatacactggtggataatttatctattgatccttcctcgggggacatctgggtaggctgtcatcctaatggccagaagctcttcgtgtatgacccgaacaatcctccctcgtcagaggtttttatattttcagttttttaaacttaattattcaagtccttttgaactaataatacaataaattgtcacagggatgatttgtttagttattttaaagcaataatataataagcttatgtcgtggttttgtaattgcgttaagccaataattggcagaatgttacattgttcaaatactttaagaaaggtaatcttttgatgtattaaattatggtggaaactagtcaaaaggcatttttataaagacatgtgcccttcttgggtggtatactggcaatttttaaaatatctgatttattgtcagctcaccacatgatgtgatatttgttcatgttgaagtagtgtgaaagtaggcacattagtatgaaagtatttctattaaagctgaattgctataataacactaaatcctgtgttggcatggaataactagatggttttaagaaagtactttctttgaagattggagaaagtactttaatttaaacattaaaaagattggtaactgctattttcaacagcatgtccccttaatcagtgtgtcattgtggaaaacagggcttattgatgattgagtgacatgcatgtacggtggtcttatattcatactttgtatcccctgaataggttctccgcatccagaacattctatctgagaagcctacagtgactacagtttatgccaacaatgggtctgttctccaaggaagttctgtagcctcagtgtatgatgggaagctgctcataggcactttataccacagagccttgtattgt

SEQ ID NO: 13485 - DNA, 1099 bp, Homo sapiens
aggcagcgcgcccggctcccgcgccatggggcggctggtggctgtgggcttgctggggatcgcgctggcgctcctgggcgagaggcttctggcactcagaaatcgacttaaagcctccagagaagtagaatctgtagaccttccacactgccacctgattaaaggaattgtgtggtgagtgtcttcttccttccccaaattcagcagaggagatacaagggtatttgatgagggctgcagaacaggtctaaaattcccaggactccacagctttgcaccagataagcctggaggaatactaatgatggatctaaaagaagaaaaaccaagggcacgggaattaagaatcagtcgtgggtttgatttggcctcattcaatccacatggcatcagcactttcatagacaacgatgacacagtttatctctttgttgtaaaccacccagaattcaagaatacagtggaaatttttaaatttgaagaagcagaaaattctctgttgcatctgaaaacagtcaaacatgagcttcttccaagtgtgaatgacatcacagctgttggaccggcacatttctatgccacaaatgaccactacttctctgatcctttcttaaagtatttagaaacatacttgaacttacactgggcaaatgttgtttactacagtccaaatgaagttaaagtggtagcagaaggatttgattcagcaaatgggatcaatatttcacctgatgataagtatatctatgttgctgacatattggctcatgaaattcatgttttggaaaaacacactaatatgaatttaactcagttgaaggtacttgagctggatacactggtggataatttatctattgatccttcctcgggggacatctgggtaggctgtcatcctaatggccagaagctcttcgtgtatgacccgaacaatcctccctcgtcagaggttctccgcatccagaacattctatctgagaagcctacagtgactacagtttatgccaacaatgggtctgttctccaaggaagttctgtagcctcagtgtatgatgggaagctgctcataggcactttataccacagagccttgtattgt

SEQ ID NO: 13486 - DNA, 1515 bp, Homo sapiens
ggccaggccggagcgaggcagcgcgcccggctcccgcgccatggggcggctggtggctgtgggcttgctggggatcgcgctggcgctcctgggcgagaggcttctggcactcagaaatcgacttaaagcctccagagaagtagaatctgtagaccttccacactgccacctgattaaaggaattgaagctggctctgaagatattgacatacttcccaatggtctggctttttttagtgtgggtctaaaattcccaggactccacagctttgcaccagataagcctggaggaatactaatgatggatctaaaagaagaaaaaccaagggcacgggaattaagaatcagtcgtgggtttgatttggcctcattcaatccacatggcatcagcactttcatagacaacgatgacacagtttatctctttgttgtaaaccacccagaattcaagaatacagtggaaatttttaaatttgaagaagcagaaaattctctgttgcatctgaaaacagtcaaacatgagcttcttccaagtgtgaatgacatcacagctgttggaccggcacatttctatgccacaaatgaccactacttctctgatcctttcttaaagtatttagaaacatacttgaacttacactgggcaaatgttgtttactacagtccaaatgaagttaaagtggtatatctatgttgctgacatattggctcatgaaattcatgttttggaaaaacacactaatatgaatttaactcagttgaaggtacttgagctggatacactggtggataatttatctattgatccttcctcgggggacatctgggtaggctgtcatcctaatggccagaagctcttcgtgtatgacccgaacaatcctccctcgtcagaggttctccgcatccagaacattctatctgagaagcctacagtgactacagtttatgccaacaatgggtctgttctccaaggaagttctgtagcctcagtgtatgatgggaagctgctcataggcactttataccacagagccttgtattgtgaactctaaattgtacttttggcatgaaagtgcgataacttaacaattaattttctatgaattgctaattctgagggaatttaaccagcaacattgacccagaaatgtatggcatgtgtagttaattttattccagtaaggaacggcccttttagttcttagagcacttttaacaaaaaaggaaaatgaacaggttctttaaaatgccaagcaagggacagaaaagaaagctgctttcgaataaagtgaatacattttgcacaaagtaagcctcacctttgccttccaactgccagaacatggattccactgaaatagagtgaattatatttccttaaaatgtgagtgacctcacttctggcactgtgactactatggctgtttagaactactgataacgtattttgatgttttgtacttacatctttgtttaccattaaaaagttggagttatattaaagactaactaaaa

SEQ ID NO: 13487 - DNA, 2178 bp, Homo sapiens
ctgaaaacagtcaaacatgagcttcttccaaggtacttcctcattttgttccttctctaatttatccccagcatttgcaaacaatccctatggtgggttgtcctgtcatcttttataagcgctaatgtatatattagctaatatgtaagagctaaagagcttatatttccttatttataaatgtgtgtgtatagtttccttataaaccagggcaagcatggcatatgaaagttgatgtcactcatactattcactgttctatgcggactcctttgagaaatgatgaagtgcccgactacagggtgatactcttcaggcccatcttgagggtagaaggcaaaccctaacattttttcctgctgtcaccctccatcttagatgactcatcacccagatgagtgtcttgccaaggaagaatggcctgttttttattgggtttgtatgctttgcatgggactttataccaatcgctttcatagggttagtgatggttgcatgctagtaatcccacagaattagagccactcaagttgagagtgagtcattacacttcaagaacataaagctggttgaaaatgtggctaagagagaatcatgtgtacccccacccccagttcagtgtgtattagcctactgcttcttttagtttaaacttgatgaatatttttaatttctaatgaaatttcatttctaatgaaattaaaaatattgcctatctagggcctatctatgcctatctagggcataagcatgtaacttccaatcattccttccaaaaatgcacttgataaaaaaaaataggagcataaataccatccaagcattatggtgctctttcagaaaaatgagacctaccttccctgtagctctatatttttcatttagcaaagaataaagcagctctttcagaaatttttgcatagagtaattggaatttaaatttaataacaccctcacctaactggtcttaaaatgaaattgtttttagcatataaatctctcacctgaagcattgtactatggcaattttatcatccatctctctgcaagtgtttattgagtgcctgttcattctcggcatgtcagctttgtgaagcaggtagaaattgaacagtcaaccttagtttgactaataactaagccagggaaattagaaaaatccaggaactgagtaaatggaagctaggtaaatgttactgactgcctaaccagctcaccagccaatcaggctctctccagctctgtactgtggacagctctgtccttacgtataattgttaaaccctacatttcttgctgtcaaaaaacatgccctgatggcactaagttctttcttctcttatggtaatcctgccataattgctaaatgacctgtgttcagattacctggtaccatacaaaattgttctctggcaacaatattatagtatattgtatatgactatagtcgtgatttttagctcgtcttttcctcttaccaaaaatttaaagcacatgttgcataaatcttatgagtacttaatatttaatatggagaccaacaggccttttgtttcctctcacatgctatttttctttttcagtgtgaatgacatcacagctgttggaccggcacatttctatgccacaaatgaccactacttctctgatcctttcttaaagtatttagaaacatacttgaacttacactgggcaaatgttgtttactacagtccaaatgaagttaaagtggtagcagaaggatttgattcagcaaatgggatcaatatttcacctgatgataagtatggccccttatagaatatcttcatttttcttcagttgtggtgctggccaaattctttactttgctttctttgtcaatgtgaaaatagttttcttgacatttatggtatattatacatataatatatagatacactatatatataattatatatgttttgtatatatatttacatatacttagtcacatgtatttatatgcaaatacaataccatatttaagtaaactatataatacagtaatatatatgtatttatatataatatataaagtttggaatacatcattgtcaaatttaattttataaatataaattttaaagtgtgatcatactgatgcatacatattgaagtatcaggtatttccttttaaataaatgtattatttttatt

SEQ ID NO: 13488 - DNA, 627 bp, Homo sapiens
ctgaaaacagtcaaacatgagcttcttccaagtgtgaatgacatcacagctgttggaccggcacatttctatgccacaaatgaccactacttctctgatcctttcttaaagtatttagaaacatacttgaacttacactgggcaaatgttgtttactacagtccaaatgaagttaaagtggtagcagaaggatttgattcagcaaatgggatcaatatttcacctgatgataagtatggccccttatagaatatcttcatttttcttcagttgtggtgctggccaaattctttactttgctttctttgtcaatgtgaaaatagttttcttgacatttatggtatattatacatataatatatagatacactatatatataattatatatgttttgtatatatatttacatatacttagtcacatgtatttatatgcaaatacaataccatatttaagtaaactatataatacagtaatatatatgtatttatatataatatataaagtttggaatacatcattgtcaaatttaattttataaatataaattttaaagtgtgatcatactgatgcatacatattgaagtatcaggtatttccttttaaataaatgtattatttttatt

SEQ ID NO: 13489 - DNA, 22208 bp, Homo sapiens
atggggcggctggtggctgtgggcttgctggggatcgcgctggcgctcctgggcgagaggcttctggcactcaggtaggtgggactcccgcgcgcccctcctcggcggtccccaggctcggggtggccgcgtggtgcggggagggcgcaggctgggggagggattcctgcgggacctggccctgcggccgggggtggagaatttttgaatgctgtccctcccccagctagttgaacccccatcaccccgactctccgcttctagtgaaaaaactagcaaagtttggagtgaatcgcgacactttcttgaaagtttataagcccttgctgctaacaaagttctcttctgcttaggctgacaagagaatgctttgcaattacccaagggccaaactagtggtttaaattgaaaacaaaatgactactcatgcattgaaaccttaactatgaagatttatttcaggtcattggtgctgtttctccttgttgcccaaaccagacccgtctttaataaagttgttctccacccatttctgcatagtttgagaaactcttcagctgtagatcaaagacacttgaaatattcagctactgttcttacttcctatttattcaccagggaagcctgaagccagaatgccagacagcgcagacactattccatctcgcattttagttttaatgaaaatctctggtaggtagacatcatcgtttataaattaccaactcaacgtttgttttttgtttattttattttttgtagagatggggtcttgctgtattgcccaggctgttccctaactcttgcactcaagcaatcctccagcctaggcctccccacagtgctgggattacaggtgtgagctgttctgccctgcctcaaccaaaattttataggcctcatgcaaaagagttccagaaagactgagcacctgctatgtgtaatgttctctcttaggcttctatagtagagtacgacccttatggagtttgatacaggggaagagagaattaaaatacagtaaatgtataaattaggatgttctaaggacagacacaaatgaaccgcataggcttaaagaggaaagattccatcccctgagggtggagttctagagggaggaagagacattcgacctgaccttgaagggtgggtgcaacacatatgagcatgaaggggcccatgccaaatgtatagtgcagcaggagcaaaggggctaaggtgggaagttggaagactagcaaatgggccaatttgaagggagcataaagtcaggagatgagaatagtagggtggtgggaaggataggttttgaggccattaaatataagttgaaaaatggggccccactttcataggcccaatagtgcttcaaaagggaaatattggtgggttttgcttttcaacaagaacttaatataactagttgtgttttatagagataagcctggaaggggggattggaggagagcaatggttctctgtacattagaatctcctggagggctggtgtctgagtggcaccaccaaagattctgattcagctgttctggatcagaatctacagctcacacctgtaatcccagcactgttggaggcctaagccagaagattgcttgagcccaggagttagtgacaggcctgggcaacatagcaagatcccacctctacaaaatgaataaataaataaataaataaataaaaaacaaaatttgagttggtaatttataaactatggtgtctacctaccagagatttttcgttataattaaaatgtgatatggaataatgtattgtttggcaagctggcttcagggttcccaggtaaatagataaataaggaagtgcataatgtaagaacagtggctgacagtagcagtggcattttttatttttaaaaacattcctgataattctaatgagcagtcaaggtcgagaactactagaatagagagcagacatggggtaactggttaaggtattgcagtaggtcagagaggataacagggacccaaactctggaaccccagggatgagggagaagtcaaaggtgctaccagagtttgtgccacagctccactgtcccatggttgtagtttcatctactgataaagcagtgcaaagaggaagcgtgtggtggctgagatgggagtgagatttgaggaaagaacgcttatgggtaggaaatggacatgttgaccttaattttcatgttaggtaatgcccattgtgctctacagaacattcatgagttggatgactttgtatatgatctgtcctgctctccatttcaaaggcaagaccaccaaaattcacaagcttattatgttgtcactaatgtgtaagccaccagtttttctgcaagttggaagttttctcaacagtcaaatattcccccttctcactaatcttaaggttttaaagttatagctgcaaatctaaaaaaaaaagaaaaagtaaataaaacttattgacagaatgcctgatagtttatttacaggtttttgtttgtttgttttttgtttttctttgttttttattttgacacaaggtcttgctctgccgcccaagccagagtacagtggtacatcaaagctcactgcaatctcaaacacctaggcacaagcagtcctccctcctcagcctcctgagtagctgggactacagatgcatgctaccatgcccagctagtatttttatttcttgcagagacagggtctcactttgttgcccaggctaatctcaaactcccagcctcaagtgatgctcctgcctcagcctcccaaagtggtaggattatacacatgagccaccaccctcggcctactttacaatttgatgcaccttttctttacgtgactgtgatgcactttaatgggcagtgactttataaaatggtaactttattggatatgtggagccccaaatgggctgacgtgagaatgttggggtaggtggtgggtggctggatttagcaaagaaaaatgtaggctacccagttaactttgaatttcacatggatttttttttttttttttagtataagcatgaaatacttataccatacttttagcattaagcgtggaatttgggacataattatactaaaatatcattcattgtttatctcaaattaaaatatcactgggtaccctgtattttatcatatgttcgagtgccttctgtcagaatttggtgaccctttgagtctgttttaaaaaggagcatgtttggccggacacagtggctcacgtctgtaatcccagcactttgggaggctgaggcgggcagatcactagaggtcaggggttcaagaccagcctggccaacatggtgaaaccccgtctctaataaaaatacaaaaattagccaggtgtggtggtgcatccctgtaatcccagctacttgggaggctgagtcaggagaattgcttgaaccccagaggtagaggttgcagtgagccaagattgagccactggactccagcctggacaacagagaaagactccctcaaaaaaaaaagaaaaaaagcatgttcccacctccccataaggaaaggctcttcagaggaagttgaaggaacagaggctttatgtttgatttttgctttaatctgatgcctactgtttgattattcaatatttagagatggtactttggcaatcaagttatttctctccccaggttgcccacttcaatttttagtataaggatgtcccagagggataaatgccatcaaagttgtctttcttcttctgaactgtaactgggattccacaccctccttttccacccctccctagttgagcaataaaggggaaaataacagtatacaaatattcccaggccagttcctggtgtcaaggtacacagccatggatgaatcatgaggcttgagtgcatcagagacctaagcgtgggcaggaacccccagagtacccatgtgaatgttctgcttgctgcctcgcaccttttatgacaattcccacaagaagctatgtggtctgtttctacttctgaaagagcagcctttttcccttttttttttttttaaaccaccatcctttaaatcatttattatgtaactcttgtgtgctggtcagtcagtgtgtcaaaagtgtaaaaacttctttatttatttttttaatctatcttttaaaaaatattttctttctttttttcttttttcttcaaggcaggttcttgctctgtcacccaggctggagtgcagcagcacaatcatagctcattgtaacccagaacacctgggctcaagcaatcctcccacctcagcctcctaagcagtgaggactataggcatgcaccactacacctggctaattaaaaaaacatggccgggcacggtggctcattactataatcccagcactttgggaggctgaggcgggtggatacctgaggtcgggagttcaagaccagcctgaccaacatggtgaaaccccatctctactaaaaatacaaaattagccaggcacggtggcacatgcctgtaatcccagctactcaggaggctgaggcaggagaatcacttgaacccgggaggcggaggttgcagtgagccattgcactccagcctggcaacagagcgagactctgtctcaaaaaaaaaaaaacaaaaaaatttttttgtagagatgggggtcttgctgtgttgcccaggctgatctcaaacttctagccataagtgatcctaccgcatcaacttcccaaagcactgggattatgggtatgagctactgagccctgccaaatttctttatattaaaccaaaacgtacatttactgatatttggaaagaaagctcttttacttttatgccttcatccagtcttcatagatatcttcccttttacattataactgtaaatactgaggttagagaggttaactagttagttcaacagaataatataaatattgaataatataattaatgaataattagtgctgaacctgtcgcctcagccaggtctcctgattccaaatacagtttgccccagctccccacagtcttctagcttctctgccagtggagcaaattttccctaggtttacaggcctaagcacagattcttagttacttagtgcaagtattgccagagcccaaggggtgaattccaaagggtttttacaaggctatacataaaagataaagccctggcttgtatatcacttgcacataggagataaagccccagcagttgtatgtaaatttcaaaagcagagaagtatggcacaaagaaactcctgatagtaacactgtgttcccactttgcttaggggcatattggcaccgtagcatggtacacccttactgctacctgccatgaggccagataatagctagcagcccctggtctcattctactctggatgggtactgctgtttcctgaatgaaagacactgagattgatttcatgctaatgactgttggttaagagttcatgctttctattcacaatagcaaagacttggaaccaacccaaatgtccgtcaatgatagactggattaagaaaacgtggcacatatacaccatggaatactatgcagccataaaaaaggatgagttcatgtcctttgtagggacatggatgaagctggaaaccgtcattcttagcaaactattggaaggacagaaaaccaaacaccacatgttctcacttataggtgggaattgaacaatgagaacacttggatacaggaaggggaacatcacacaccggggcctcttgtggggtagggggaggggggagggatagcattaggagatatacctaatgtaaatgacgagttaatgggtgcagcagaccaacatggcacatgtatacatatgtaacaaacctgcacgttgtgcacatgtaccctagaacttaaagtataaaaaaaaaaaaaagttcatgctttgtggacaggtagcctgagttcattcatagctctactatttacctgaaaccttggactaattatttcacttttctgtgccccagtgttgtaatctgtaggatggggtactgcctgctccacagtgggactatgagaatgcttaaaataatgccaagcgcacagtcagctcaataaatgtcatctatgtagacaatgaaattcaagcataattccttaaacctttgtgccatacatccctttggcagtctggtaaagccttcattccttctcagcatcatgtttttaaatgagtaaaataaaatatataggattacacaggaaaccaattaaatactgctaccaagctatttaaaaatctatgatataatatgctttttaaattaaacccttaaatggatctagaggtaggtaaatgtctaacagcagatattttgaagttgcaatgaatgtaaatggcactttgagctatctacaactgaaatgcgatagaaaagtatctataatttctattagtgacagtcacaaatactactaatagtattgtggtttgttgcttatactcatcatcaaaggaaatactcaatttgagttaaaggtttaaataaagatgtatttttcccccatccaagttcatggatccctgaattctacccatggattccttggtcactggactccataggggtcacttggggaatgattgtgacaccaatgaaggaagccagcggatactgtttgctgtattatacctaccataggctcgtgatgaggaaataataaaataaataactgtaatgaaaaagaaaagaaaggaaaacaaaaggaacctaaaacagagaaggcaaatagctttccttttgagtgtcaattttaacagactccctgtggttgcgaaacaatgtgtctgaggctggctctgggttagagggagagtgctgttattgattagcaattcctgcatgacagcagagtggcaacagccatgcatctctgacctggcacagtcataagcatgttatagacataaagtgttagggaacaaataggctctagcaaaagtaaagagtgttcctcctctcatatcatcacttatatgtgtttataccatttatgttgtattttttacatgaatacttttagatttattaatctaatccaaaaaggtttgtatagctttctctatattaagagaaatatatgtatttcttaaatacacaaagttcttaaatctgatgccagcgaggattgcttccagccacaagtaacatatatcagattaatagtagttcattcaaagagggatttattttcctcacatgaaaaacagctctgtgggtgacccaatatagagcttgttcattgagccagtgattatatcaaggaactgggttcttcatatattttcattctttgatctccccctattgactttatagctgtatctttctcaaggatgcagaatggctgccgcagtctcaaacactgcgtgtgtgttcaaatcatgaagaaaggagattgagtgatgccagctagctctcttctcgtgactctcctttgtatctagaacacagtgtctttccccaaaacctgggtcatatgactacacctcaatacagcggagtctgggaaagcaaatatttgctttgcccaccactacaatagaaacgacaagggagaaagaaagggggttgggcatggcgttaattttgtcagccgctagggtctgccacccagaaaacagaagtccactaacaagcagggaactgattgttctgccagggaaaaagtctggcagtttcctactgaagaaatttggaagtcttgatggtccaggaaggataaaggcaaaaccttcattttcttttatcaaaaaggaaagccaagaaaaaaattagttaagtagaagttatgcacaaccctcatgtaactcttccatgttaatagcaggtaggctgcatatgaaaacatgatattatacaagaaaactagttgatgaagattgccctatttagcaccaattacttacgcaaacctaagttgactctgaaacaggaaccccatattaaacttttcaaacacatcagaatatgttactttgaacagattttatttaatccaaagagattatctttgaaaaaggtagatggtaaacatcgttatccctatttttgtatagtcaaataggcatagtagtaagttgtgtaaaattgacatccaaaccaatgcatgatactaaaacttggtgtacaaacagcagttacatcctattgctttgtatctacatctgtttctggagtcatataacatttgtagaatcttggaggtgttttaggctcatccttattttatccataaagaagactgacacctatagagattaactgacctgccaagggtcatggcagtttcactgctgagacaagaacacagatccctttacttctttctgagaaaagtacaaagtagtttaaagcaaaagcttccctgcttccagcacttctggctaagttgcgccgtgggaaaattgttttgtctgattcagttttctcatcttttaaactggaataatgctacctaatttacagggttgtttgaagaattaaatgaatgcatggaggtaaatcacttagaacagcggtaaattatacttttttattatttatttcctttgaccacccacaattatcatcagtgtcatcctcatcatcacaattaagattactaccacattaggctacataaactttttttttctctctctgttttataatttcaattttattttagattcaaggggtacatgtgcaggttttacatgggtatattgtctgatgctgaggtttggggaacaactgatgccatcacccaggtagtgagtatagtaccctatagtttttcagcccttgtctactcccttcccttccccttctagtagtccccagtgtctaccatcgtcatctttatgtccatgtgcaccattgtttagctcccagttaaagtgagaacatgcagtatttggttttctagcttatttttcctctcttaaatcacttctgtgacacgtaggccatgagatttattgtattttttaatgccttatttaaaaatttgtattatttaatacatttaatgcattattttttattatatttaaatattgatttatttgtactttttgccttattgctatattgtttcaaaaaatttaacattatttgagttacatgatttcaaatacatactgattaacattttaattagaaactttatgtctgatatgaattgccaaaatgtgtagttggtacaacctatgagtcattctgggttatctagaagaaactggtagcctgccccatactccagaagccttccccagtgtctagacctcagaagctgtcaggaatatgcacaggagaaggacacatggcaaatagctatttcgtctcttaaatgtatggtatgtgggaaccactgaaaaatgtaaagtttctacaaggtgctatttttattatttatggctctagagaacagagaaggtgaaaaatgtgagagagaagggaaagccaatagtatgtggccttcaaaacaaaagatcccacagatattgtcccaaactgcttcctggccctctagagtggagagggagggggaagacatcctattagagttcaacattctcttattatttccttcttttaattttctgggtatacaacagcaaatagttttgctgaagtagttacagaactagttggtgttctccaaccttcctattccaatacatactgtcatggatgggtacactaaaatctcagaattcactgctatatcactcatccatgtaaccaaaaaccacatgtacccccaaaagctattgaaataagataaatacattcttatttaaaaaaatactgtcatagggatgctaccttcttttcttttttgttagtaactatttgtgggatgtctttggtgtgtcaggctctgagcaatgccattttctcttggcttctttgcagtctctgtgtgaggcttacagtcatttttcacgtttgactcttcagaaggaagacagggctactggttctacatctggaactcttttcccacaacaccaacactgagaaatgtgacatggtgctgtgtttacatttgcataggaacttgcattataagttttatttgttgagttattggctttttttttttaataacccacatcagtatatagaactttgcaataggcatttttgttttaacttcatttctggtgcagttttattttcctacccttgtctttctattttctctttcatctgctttagacttaaactgtgttttatgtattgctgtaagcctctttaaaccctttctaaaacaaagcagggaatacataaacaaatagttttttgttttttgtttttttttctttgtaacagaaatcgacttaaagcctccagagaagtagaatctgtagaccttccacactgccacctgattaaaggaattggtatgtatatgaaaatgcttgttgggcacattgcattttttggccattaacattaaaacactcattaatggcattttagcatgaaattactgcttttcagtggataaatcacattagatcaacaaaaacctctttggtcaacctcttgatctgatgaaccctgtatttattcttctttcctaccctcactgtaaattattcttttttgtgtgtaattctatgtttagcatttgatttcttgcttgttttgtgacttctctgaactatttttgttgcgtctgtattgtttgtcaggtatggccgctgcagtctgtgttctgtgagccttgtggtcagctagtgaaggaagctttatgtaggcagtgacagcatttaccctgctcactactctataactaggatctgatcttatggctaacacgtaactgaccaatatggtttggttgtgtccccacccgaatctcatcttgaattgtagttcccataatccccacgtgttgtgggagggacccagtgagaggtcattgaatcatgaggtggttaccctgtgctgctgttctcgtgatagtgagtgagttctcatgagatctgatggttttataagggcttttcccccttttgctcggcacttctccttgctgccgccatgtgaagaagggtgtgttttcttccccttccaccaagattgtaagtttcctgaagcctccccaaccacacggaacagtgagtcaattaaacctctttcctttataaattacccggtctcaggtatgtctttattagcagcctgagaacggactgatgtaccggcacttcacaatatgtattgtaaaaacttgtttttattttatcttctaagctatgactgcagagggggagtctccctcttcccttgactttatgtaggatgtattgtggagtctgagtctttgagtaggggttcctaagagcaagccccaattttgctatagataaggagggatctgtccagattcttctccagcactgagggtctctctggtgtgtttgcagtttttctccaaggtagagtctgtgtcttgctgtcttttaccctttatcatctactaagtacatgtccctagtacataatagactagtagttagattatcaatgaacaataaatattggctttccttttttttaaattttaattttttttttttttttttttgagaggtggcctcactttgtcacccaggccagaatgcagtagcgcaatcttggctcactgcagccctgatatcctgggctcaagcgatcctcccgcctcgtcctcccaggtagctgagactacaggcacatgcccccactcatggctagttttttatttttgtagagacagggtcttgttatgttgtccaggctggtcttgaactcctggcctcaagcaatcctcccagcttggtctcccaaagtgctgggattgcaggcatgaggcactgagcccagccaatattggctttccttagatatggttcatggtatgattagaaacaaaaagaattagcagtcaaaacacctagtttctagttctattctgccacaatgtaaccttaggcaaagttggtttttgtatttgtcacctataatgatgagtttgtgattagactaatggtttttagactttaaaaagcctgggaccatttatttataatcttactctgagagccacagtgtggaaataactagactgtcattgagtcacttctagtcctttacaacaacatccttctctagaggtaggagagacaatttaatattttgttttactctttagaaattaaaactcgggttacatggaaatgttctcttctctgaataggtaacattgttaaacaagttttgagtgtccttccatctttttctttttatgaatactcctgtacataatttttaaaaacataagtgaggtcaaattatgcataatatttcaaaactagctttttgtacttaatactaggttttggaaacttatgtttgtacataatgttaccttttcttcacaactgcacagtattttttgtgcaaagttcatataaacagtgtatgtgcaaacaatatagaaagatataaaatggaaagtaaataaaaataaaaatctctcatcaaactcttcatcacccccaacagaaataaccccaaagataaagctcccttttttatctttcctgatagtttcagtgcatttgcaaacaaatatattgactctttttttcacaaatagaattttagtgtaaatatttcacaaccttcttcattcctaaaacagtgtgagcagctttccacatcagcatatatagttactttgttctttttaatattttcacattccatgatttatttaaccattccccttttaatgtacatttgggttgttacagttttttgcaactatgaacaaatcagtgaacatcattgctgttgagtttgtgtgtctgtagaatatgtccttaacaatgggattgttgttcccttagaatatgtgtttagagttttgacagtcattgctaagttgctctcaatttggcaacagtaataaactcagtacctcatagttgtaaccacattcactccagacagagttctcagcactcttttagtaaaaataaaccatcagttgacagtgccaccttcagagtttctctacaaataccttgcttgcctccctttctttttttcttcttttaaatcagcttcctcaggttgatctgcctctcattccttaggcatctgtttcctatgtgttctttctcctttttttcattgatacttttgtatttccccagttctacctcccctcccctagactggttggctgtcctggaatttcccttccttctttcaattgcccaaacactaagtgggaggaggcaaactcatatcaaatagcagattgactacatctgtgctggatcatgcagacagttcaagagtcccaagtaacttagcagcttcatcttgccttccagctgcaatcaagaagagccctctcagaactggtcactcagcaaaagccagatggcattagtaaaagatgttgggcaagggtgggagtttgggccagtgatctcttaggttacttttgctgctgagttaataattgtcacattattaaacagcccttggccctgggaagcccaccttctgtgaatacaagtctcagagtagacaatagggcacaaccagccatgttacatgacagactgccaagtgcattcctcttacaactcactgggatggagcgctcctcagagaaaaacaagcccagcaacatttgtattctgaacaggcatctgtctatgtttgtgacctttatgttgtgatgtgtgtgagctgctgtctggaattggaaagaatgaggaaatatgtcacctatggcccctcttgtgaagtgttaaatgcctctgaggcacttcaaaaggcaacagagcggagaggatgagtgattagaagcacatttgggatacatttttagatctaattagaattgtccttttttttttcttttttgcttttgccctgtggttagcacacaccatatgaacgtttgtcgaatgctatgttagtgatgcataatggttaataataacttttggttatatatctttaacaacagttgcttattcacaggtctttgataagaagaaataacaatgtgctggacacacatttctatacaggcaaaagtgactttttatgatagagagggctgtttcttattttctgttttgaaaacagtagtagctatgcacttgaggccaactaatccctctaagaggtgaaccttccttcccccttgcccttgattcccatcaacacacacatacatatgcacacactaccgtgcttcagtcaccatcactggaagtgaactatgtgcaacttttgggtgctttatatatatcatatcatattgtgtctgctttaataaatcatagttattgactacatatcatacaggatgtgtgccttctgtgggtcagaaaataagttcactatttagtccttttcaaaaattccttcccgatctatcttatagacagaaactaagcttttatacacccaagatttggcagattaacatctgcatattaaaatgtcaagagctagttaactttatttgaggcttaaaagttaaaaaatctgattttctaaatgtctggccttcaaaatttgagtggactgtctttctcaagataactaacaattttatgcacttggcagtcaagacctttacaataactgctgcttgggagattgaggggaaaaaagcattaaagtttgtggcccttataatcaagtactttacagtctactgatgggagaaaaggaaaacaaaacaaaacaaaaaaccactgtgagatatagatatgtcttttctttctctagcagataagtacctgaggctcaaggaggttaagcaacttttgcaaattcactttccaatatagtgtcttttcccagggtgactaatgtatatacttgatgagtgaaccagaaaagtaggaaataatatgttacatatgggatgctctattgggtatagtaaaggatgcgttgctgttataaaattatagtcacttagaaaagagatgtttatttttatttttctctcatcagtcttaaggtaagtgaatggcctagggtagttaggtgactgtgttccatatggtcattcaggggcaaatgctgatgaagcaacacagctgtcttcatctaagactagaactctgcttgttgccatttcccagcaggaaggggttgaaagaaaatttatgtagatttttttttctacccagtagttgcatatatattgtattctcacatcctattgacccaaacttagacatatggccacatctgtcagccagaaagggtgggcaatgttatctatagctgtgttgctacgtgcctattgctaaaaaggctaaaaaggaagaaggggaacatggatgctggtgaacacttggccacctctgacacagataattgctaaagtaataagaagagatggaaattaaatgtgctaagctaggagactttctaaagaaagggtttgtcatgctacgctgtgccattcatgtgtttttttgctcatgctgttccttgtgcctggaaattctccccctaattcccctgagcagtggatgcagtggataccctccccagatcccccccaacttccctgagtgttggctaccaaaagctctgagtgcacccagggagctaagtcctcctgcccacaggcaataatggactgacacggggtagacttaaagaaataagaggcacatcaatcaattgaaatgtgtgggaccttacctggactctgaattaaacaaactgtaattttttaaagctacaccttttaaacatgattggctatttgaacactaactagatatttgatgatattgaggaattattgtgaatttttagtgtagtaatgatattgtggtttgtataaatatatttagggataatatgatgcctcagatttgctttaaaataacacaggatgaggataagtggtaggactgcaagggaaacaagactggccatgagctgataactgttgaaggtgggtactgggtatataagggctcaccacaccattctcttgatttgtgtctatttcccataataaaaagtttaaagagagagaaccgatgaaggggagggagagagtcaagcacacaataagagtgacaaacagtgccaaatcagcccacagtattaagttttcacatatttacataaatatcacctggaatgcaatattgaaattaatgtatatcactagaataaaaaaagtaaagatttaataaatttgttttgaaataaaataagttgaaatacgaaaaagacagaaaaggttttgaaagaggttttaaagaaaagtgcaggatattcattggtaaagatgttggtgagaggcttggaagcaaaacttcaggggaaaaagacaacatatggaattgaccacaattgaatttacaagtgaagtggctttacagaggaatcaggggatgtttctgagagaggaaattcattaaattctaacttgaatattttctgtttgcctttaagtcagagcaaaggctttgagtcccagcttcccagtttgtgaccttgagcaattgcttaacttttccaaagcctccaatagtcttcactctaaaataaaagataatcatatgagatattgtatgcagggtatttacaaggagcctggtacttggtgtacctaatgtatgttagttattattattaaattagaggagcaaaaatttctctagcattgactgctcctgacataatcacaccgaagaggggatacacgatgataaaaccttcctgcagtagtggctatagaaatgatgacggggagaagatctggaaaatattccaaagaaggctacagatagatacattttttccattggaattaggcaatggagttaaacagaagttacaatatggttgaaataaatgtatttttttaaaaaaagatttctctttccttaattattaaaaaatatacaattttgtagaaaattttaaacaaagtataaagaaaaaaataaaaatcattcataatcctatcaaagaagcattgttaattttttctatatatcttctttttccacgtgtatacttggaaattaaattttctaaaataattttcaggaaaaacaaattttaattaattgagcttctactaaataggactgaaaagcaaaacctggactagaattctctctcggtgtgtgtgtgtgtgtgtgtgtgtgtgtgtgtgtgtctgtgtgtacatgtgtatgtgctgtgtatacatgtgtatgtggtgtagcgttcccctgattcttaacttattaccagtggacaaccaccgtggaactagagtctagtcattcttaacctttttgggggaatcacagtctcttttttgaatctgatgaaaatcaaggaccgtttttacagaaacgttctcatctgtgcatacatgagacattttgcattgcatagaatttccgagggttcacagatactttgaagcccaaaagtgatccacagaccccagattgagaactcctccgctatgccatgcttaagcttatttctgtgtatcttctttctgaggagcaggcagatgggtcatctttacaatgtgaagttcttggcatttttattttgttttgtttttctgcactacgatggagcaagcaacactggaggcaactggctaaatgcaaactcatgaagcaagaccaaaatggctggatagatagatgctgtttggttttgacaacctagaaataaccttgaagaaatcctatggagaagtcttaaagaggaagattggattttgtagactcaaagaatgtgtcatggtttggcttaatctaagccatttttattcttcttttcttgtgtttgggtctattatctgtctgtagaatttatacagtgagactgctggggaaagtcttatgtctaattatttgctgtgctgtgtggagtgtactgcagacagtcaataaacaatcaatagtaattgtagcctgcctcagagacaggagttagaaacttcaactggcttaggtgcatggtatttttcattaattttcttctgctagtttttttctctaatttaaagcctaaatttaaagattaaatagaaaagctttctttgcttatgagcacaagtaggcactgtttttaaaagaaggaatatataatcccaggtgttttacctctgttaatgagaaagatgtctgtttgcttcagattgaatgagcaaagaagaggacaaggatatttgcatggttaaatgcctatgagcccttccttcagaaagtaatattcccctgatgtcaattacttttatacggacatctggatgtttatcatgagagtgtacagatgtcaactttttcagtattatagctggaaatgtggtgataacttgactttgatttgagtaaacataaaatatctaacatttaaagtcagaagttcacttcaggaaggggtttaaactgacatttattaaaaagaatggttccttggaaaaaacatcagaaccatccctaaagatacagtcactctgataaagtaaacagagtcccagttatgctctgtgtaacaaataacagaacttgaacatgacatttatctgttccttaaacttacagaagctggctctgaagatattgacatacttcccaatggtctggctttttttagtgtggtgagtgtcttcttccttccccaaattcagcagaggagatacaagggtatttgatgagggctgcagaacagtaagttgcttttaaaattcattttccaaaatgcattctgaagaaaagagaggtcaaacaagatcttggaaaacttcctccagcttttctaaatgtagagatgaagactctttgcccattgagatagtgttctttatttccccattgcattgcactaaaatattccaatgcaatctgtgttttgttttgttttttcttttttaattttttttattttttgagacggagtcttgttctggttgccccggctggagtgcagtggcatgatctcagcttactgcaacctccgcctcccgggttcaagcaattcttttgcctcagcctcccgagtagctgggattacaggcgcccgccaccatgcccggctaatttttgtatttttagtagagatggggtttcgccgtgttggccaggctggtctcaaacacctgacctcaggtgatcgcctgcctcagcctcccaaagtgctggcattacgggagtgagccaccacgcccagcgcaatctgtgttttaaatgtgcactattaagagggatatttgaggtcttactgtggatactcaatactaacattatactattttaaatacagcatctactcatctttctattactattcaacttgaagcaaatattcttgccattattatttattttcaaatattataccaaccttgcccttttgctttctttcttttttcccctgaatagccaatcataagtggaaagtcattgagtttatttacacccttcattttgccttgattcttgtaagctgaaaaacaatatcctttctgggtatacaatagaaagactttaaaaacaattggcttgtgaatattgttgtgaatattgttgaaactagcttgtaacaatgtccattctaattggaaatccagataaggggacagatgaggaggttctgaccacctacctccctggcttgggcagacataggagttcttggcatcttcataggtccagtttttctggaggaagaagtaaccaactctgacacctgactgtaattattccatttcctctcaacatccattattttcaggctctgagactcaagagggatgtgaaatactgggagatacttagaagggagtcaccacactaataaaatagttgttagacttatgagaaaggtgagagaactcaggttggagtagaatgagaattagaacactcttcaggttcctgatggtttttatgtgaaagacagtgagcagctggttattaccactgaggcaataaagagatactgtgggctttagcagaaacaccagtatatgtatttagtttttaaaataaggttttaaaaggaatgttttatttaattgcctacacagaatgaataaagtgatatttatagtaggactctgggtttgtttaggagcacatgcttgcacatgtgtggcttaggaaaaaccactgggaccactagtctaaaatattcataagtaaagatgcaaacattctgaataaagtagaaggcagttgcattgatttttttatttgtttatttgtgttttttgttgttgttttgcaaggatgtgttcttggagatttttataatctagaattcacctatttcaagatttctctccagcccccatagtaataaatctgaagtaggagggatgaggtctccaaacacataaatctacagccattttagcttgggggcatgttatagttacaaagatcttatagccatatcaatagaactttttctgctttttttctgttaccctcctttgctcatttgactttttttaaaatttagaaacattcccagtttgctgctgtttttcatttacttggcattgtctctaataaaacctagagtgtactctcttctaaataaagaggtcctacattgtggaggttgttcattcttcttcctagcattttagctcatctaacccaacctattttacagttatgggttgagggtcacctcaaaactaatgtcacacttcatgaagaattggatgacatagaataaaatataaaaaatgtaaacaatgtgagtgtgcttaacaccactgaactgtacacttaaaaatggtgaaagtgatgaatgttgtatgtattttatcataattaaaaataaatttttaaaaagagaaaaaatacttaaataaataaggagtgcgaacataaccatgactagttatcaccatctgatagtgcttcctttgcatgtaaatcatgcttttgttttggggacattcataaagaatagggattaactgaagtggcactgccatgtaacaatagcataattccagtttgttctacttaccaggcttgccctccatgaaaatatacaattgtagataatcttttttaattggagagatttcctcttatgtccaattttatacataaagtaagacttttttattgtgtgcctaaatttgtgtaaatatgactgcatcgtattagtaaactgaattaggtagtgcattcacataaaatttaacatcaccaagaaggctttaccttaagaatgtaatgatgaatcaccattttagatagactgataggtaatttattaactgatttaaaagagaaaagacctatatcatctcagtgagtaccaaaaagcatttaataaaattcaatactcattcctaaagttccaagcaaactagaaagataaggaaaattcccacaaaactacagcaaacatcattcttgatggtgaagcattggctgcatttgcattaatgctcagaacaggaagaaaatacccaacaccacaaccatcagtaatctactagagttcttagtaattcagtaaaacgagaaaaagaaatgtgagatagaaaagaaaaagacaaaactgtcattagagaagcagggactggctcaattgcccaggctgatgtgcagtagtgcaatcatagctcactgcagcctgaactcctaaactcctgcgctcaagaggtccttccacctcagccttccgagcagctaggactacaagtgctcaccataacactcagctaatttttttttttttttttttttttttttttgtagagacagagtcttgctatgttgcccaggctggtctcaaactgctggcctcaagcagtcctcccacgtcagcctcccaaagtgctggaattataggcatgagccaccaggcctgacctaaagctgtagtaatttaaaaagtgttatattggcacaggaatagacatgagacattaaaataacaaaacagagagtccctaaatagaccaatatgtaaatgtcagagatctagcacatgataaaggtgatattttgaatcagtgggagaaggatggactgtatgccaggcactgttccaggcactgggatctagcagtgaacaaatttccacagtcagtatgtagatgtcacttttctccaccctcagctct

SEQ ID NO: 13490 - DNA, 569 bp, Homo sapiens
atggggcggctggtggctgtgggcttgctggggatcgcgctggcgctcctgggcgagaggcttctggcactcagaaatcgacttaaagcctccagagaagtagaatctgtagaccttccacactgccacctgattaaaggaattgaagctggctctgaagatattgacatacttcccaatggtctggctttttttagtgtgagacagagtcttgctatgttgcccaggctggtctcaaactgctggcctcaagcagtcctcccacgtcagcctcccaaagtgctggaattataggcatgagccaccaggcctgacctaaagctgtagtaatttaaaaagtgttatattggcacaggaatagacatgagacattaaaataacaaaacagagagtccctaaatagaccaatatgtaaatgtcagagatctagcacatgataaaggtgatattttgaatcagtgggagaaggatggactgtatgccaggcactgttccaggcactgggatctagcagtgaacaaatttccacagtcagtatgtagatgtcacttttctccaccctcagctct

SEQ ID NO: 13491 - DNA, 10865 bp, Homo sapiens
atcgagccgggaagatggcaccgcccacggagctgctggccaggccggagcgaggcagcgcgcccggctcccgcgccatggggcggctggtggctgtgggcttgctggggatcgcgctggcgctcctgggcgagaggcttctggcactcaggtaggtgggactcccgcgcgcccctcctcggcggtccccaggctcggggtggccgcgtggtgcggggagggcgcaggctgggggagggattcctgcgggacctggccctgcggccgggggtggagaatttttgaatgctgtccctcccccagctagttgaacccccatcaccccgactctccgcttctagtgaaaaaactagcaaagtttggagtgaatcgcgacactttcttgaaagtttataagcccttgctgctaacaaagttctcttctgcttaggctgacaagagaatgctttgcaattacccaagggccaaactagtggtttaaattgaaaacaaaatgactactcatgcattgaaaccttaactatgaagatttatttcaggtcattggtgctgtttctccttgttgcccaaaccagacccgtctttaataaagttgttctccacccatttctgcatagtttgagaaactcttcagctgtagatcaaagacacttgaaatattcagctactgttcttacttcctatttattcaccagggaagcctgaagccagaatgccagacagcgcagacactattccatctcgcattttagttttaatgaaaatctctggtaggtagacatcatcgtttataaattaccaactcaacgtttgttttttgtttattttattttttgtagagatggggtcttgctgtattgcccaggctgttccctaactcttgcactcaagcaatcctccagcctaggcctccccacagtgctgggattacaggtgtgagctgttctgccctgcctcaaccaaaattttataggcctcatgcaaaagagttccagaaagactgagcacctgctatgtgtaatgttctctcttaggcttctatagtagagtacgacccttatggagtttgatacaggggaagagagaattaaaatacagtaaatgtataaattaggatgttctaaggacagacacaaatgaaccgcataggcttaaagaggaaagattccatcccctgagggtggagttctagagggaggaagagacattcgacctgaccttgaagggtgggtgcaacacatatgagcatgaaggggcccatgccaaatgtatagtgcagcaggagcaaaggggctaaggtgggaagttggaagactagcaaatgggccaatttgaagggagcataaagtcaggagatgagaatagtagggtggtgggaaggataggttttgaggccattaaatataagttgaaaaatggggccccactttcataggcccaatagtgcttcaaaagggaaatattggtgggttttgcttttcaacaagaacttaatataactagttgtgttttatagagataagcctggaaggggggattggaggagagcaatggttctctgtacattagaatctcctggagggctggtgtctgagtggcaccaccaaagattctgattcagctgttctggatcagaatctacagctcacacctgtaatcccagcactgttggaggcctaagccagaagattgcttgagcccaggagttagtgacaggcctgggcaacatagcaagatcccacctctacaaaatgaataaataaataaataaataaataaaaaacaaaatttgagttggtaatttataaactatggtgtctacctaccagagatttttcgttataattaaaatgtgatatggaataatgtattgtttggcaagctggcttcagggttcccaggtaaatagataaataaggaagtgcataatgtaagaacagtggctgacagtagcagtggcattttttatttttaaaaacattcctgataattctaatgagcagtcaaggtcgagaactactagaatagagagcagacatggggtaactggttaaggtattgcagtaggtcagagaggataacagggacccaaactctggaaccccagggatgagggagaagtcaaaggtgctaccagagtttgtgccacagctccactgtcccatggttgtagtttcatctactgataaagcagtgcaaagaggaagcgtgtggtggctgagatgggagtgagatttgaggaaagaacgcttatgggtaggaaatggacatgttgaccttaattttcatgttaggtaatgcccattgtgctctacagaacattcatgagttggatgactttgtatatgatctgtcctgctctccatttcaaaggcaagaccaccaaaattcacaagcttattatgttgtcactaatgtgtaagccaccagtttttctgcaagttggaagttttctcaacagtcaaatattcccccttctcactaatcttaaggttttaaagttatagctgcaaatctaaaaaaaaaagaaaaagtaaataaaacttattgacagaatgcctgatagtttatttacaggtttttgtttgtttgttttttgtttttctttgttttttattttgacacaaggtcttgctctgccgcccaagccagagtacagtggtacatcaaagctcactgcaatctcaaacacctaggcacaagcagtcctccctcctcagcctcctgagtagctgggactacagatgcatgctaccatgcccagctagtatttttatttcttgcagagacagggtctcactttgttgcccaggctaatctcaaactcccagcctcaagtgatgctcctgcctcagcctcccaaagtggtaggattatacacatgagccaccaccctcggcctactttacaatttgatgcaccttttctttacgtgactgtgatgcactttaatgggcagtgactttataaaatggtaactttattggatatgtggagccccaaatgggctgacgtgagaatgttggggtaggtggtgggtggctggatttagcaaagaaaaatgtaggctacccagttaactttgaatttcacatggatttttttttttttttttagtataagcatgaaatacttataccatacttttagcattaagcgtggaatttgggacataattatactaaaatatcattcattgtttatctcaaattaaaatatcactgggtaccctgtattttatcatatgttcgagtgccttctgtcagaatttggtgaccctttgagtctgttttaaaaaggagcatgtttggccggacacagtggctcacgtctgtaatcccagcactttgggaggctgaggcgggcagatcactagaggtcaggggttcaagaccagcctggccaacatggtgaaaccccgtctctaataaaaatacaaaaattagccaggtgtggtggtgcatccctgtaatcccagctacttgggaggctgagtcaggagaattgcttgaaccccagaggtagaggttgcagtgagccaagattgagccactggactccagcctggacaacagagaaagactccctcaaaaaaaaaagaaaaaaagcatgttcccacctccccataaggaaaggctcttcagaggaagttgaaggaacagaggctttatgtttgatttttgctttaatctgatgcctactgtttgattattcaatatttagagatggtactttggcaatcaagttatttctctccccaggttgcccacttcaatttttagtataaggatgtcccagagggataaatgccatcaaagttgtctttcttcttctgaactgtaactgggattccacaccctccttttccacccctccctagttgagcaataaaggggaaaataacagtatacaaatattcccaggccagttcctggtgtcaaggtacacagccatggatgaatcatgaggcttgagtgcatcagagacctaagcgtgggcaggaacccccagagtacccatgtgaatgttctgcttgctgcctcgcaccttttatgacaattcccacaagaagctatgtggtctgtttctacttctgaaagagcagcctttttcccttttttttttttttaaaccaccatcctttaaatcatttattatgtaactcttgtgtgctggtcagtcagtgtgtcaaaagtgtaaaaacttctttatttatttttttaatctatcttttaaaaaatattttctttctttttttcttttttcttcaaggcaggttcttgctctgtcacccaggctggagtgcagcagcacaatcatagctcattgtaacccagaacacctgggctcaagcaatcctcccacctcagcctcctaagcagtgaggactataggcatgcaccactacacctggctaattaaaaaaacatggccgggcacggtggctcattactataatcccagcactttgggaggctgaggcgggtggatacctgaggtcgggagttcaagaccagcctgaccaacatggtgaaaccccatctctactaaaaatacaaaattagccaggcacggtggcacatgcctgtaatcccagctactcaggaggctgaggcaggagaatcacttgaacccgggaggcggaggttgcagtgagccattgcactccagcctggcaacagagcgagactctgtctcaaaaaaaaaaaaacaaaaaaatttttttgtagagatgggggtcttgctgtgttgcccaggctgatctcaaacttctagccataagtgatcctaccgcatcaacttcccaaagcactgggattatgggtatgagctactgagccctgccaaatttctttatattaaaccaaaacgtacatttactgatatttggaaagaaagctcttttacttttatgccttcatccagtcttcatagatatcttcccttttacattataactgtaaatactgaggttagagaggttaactagttagttcaacagaataatataaatattgaataatataattaatgaataattagtgctgaacctgtcgcctcagccaggtctcctgattccaaatacagtttgccccagctccccacagtcttctagcttctctgccagtggagcaaattttccctaggtttacaggcctaagcacagattcttagttacttagtgcaagtattgccagagcccaaggggtgaattccaaagggtttttacaaggctatacataaaagataaagccctggcttgtatatcacttgcacataggagataaagccccagcagttgtatgtaaatttcaaaagcagagaagtatggcacaaagaaactcctgatagtaacactgtgttcccactttgcttaggggcatattggcaccgtagcatggtacacccttactgctacctgccatgaggccagataatagctagcagcccctggtctcattctactctggatgggtactgctgtttcctgaatgaaagacactgagattgatttcatgctaatgactgttggttaagagttcatgctttctattcacaatagcaaagacttggaaccaacccaaatgtccgtcaatgatagactggattaagaaaacgtggcacatatacaccatggaatactatgcagccataaaaaaggatgagttcatgtcctttgtagggacatggatgaagctggaaaccgtcattcttagcaaactattggaaggacagaaaaccaaacaccacatgttctcacttataggtgggaattgaacaatgagaacacttggatacaggaaggggaacatcacacaccggggcctcttgtggggtagggggaggggggagggatagcattaggagatatacctaatgtaaatgacgagttaatgggtgcagcagaccaacatggcacatgtatacatatgtaacaaacctgcacgttgtgcacatgtaccctagaacttaaagtataaaaaaaaaaaaaagttcatgctttgtggacaggtagcctgagttcattcatagctctactatttacctgaaaccttggactaattatttcacttttctgtgccccagtgttgtaatctgtaggatggggtactgcctgctccacagtgggactatgagaatgcttaaaataatgccaagcgcacagtcagctcaataaatgtcatctatgtagacaatgaaattcaagcataattccttaaacctttgtgccatacatccctttggcagtctggtaaagccttcattccttctcagcatcatgtttttaaatgagtaaaataaaatatataggattacacaggaaaccaattaaatactgctaccaagctatttaaaaatctatgatataatatgctttttaaattaaacccttaaatggatctagaggtaggtaaatgtctaacagcagatattttgaagttgcaatgaatgtaaatggcactttgagctatctacaactgaaatgcgatagaaaagtatctataatttctattagtgacagtcacaaatactactaatagtattgtggtttgttgcttatactcatcatcaaaggaaatactcaatttgagttaaaggtttaaataaagatgtatttttcccccatccaagttcatggatccctgaattctacccatggattccttggtcactggactccataggggtcacttggggaatgattgtgacaccaatgaaggaagccagcggatactgtttgctgtattatacctaccataggctcgtgatgaggaaataataaaataaataactgtaatgaaaaagaaaagaaaggaaaacaaaaggaacctaaaacagagaaggcaaatagctttccttttgagtgtcaattttaacagactccctgtggttgcgaaacaatgtgtctgaggctggctctgggttagagggagagtgctgttattgattagcaattcctgcatgacagcagagtggcaacagccatgcatctctgacctggcacagtcataagcatgttatagacataaagtgttagggaacaaataggctctagcaaaagtaaagagtgttcctcctctcatatcatcacttatatgtgtttataccatttatgttgtattttttacatgaatacttttagatttattaatctaatccaaaaaggtttgtatagctttctctatattaagagaaatatatgtatttcttaaatacacaaagttcttaaatctgatgccagcgaggattgcttccagccacaagtaacatatatcagattaatagtagttcattcaaagagggatttattttcctcacatgaaaaacagctctgtgggtgacccaatatagagcttgttcattgagccagtgattatatcaaggaactgggttcttcatatattttcattctttgatctccccctattgactttatagctgtatctttctcaaggatgcagaatggctgccgcagtctcaaacactgcgtgtgtgttcaaatcatgaagaaaggagattgagtgatgccagctagctctcttctcgtgactctcctttgtatctagaacacagtgtctttccccaaaacctgggtcatatgactacacctcaatacagcggagtctgggaaagcaaatatttgctttgcccaccactacaatagaaacgacaagggagaaagaaagggggttgggcatggcgttaattttgtcagccgctagggtctgccacccagaaaacagaagtccactaacaagcagggaactgattgttctgccagggaaaaagtctggcagtttcctactgaagaaatttggaagtcttgatggtccaggaaggataaaggcaaaaccttcattttcttttatcaaaaaggaaagccaagaaaaaaattagttaagtagaagttatgcacaaccctcatgtaactcttccatgttaatagcaggtaggctgcatatgaaaacatgatattatacaagaaaactagttgatgaagattgccctatttagcaccaattacttacgcaaacctaagttgactctgaaacaggaaccccatattaaacttttcaaacacatcagaatatgttactttgaacagattttatttaatccaaagagattatctttgaaaaaggtagatggtaaacatcgttatccctatttttgtatagtcaaataggcatagtagtaagttgtgtaaaattgacatccaaaccaatgcatgatactaaaacttggtgtacaaacagcagttacatcctattgctttgtatctacatctgtttctggagtcatataacatttgtagaatcttggaggtgttttaggctcatccttattttatccataaagaagactgacacctatagagattaactgacctgccaagggtcatggcagtttcactgctgagacaagaacacagatccctttacttctttctgagaaaagtacaaagtagtttaaagcaaaagcttccctgcttccagcacttctggctaagttgcgccgtgggaaaattgttttgtctgattcagttttctcatcttttaaactggaataatgctacctaatttacagggttgtttgaagaattaaatgaatgcatggaggtaaatcacttagaacagcggtaaattatacttttttattatttatttcctttgaccacccacaattatcatcagtgtcatcctcatcatcacaattaagattactaccacattaggctacataaactttttttttctctctctgttttataatttcaattttattttagattcaaggggtacatgtgcaggttttacatgggtatattgtctgatgctgaggtttggggaacaactgatgccatcacccaggtagtgagtatagtaccctatagtttttcagcccttgtctactcccttcccttccccttctagtagtccccagtgtctaccatcgtcatctttatgtccatgtgcaccattgtttagctcccagttaaagtgagaacatgcagtatttggttttctagcttatttttcctctcttaaatcacttctgtgacacgtaggccatgagatttattgtattttttaatgccttatttaaaaatttgtattatttaatacatttaatgcattattttttattatatttaaatattgatttatttgtactttttgccttattgctatattgtttcaaaaaatttaacattatttgagttacatgatttcaaatacatactgattaacattttaattagaaactttatgtctgatatgaattgccaaaatgtgtagttggtacaacctatgagtcattctgggttatctagaagaaactggtagcctgccccatactccagaagccttccccagtgtctagacctcagaagctgtcaggaatatgcacaggagaaggacacatggcaaatagctatttcgtctcttaaatgtatggtatgtgggaaccactgaaaaatgtaaagtttctacaaggtgctatttttattatttatggctctagagaacagagaaggtgaaaaatgtgagagagaagggaaagccaatagtatgtggccttcaaaacaaaagatcccacagatattgtcccaaactgcttcctggccctctagagtggagagggagggggaagacatcctattagagttcaacattctcttattatttccttcttttaattttctgggtatacaacagcaaatagttttgctgaagtagttacagaactagttggtgttctccaaccttcctattccaatacatactgtcatggatgggtacactaaaatctcagaattcactgctatatcactcatccatgtaaccaaaaaccacatgtacccccaaaagctattgaaataagataaatacattcttatttaaaaaaatactgtcatagggatgctaccttcttttcttttttgttagtaactatttgtgggatgtctttggtgtgtcaggctctgagcaatgccattttctcttggcttctttgcagtctctgtgtgaggcttacagtcatttttcacgtttgactcttcagaaggaagacagggctactggttctacatctggaactcttttcccacaacaccaacactgagaaatgtgacatggtgctgtgtttacatttgcataggaacttgcattataagttttatttgttgagttattggctttttttttttaataacccacatcagtatatagaactttgcaataggcatttttgttttaacttcatttctggtgcagttttattttcctacccttgtctttctattttctctttcatctgctttagacttaaactgtgttttatgtattgctgtaagcctctttaaaccctttctaaaacaaagcagggaatacataaacaaatagttttttgttttttgtttttttttctttgtaacagaaatcgacttaaagcctccagagaagtagaatctgtagaccttccacactgccacctgattaaaggaattggtatgtatatgaaaatgcttgttgggcacattgcattttttggccattaacattaaaacactcattaatggcattttagcatgaaattactgcttttcagtggataaatcacattagatcaacaaaaacctctttggtcaacctcttgatctgatgaaccctgtatttattcttctttcctaccctcactgtaaattattcttttttgtgtgtaattctatgtttagcatttgatttcttgcttgttttgtgacttctctgaactatttttgttgcgtctgtattgtttgtcaggtatggccgctgcagtctgtgttctgtgagccttgtggtcagctagtgaaggaagct

SEQ ID NO: 13492 - DNA, 573 bp, Homo sapiens
atcgagccgggaagatggcaccgcccacggagctgctggccaggccggagcgaggcagcgcgcccggctcccgcgccatggggcggctggtggctgtgggcttgctggggatcgcgctggcgctcctgggcgagaggcttctggcactcagaaatcgacttaaagcctccagagaagtagaatctgtagaccttccacactgccacctgattaaaggaattggtatgtatatgaaaatgcttgttgggcacattgcattttttggccattaacattaaaacactcattaatggcattttagcatgaaattactgcttttcagtggataaatcacattagatcaacaaaaacctctttggtcaacctcttgatctgatgaaccctgtatttattcttctttcctaccctcactgtaaattattcttttttgtgtgtaattctatgtttagcatttgatttcttgcttgttttgtgacttctctgaactatttttgttgcgtctgtattgtttgtcaggtatggccgctgcagtctgtgttctgtgagccttgtggtcagctagtgaaggaagct

SEQ ID NO: 13493 - DNA, 25002 bp, Homo sapiens
agctgctggccaggccggagcgaggcagcgcgcccggctcccgcgccatggggcggctggtggctgtgggcttgctggggatcgcgctggcgctcctgggcgagaggcttctggcactcaggtaggtgggactcccgcgcgcccctcctcggcggtccccaggctcggggtggccgcgtggtgcggggagggcgcaggctgggggagggattcctgcgggacctggccctgcggccgggggtggagaatttttgaatgctgtccctcccccagctagttgaacccccatcaccccgactctccgcttctagtgaaaaaactagcaaagtttggagtgaatcgcgacactttcttgaaagtttataagcccttgctgctaacaaagttctcttctgcttaggctgacaagagaatgctttgcaattacccaagggccaaactagtggtttaaattgaaaacaaaatgactactcatgcattgaaaccttaactatgaagatttatttcaggtcattggtgctgtttctccttgttgcccaaaccagacccgtctttaataaagttgttctccacccatttctgcatagtttgagaaactcttcagctgtagatcaaagacacttgaaatattcagctactgttcttacttcctatttattcaccagggaagcctgaagccagaatgccagacagcgcagacactattccatctcgcattttagttttaatgaaaatctctggtaggtagacatcatcgtttataaattaccaactcaacgtttgttttttgtttattttattttttgtagagatggggtcttgctgtattgcccaggctgttccctaactcttgcactcaagcaatcctccagcctaggcctccccacagtgctgggattacaggtgtgagctgttctgccctgcctcaaccaaaattttataggcctcatgcaaaagagttccagaaagactgagcacctgctatgtgtaatgttctctcttaggcttctatagtagagtacgacccttatggagtttgatacaggggaagagagaattaaaatacagtaaatgtataaattaggatgttctaaggacagacacaaatgaaccgcataggcttaaagaggaaagattccatcccctgagggtggagttctagagggaggaagagacattcgacctgaccttgaagggtgggtgcaacacatatgagcatgaaggggcccatgccaaatgtatagtgcagcaggagcaaaggggctaaggtgggaagttggaagactagcaaatgggccaatttgaagggagcataaagtcaggagatgagaatagtagggtggtgggaaggataggttttgaggccattaaatataagttgaaaaatggggccccactttcataggcccaatagtgcttcaaaagggaaatattggtgggttttgcttttcaacaagaacttaatataactagttgtgttttatagagataagcctggaaggggggattggaggagagcaatggttctctgtacattagaatctcctggagggctggtgtctgagtggcaccaccaaagattctgattcagctgttctggatcagaatctacagctcacacctgtaatcccagcactgttggaggcctaagccagaagattgcttgagcccaggagttagtgacaggcctgggcaacatagcaagatcccacctctacaaaatgaataaataaataaataaataaataaaaaacaaaatttgagttggtaatttataaactatggtgtctacctaccagagatttttcgttataattaaaatgtgatatggaataatgtattgtttggcaagctggcttcagggttcccaggtaaatagataaataaggaagtgcataatgtaagaacagtggctgacagtagcagtggcattttttatttttaaaaacattcctgataattctaatgagcagtcaaggtcgagaactactagaatagagagcagacatggggtaactggttaaggtattgcagtaggtcagagaggataacagggacccaaactctggaaccccagggatgagggagaagtcaaaggtgctaccagagtttgtgccacagctccactgtcccatggttgtagtttcatctactgataaagcagtgcaaagaggaagcgtgtggtggctgagatgggagtgagatttgaggaaagaacgcttatgggtaggaaatggacatgttgaccttaattttcatgttaggtaatgcccattgtgctctacagaacattcatgagttggatgactttgtatatgatctgtcctgctctccatttcaaaggcaagaccaccaaaattcacaagcttattatgttgtcactaatgtgtaagccaccagtttttctgcaagttggaagttttctcaacagtcaaatattcccccttctcactaatcttaaggttttaaagttatagctgcaaatctaaaaaaaaaagaaaaagtaaataaaacttattgacagaatgcctgatagtttatttacaggtttttgtttgtttgttttttgtttttctttgttttttattttgacacaaggtcttgctctgccgcccaagccagagtacagtggtacatcaaagctcactgcaatctcaaacacctaggcacaagcagtcctccctcctcagcctcctgagtagctgggactacagatgcatgctaccatgcccagctagtatttttatttcttgcagagacagggtctcactttgttgcccaggctaatctcaaactcccagcctcaagtgatgctcctgcctcagcctcccaaagtggtaggattatacacatgagccaccaccctcggcctactttacaatttgatgcaccttttctttacgtgactgtgatgcactttaatgggcagtgactttataaaatggtaactttattggatatgtggagccccaaatgggctgacgtgagaatgttggggtaggtggtgggtggctggatttagcaaagaaaaatgtaggctacccagttaactttgaatttcacatggatttttttttttttttttagtataagcatgaaatacttataccatacttttagcattaagcgtggaatttgggacataattatactaaaatatcattcattgtttatctcaaattaaaatatcactgggtaccctgtattttatcatatgttcgagtgccttctgtcagaatttggtgaccctttgagtctgttttaaaaaggagcatgtttggccggacacagtggctcacgtctgtaatcccagcactttgggaggctgaggcgggcagatcactagaggtcaggggttcaagaccagcctggccaacatggtgaaaccccgtctctaataaaaatacaaaaattagccaggtgtggtggtgcatccctgtaatcccagctacttgggaggctgagtcaggagaattgcttgaaccccagaggtagaggttgcagtgagccaagattgagccactggactccagcctggacaacagagaaagactccctcaaaaaaaaaagaaaaaaagcatgttcccacctccccataaggaaaggctcttcagaggaagttgaaggaacagaggctttatgtttgatttttgctttaatctgatgcctactgtttgattattcaatatttagagatggtactttggcaatcaagttatttctctccccaggttgcccacttcaatttttagtataaggatgtcccagagggataaatgccatcaaagttgtctttcttcttctgaactgtaactgggattccacaccctccttttccacccctccctagttgagcaataaaggggaaaataacagtatacaaatattcccaggccagttcctggtgtcaaggtacacagccatggatgaatcatgaggcttgagtgcatcagagacctaagcgtgggcaggaacccccagagtacccatgtgaatgttctgcttgctgcctcgcaccttttatgacaattcccacaagaagctatgtggtctgtttctacttctgaaagagcagcctttttcccttttttttttttttaaaccaccatcctttaaatcatttattatgtaactcttgtgtgctggtcagtcagtgtgtcaaaagtgtaaaaacttctttatttatttttttaatctatcttttaaaaaatattttctttctttttttcttttttcttcaaggcaggttcttgctctgtcacccaggctggagtgcagcagcacaatcatagctcattgtaacccagaacacctgggctcaagcaatcctcccacctcagcctcctaagcagtgaggactataggcatgcaccactacacctggctaattaaaaaaacatggccgggcacggtggctcattactataatcccagcactttgggaggctgaggcgggtggatacctgaggtcgggagttcaagaccagcctgaccaacatggtgaaaccccatctctactaaaaatacaaaattagccaggcacggtggcacatgcctgtaatcccagctactcaggaggctgaggcaggagaatcacttgaacccgggaggcggaggttgcagtgagccattgcactccagcctggcaacagagcgagactctgtctcaaaaaaaaaaaaacaaaaaaatttttttgtagagatgggggtcttgctgtgttgcccaggctgatctcaaacttctagccataagtgatcctaccgcatcaacttcccaaagcactgggattatgggtatgagctactgagccctgccaaatttctttatattaaaccaaaacgtacatttactgatatttggaaagaaagctcttttacttttatgccttcatccagtcttcatagatatcttcccttttacattataactgtaaatactgaggttagagaggttaactagttagttcaacagaataatataaatattgaataatataattaatgaataattagtgctgaacctgtcgcctcagccaggtctcctgattccaaatacagtttgccccagctccccacagtcttctagcttctctgccagtggagcaaattttccctaggtttacaggcctaagcacagattcttagttacttagtgcaagtattgccagagcccaaggggtgaattccaaagggtttttacaaggctatacataaaagataaagccctggcttgtatatcacttgcacataggagataaagccccagcagttgtatgtaaatttcaaaagcagagaagtatggcacaaagaaactcctgatagtaacactgtgttcccactttgcttaggggcatattggcaccgtagcatggtacacccttactgctacctgccatgaggccagataatagctagcagcccctggtctcattctactctggatgggtactgctgtttcctgaatgaaagacactgagattgatttcatgctaatgactgttggttaagagttcatgctttctattcacaatagcaaagacttggaaccaacccaaatgtccgtcaatgatagactggattaagaaaacgtggcacatatacaccatggaatactatgcagccataaaaaaggatgagttcatgtcctttgtagggacatggatgaagctggaaaccgtcattcttagcaaactattggaaggacagaaaaccaaacaccacatgttctcacttataggtgggaattgaacaatgagaacacttggatacaggaaggggaacatcacacaccggggcctcttgtggggtagggggaggggggagggatagcattaggagatatacctaatgtaaatgacgagttaatgggtgcagcagaccaacatggcacatgtatacatatgtaacaaacctgcacgttgtgcacatgtaccctagaacttaaagtataaaaaaaaaaaaaagttcatgctttgtggacaggtagcctgagttcattcatagctctactatttacctgaaaccttggactaattatttcacttttctgtgccccagtgttgtaatctgtaggatggggtactgcctgctccacagtgggactatgagaatgcttaaaataatgccaagcgcacagtcagctcaataaatgtcatctatgtagacaatgaaattcaagcataattccttaaacctttgtgccatacatccctttggcagtctggtaaagccttcattccttctcagcatcatgtttttaaatgagtaaaataaaatatataggattacacaggaaaccaattaaatactgctaccaagctatttaaaaatctatgatataatatgctttttaaattaaacccttaaatggatctagaggtaggtaaatgtctaacagcagatattttgaagttgcaatgaatgtaaatggcactttgagctatctacaactgaaatgcgatagaaaagtatctataatttctattagtgacagtcacaaatactactaatagtattgtggtttgttgcttatactcatcatcaaaggaaatactcaatttgagttaaaggtttaaataaagatgtatttttcccccatccaagttcatggatccctgaattctacccatggattccttggtcactggactccataggggtcacttggggaatgattgtgacaccaatgaaggaagccagcggatactgtttgctgtattatacctaccataggctcgtgatgaggaaataataaaataaataactgtaatgaaaaagaaaagaaaggaaaacaaaaggaacctaaaacagagaaggcaaatagctttccttttgagtgtcaattttaacagactccctgtggttgcgaaacaatgtgtctgaggctggctctgggttagagggagagtgctgttattgattagcaattcctgcatgacagcagagtggcaacagccatgcatctctgacctggcacagtcataagcatgttatagacataaagtgttagggaacaaataggctctagcaaaagtaaagagtgttcctcctctcatatcatcacttatatgtgtttataccatttatgttgtattttttacatgaatacttttagatttattaatctaatccaaaaaggtttgtatagctttctctatattaagagaaatatatgtatttcttaaatacacaaagttcttaaatctgatgccagcgaggattgcttccagccacaagtaacatatatcagattaatagtagttcattcaaagagggatttattttcctcacatgaaaaacagctctgtgggtgacccaatatagagcttgttcattgagccagtgattatatcaaggaactgggttcttcatatattttcattctttgatctccccctattgactttatagctgtatctttctcaaggatgcagaatggctgccgcagtctcaaacactgcgtgtgtgttcaaatcatgaagaaaggagattgagtgatgccagctagctctcttctcgtgactctcctttgtatctagaacacagtgtctttccccaaaacctgggtcatatgactacacctcaatacagcggagtctgggaaagcaaatatttgctttgcccaccactacaatagaaacgacaagggagaaagaaagggggttgggcatggcgttaattttgtcagccgctagggtctgccacccagaaaacagaagtccactaacaagcagggaactgattgttctgccagggaaaaagtctggcagtttcctactgaagaaatttggaagtcttgatggtccaggaaggataaaggcaaaaccttcattttcttttatcaaaaaggaaagccaagaaaaaaattagttaagtagaagttatgcacaaccctcatgtaactcttccatgttaatagcaggtaggctgcatatgaaaacatgatattatacaagaaaactagttgatgaagattgccctatttagcaccaattacttacgcaaacctaagttgactctgaaacaggaaccccatattaaacttttcaaacacatcagaatatgttactttgaacagattttatttaatccaaagagattatctttgaaaaaggtagatggtaaacatcgttatccctatttttgtatagtcaaataggcatagtagtaagttgtgtaaaattgacatccaaaccaatgcatgatactaaaacttggtgtacaaacagcagttacatcctattgctttgtatctacatctgtttctggagtcatataacatttgtagaatcttggaggtgttttaggctcatccttattttatccataaagaagactgacacctatagagattaactgacctgccaagggtcatggcagtttcactgctgagacaagaacacagatccctttacttctttctgagaaaagtacaaagtagtttaaagcaaaagcttccctgcttccagcacttctggctaagttgcgccgtgggaaaattgttttgtctgattcagttttctcatcttttaaactggaataatgctacctaatttacagggttgtttgaagaattaaatgaatgcatggaggtaaatcacttagaacagcggtaaattatacttttttattatttatttcctttgaccacccacaattatcatcagtgtcatcctcatcatcacaattaagattactaccacattaggctacataaactttttttttctctctctgttttataatttcaattttattttagattcaaggggtacatgtgcaggttttacatgggtatattgtctgatgctgaggtttggggaacaactgatgccatcacccaggtagtgagtatagtaccctatagtttttcagcccttgtctactcccttcccttccccttctagtagtccccagtgtctaccatcgtcatctttatgtccatgtgcaccattgtttagctcccagttaaagtgagaacatgcagtatttggttttctagcttatttttcctctcttaaatcacttctgtgacacgtaggccatgagatttattgtattttttaatgccttatttaaaaatttgtattatttaatacatttaatgcattattttttattatatttaaatattgatttatttgtactttttgccttattgctatattgtttcaaaaaatttaacattatttgagttacatgatttcaaatacatactgattaacattttaattagaaactttatgtctgatatgaattgccaaaatgtgtagttggtacaacctatgagtcattctgggttatctagaagaaactggtagcctgccccatactccagaagccttccccagtgtctagacctcagaagctgtcaggaatatgcacaggagaaggacacatggcaaatagctatttcgtctcttaaatgtatggtatgtgggaaccactgaaaaatgtaaagtttctacaaggtgctatttttattatttatggctctagagaacagagaaggtgaaaaatgtgagagagaagggaaagccaatagtatgtggccttcaaaacaaaagatcccacagatattgtcccaaactgcttcctggccctctagagtggagagggagggggaagacatcctattagagttcaacattctcttattatttccttcttttaattttctgggtatacaacagcaaatagttttgctgaagtagttacagaactagttggtgttctccaaccttcctattccaatacatactgtcatggatgggtacactaaaatctcagaattcactgctatatcactcatccatgtaaccaaaaaccacatgtacccccaaaagctattgaaataagataaatacattcttatttaaaaaaatactgtcatagggatgctaccttcttttcttttttgttagtaactatttgtgggatgtctttggtgtgtcaggctctgagcaatgccattttctcttggcttctttgcagtctctgtgtgaggcttacagtcatttttcacgtttgactcttcagaaggaagacagggctactggttctacatctggaactcttttcccacaacaccaacactgagaaatgtgacatggtgctgtgtttacatttgcataggaacttgcattataagttttatttgttgagttattggctttttttttttaataacccacatcagtatatagaactttgcaataggcatttttgttttaacttcatttctggtgcagttttattttcctacccttgtctttctattttctctttcatctgctttagacttaaactgtgttttatgtattgctgtaagcctctttaaaccctttctaaaacaaagcagggaatacataaacaaatagttttttgttttttgtttttttttctttgtaacagaaatcgacttaaagcctccagagaagtagaatctgtagaccttccacactgccacctgattaaaggaattggtatgtatatgaaaatgcttgttgggcacattgcattttttggccattaacattaaaacactcattaatggcattttagcatgaaattactgcttttcagtggataaatcacattagatcaacaaaaacctctttggtcaacctcttgatctgatgaaccctgtatttattcttctttcctaccctcactgtaaattattcttttttgtgtgtaattctatgtttagcatttgatttcttgcttgttttgtgacttctctgaactatttttgttgcgtctgtattgtttgtcaggtatggccgctgcagtctgtgttctgtgagccttgtggtcagctagtgaaggaagctttatgtaggcagtgacagcatttaccctgctcactactctataactaggatctgatcttatggctaacacgtaactgaccaatatggtttggttgtgtccccacccgaatctcatcttgaattgtagttcccataatccccacgtgttgtgggagggacccagtgagaggtcattgaatcatgaggtggttaccctgtgctgctgttctcgtgatagtgagtgagttctcatgagatctgatggttttataagggcttttcccccttttgctcggcacttctccttgctgccgccatgtgaagaagggtgtgttttcttccccttccaccaagattgtaagtttcctgaagcctccccaaccacacggaacagtgagtcaattaaacctctttcctttataaattacccggtctcaggtatgtctttattagcagcctgagaacggactgatgtaccggcacttcacaatatgtattgtaaaaacttgtttttattttatcttctaagctatgactgcagagggggagtctccctcttcccttgactttatgtaggatgtattgtggagtctgagtctttgagtaggggttcctaagagcaagccccaattttgctatagataaggagggatctgtccagattcttctccagcactgagggtctctctggtgtgtttgcagtttttctccaaggtagagtctgtgtcttgctgtcttttaccctttatcatctactaagtacatgtccctagtacataatagactagtagttagattatcaatgaacaataaatattggctttccttttttttaaattttaattttttttttttttttttttgagaggtggcctcactttgtcacccaggccagaatgcagtagcgcaatcttggctcactgcagccctgatatcctgggctcaagcgatcctcccgcctcgtcctcccaggtagctgagactacaggcacatgcccccactcatggctagttttttatttttgtagagacagggtcttgttatgttgtccaggctggtcttgaactcctggcctcaagcaatcctcccagcttggtctcccaaagtgctgggattgcaggcatgaggcactgagcccagccaatattggctttccttagatatggttcatggtatgattagaaacaaaaagaattagcagtcaaaacacctagtttctagttctattctgccacaatgtaaccttaggcaaagttggtttttgtatttgtcacctataatgatgagtttgtgattagactaatggtttttagactttaaaaagcctgggaccatttatttataatcttactctgagagccacagtgtggaaataactagactgtcattgagtcacttctagtcctttacaacaacatccttctctagaggtaggagagacaatttaatattttgttttactctttagaaattaaaactcgggttacatggaaatgttctcttctctgaataggtaacattgttaaacaagttttgagtgtccttccatctttttctttttatgaatactcctgtacataatttttaaaaacataagtgaggtcaaattatgcataatatttcaaaactagctttttgtacttaatactaggttttggaaacttatgtttgtacataatgttaccttttcttcacaactgcacagtattttttgtgcaaagttcatataaacagtgtatgtgcaaacaatatagaaagatataaaatggaaagtaaataaaaataaaaatctctcatcaaactcttcatcacccccaacagaaataaccccaaagataaagctcccttttttatctttcctgatagtttcagtgcatttgcaaacaaatatattgactctttttttcacaaatagaattttagtgtaaatatttcacaaccttcttcattcctaaaacagtgtgagcagctttccacatcagcatatatagttactttgttctttttaatattttcacattccatgatttatttaaccattccccttttaatgtacatttgggttgttacagttttttgcaactatgaacaaatcagtgaacatcattgctgttgagtttgtgtgtctgtagaatatgtccttaacaatgggattgttgttcccttagaatatgtgtttagagttttgacagtcattgctaagttgctctcaatttggcaacagtaataaactcagtacctcatagttgtaaccacattcactccagacagagttctcagcactcttttagtaaaaataaaccatcagttgacagtgccaccttcagagtttctctacaaataccttgcttgcctccctttctttttttcttcttttaaatcagcttcctcaggttgatctgcctctcattccttaggcatctgtttcctatgtgttctttctcctttttttcattgatacttttgtatttccccagttctacctcccctcccctagactggttggctgtcctggaatttcccttccttctttcaattgcccaaacactaagtgggaggaggcaaactcatatcaaatagcagattgactacatctgtgctggatcatgcagacagttcaagagtcccaagtaacttagcagcttcatcttgccttccagctgcaatcaagaagagccctctcagaactggtcactcagcaaaagccagatggcattagtaaaagatgttgggcaagggtgggagtttgggccagtgatctcttaggttacttttgctgctgagttaataattgtcacattattaaacagcccttggccctgggaagcccaccttctgtgaatacaagtctcagagtagacaatagggcacaaccagccatgttacatgacagactgccaagtgcattcctcttacaactcactgggatggagcgctcctcagagaaaaacaagcccagcaacatttgtattctgaacaggcatctgtctatgtttgtgacctttatgttgtgatgtgtgtgagctgctgtctggaattggaaagaatgaggaaatatgtcacctatggcccctcttgtgaagtgttaaatgcctctgaggcacttcaaaaggcaacagagcggagaggatgagtgattagaagcacatttgggatacatttttagatctaattagaattgtccttttttttttcttttttgcttttgccctgtggttagcacacaccatatgaacgtttgtcgaatgctatgttagtgatgcataatggttaataataacttttggttatatatctttaacaacagttgcttattcacaggtctttgataagaagaaataacaatgtgctggacacacatttctatacaggcaaaagtgactttttatgatagagagggctgtttcttattttctgttttgaaaacagtagtagctatgcacttgaggccaactaatccctctaagaggtgaaccttccttcccccttgcccttgattcccatcaacacacacatacatatgcacacactaccgtgcttcagtcaccatcactggaagtgaactatgtgcaacttttgggtgctttatatatatcatatcatattgtgtctgctttaataaatcatagttattgactacatatcatacaggatgtgtgccttctgtgggtcagaaaataagttcactatttagtccttttcaaaaattccttcccgatctatcttatagacagaaactaagcttttatacacccaagatttggcagattaacatctgcatattaaaatgtcaagagctagttaactttatttgaggcttaaaagttaaaaaatctgattttctaaatgtctggccttcaaaatttgagtggactgtctttctcaagataactaacaattttatgcacttggcagtcaagacctttacaataactgctgcttgggagattgaggggaaaaaagcattaaagtttgtggcccttataatcaagtactttacagtctactgatgggagaaaaggaaaacaaaacaaaacaaaaaaccactgtgagatatagatatgtcttttctttctctagcagataagtacctgaggctcaaggaggttaagcaacttttgcaaattcactttccaatatagtgtcttttcccagggtgactaatgtatatacttgatgagtgaaccagaaaagtaggaaataatatgttacatatgggatgctctattgggtatagtaaaggatgcgttgctgttataaaattatagtcacttagaaaagagatgtttatttttatttttctctcatcagtcttaaggtaagtgaatggcctagggtagttaggtgactgtgttccatatggtcattcaggggcaaatgctgatgaagcaacacagctgtcttcatctaagactagaactctgcttgttgccatttcccagcaggaaggggttgaaagaaaatttatgtagatttttttttctacccagtagttgcatatatattgtattctcacatcctattgacccaaacttagacatatggccacatctgtcagccagaaagggtgggcaatgttatctatagctgtgttgctacgtgcctattgctaaaaaggctaaaaaggaagaaggggaacatggatgctggtgaacacttggccacctctgacacagataattgctaaagtaataagaagagatggaaattaaatgtgctaagctaggagactttctaaagaaagggtttgtcatgctacgctgtgccattcatgtgtttttttgctcatgctgttccttgtgcctggaaattctccccctaattcccctgagcagtggatgcagtggataccctccccagatcccccccaacttccctgagtgttggctaccaaaagctctgagtgcacccagggagctaagtcctcctgcccacaggcaataatggactgacacggggtagacttaaagaaataagaggcacatcaatcaattgaaatgtgtgggaccttacctggactctgaattaaacaaactgtaattttttaaagctacaccttttaaacatgattggctatttgaacactaactagatatttgatgatattgaggaattattgtgaatttttagtgtagtaatgatattgtggtttgtataaatatatttagggataatatgatgcctcagatttgctttaaaataacacaggatgaggataagtggtaggactgcaagggaaacaagactggccatgagctgataactgttgaaggtgggtactgggtatataagggctcaccacaccattctcttgatttgtgtctatttcccataataaaaagtttaaagagagagaaccgatgaaggggagggagagagtcaagcacacaataagagtgacaaacagtgccaaatcagcccacagtattaagttttcacatatttacataaatatcacctggaatgcaatattgaaattaatgtatatcactagaataaaaaaagtaaagatttaataaatttgttttgaaataaaataagttgaaatacgaaaaagacagaaaaggttttgaaagaggttttaaagaaaagtgcaggatattcattggtaaagatgttggtgagaggcttggaagcaaaacttcaggggaaaaagacaacatatggaattgaccacaattgaatttacaagtgaagtggctttacagaggaatcaggggatgtttctgagagaggaaattcattaaattctaacttgaatattttctgtttgcctttaagtcagagcaaaggctttgagtcccagcttcccagtttgtgaccttgagcaattgcttaacttttccaaagcctccaatagtcttcactctaaaataaaagataatcatatgagatattgtatgcagggtatttacaaggagcctggtacttggtgtacctaatgtatgttagttattattattaaattagaggagcaaaaatttctctagcattgactgctcctgacataatcacaccgaagaggggatacacgatgataaaaccttcctgcagtagtggctatagaaatgatgacggggagaagatctggaaaatattccaaagaaggctacagatagatacattttttccattggaattaggcaatggagttaaacagaagttacaatatggttgaaataaatgtatttttttaaaaaaagatttctctttccttaattattaaaaaatatacaattttgtagaaaattttaaacaaagtataaagaaaaaaataaaaatcattcataatcctatcaaagaagcattgttaattttttctatatatcttctttttccacgtgtatacttggaaattaaattttctaaaataattttcaggaaaaacaaattttaattaattgagcttctactaaataggactgaaaagcaaaacctggactagaattctctctcggtgtgtgtgtgtgtgtgtgtgtgtgtgtgtgtgtgtctgtgtgtacatgtgtatgtgctgtgtatacatgtgtatgtggtgtagcgttcccctgattcttaacttattaccagtggacaaccaccgtggaactagagtctagtcattcttaacctttttgggggaatcacagtctcttttttgaatctgatgaaaatcaaggaccgtttttacagaaacgttctcatctgtgcatacatgagacattttgcattgcatagaatttccgagggttcacagatactttgaagcccaaaagtgatccacagaccccagattgagaactcctccgctatgccatgcttaagcttatttctgtgtatcttctttctgaggagcaggcagatgggtcatctttacaatgtgaagttcttggcatttttattttgttttgtttttctgcactacgatggagcaagcaacactggaggcaactggctaaatgcaaactcatgaagcaagaccaaaatggctggatagatagatgctgtttggttttgacaacctagaaataaccttgaagaaatcctatggagaagtcttaaagaggaagattggattttgtagactcaaagaatgtgtcatggtttggcttaatctaagccatttttattcttcttttcttgtgtttgggtctattatctgtctgtagaatttatacagtgagactgctggggaaagtcttatgtctaattatttgctgtgctgtgtggagtgtactgcagacagtcaataaacaatcaatagtaattgtagcctgcctcagagacaggagttagaaacttcaactggcttaggtgcatggtatttttcattaattttcttctgctagtttttttctctaatttaaagcctaaatttaaagattaaatagaaaagctttctttgcttatgagcacaagtaggcactgtttttaaaagaaggaatatataatcccaggtgttttacctctgttaatgagaaagatgtctgtttgcttcagattgaatgagcaaagaagaggacaaggatatttgcatggttaaatgcctatgagcccttccttcagaaagtaatattcccctgatgtcaattacttttatacggacatctggatgtttatcatgagagtgtacagatgtcaactttttcagtattatagctggaaatgtggtgataacttgactttgatttgagtaaacataaaatatctaacatttaaagtcagaagttcacttcaggaaggggtttaaactgacatttattaaaaagaatggttccttggaaaaaacatcagaaccatccctaaagatacagtcactctgataaagtaaacagagtcccagttatgctctgtgtaacaaataacagaacttgaacatgacatttatctgttccttaaacttacagaagctggctctgaagatattgacatacttcccaatggtctggctttttttagtgtggtgagtgtcttcttccttccccaaattcagcagaggagatacaagggtatttgatgagggctgcagaacagtaagttgcttttaaaattcattttccaaaatgcattctgaagaaaagagaggtcaaacaagatcttggaaaacttcctccagcttttctaaatgtagagatgaagactctttgcccattgagatagtgttctttatttccccattgcattgcactaaaatattccaatgcaatctgtgttttgttttgttttttcttttttaattttttttattttttgagacggagtcttgttctggttgccccggctggagtgcagtggcatgatctcagcttactgcaacctccgcctcccgggttcaagcaattcttttgcctcagcctcccgagtagctgggattacaggcgcccgccaccatgcccggctaatttttgtatttttagtagagatggggtttcgccgtgttggccaggctggtctcaaacacctgacctcaggtgatcgcctgcctcagcctcccaaagtgctggcattacgggagtgagccaccacgcccagcgcaatctgtgttttaaatgtgcactattaagagggatatttgaggtcttactgtggatactcaatactaacattatactattttaaatacagcatctactcatctttctattactattcaacttgaagcaaatattcttgccattattatttattttcaaatattataccaaccttgcccttttgctttctttcttttttcccctgaatagccaatcataagtggaaagtcattgagtttatttacacccttcattttgccttgattcttgtaagctgaaaaacaatatcctttctgggtatacaatagaaagactttaaaaacaattggcttgtgaatattgttgtgaatattgttgaaactagcttgtaacaatgtccattctaattggaaatccagataaggggacagatgaggaggttctgaccacctacctccctggcttgggcagacataggagttcttggcatcttcataggtccagtttttctggaggaagaagtaaccaactctgacacctgactgtaattattccatttcctctcaacatccattattttcaggctctgagactcaagagggatgtgaaatactgggagatacttagaagggagtcaccacactaataaaatagttgttagacttatgagaaaggtgagagaactcaggttggagtagaatgagaattagaacactcttcaggttcctgatggtttttatgtgaaagacagtgagcagctggttattaccactgaggcaataaagagatactgtgggctttagcagaaacaccagtatatgtatttagtttttaaaataaggttttaaaaggaatgttttatttaattgcctacacagaatgaataaagtgatatttatagtaggactctgggtttgtttaggagcacatgcttgcacatgtgtggcttaggaaaaaccactgggaccactagtctaaaatattcataagtaaagatgcaaacattctgaataaagtagaaggcagttgcattgatttttttatttgtttatttgtgttttttgttgttgttttgcaaggatgtgttcttggagatttttataatctagaattcacctatttcaagatttctctccagcccccatagtaataaatctgaagtaggagggatgaggtctccaaacacataaatctacagccattttagcttgggggcatgttatagttacaaagatcttatagccatatcaatagaactttttctgctttttttctgttaccctcctttgctcatttgactttttttaaaatttagaaacattcccagtttgctgctgtttttcatttacttggcattgtctctaataaaacctagagtgtactctcttctaaataaagaggtcctacattgtggaggttgttcattcttcttcctagcattttagctcatctaacccaacctattttacagttatgggttgagggtcacctcaaaactaatgtcacacttcatgaagaattggatgacatagaataaaatataaaaaatgtaaacaatgtgagtgtgcttaacaccactgaactgtacacttaaaaatggtgaaagtgatgaatgttgtatgtattttatcataattaaaaataaatttttaaaaagagaaaaaatacttaaataaataaggagtgcgaacataaccatgactagttatcaccatctgatagtgcttcctttgcatgtaaatcatgcttttgttttggggacattcataaagaatagggattaactgaagtggcactgccatgtaacaatagcataattccagtttgttctacttaccaggcttgccctccatgaaaatatacaattgtagataatcttttttaattggagagatttcctcttatgtccaattttatacataaagtaagacttttttattgtgtgcctaaatttgtgtaaatatgactgcatcgtattagtaaactgaattaggtagtgcattcacataaaatttaacatcaccaagaaggctttaccttaagaatgtaatgatgaatcaccattttagatagactgataggtaatttattaactgatttaaaagagaaaagacctatatcatctcagtgagtaccaaaaagcatttaataaaattcaatactcattcctaaagttccaagcaaactagaaagataaggaaaattcccacaaaactacagcaaacatcattcttgatggtgaagcattggctgcatttgcattaatgctcagaacaggaagaaaatacccaacaccacaaccatcagtaatctactagagttcttagtaattcagtaaaacgagaaaaagaaatgtgagatagaaaagaaaaagacaaaactgtcattagagaagcagggactggctcaattgcccaggctgatgtgcagtagtgcaatcatagctcactgcagcctgaactcctaaactcctgcgctcaagaggtccttccacctcagccttccgagcagctaggactacaagtgctcaccataacactcagctaatttttttttttttttttttttttttttttgtagagacagagtcttgctatgttgcccaggctggtctcaaactgctggcctcaagcagtcctcccacgtcagcctcccaaagtgctggaattataggcatgagccaccaggcctgacctaaagctgtagtaatttaaaaagtgttatattggcacaggaatagacatgagacattaaaataacaaaacagagagtccctaaatagaccaatatgtaaatgtcagagatctagcacatgataaaggtgatattttgaatcagtgggagaaggatggactgtatgccaggcactgttccaggcactgggatctagcagtgaacaaatttccacagtcagtatgtagatgtcacttttctccaccctcagctctccctggaatcacctagtccaccaaccttctgattactctctgaagagaataaatccctgatcttcttttcagttattttcaggctttcagtattccacctccccgttattattttttctgttatcttttctctgttttttgagtttttgtggctttatgccactactttaaccacaatctctatttatccttcatgtacagttcccatgttagtccataaaaatacttaagcttttgtatttaacatttttcaccgttttggaaagggtctaaaattcccaggactccacagctttgcaccagataagcctggaggaatactaatgatggatctaaaagaagaaaaaccaagggcacgggaattaagaatcagtcgtgggtttgatttggcctcattcaatccacatggcatcagcactttcatagacaacggtaagagccaatgggctaccaacatttagtaacgtgtgatggttcacaaatgactgtgaaaaatagatttggatcatatttctaggaagagaagaacaattaactcatgagtgatttctgtattcttcattacaaagaacttgttcatttgcctcttcagctggcagtaagttatgctacattttgaaattcctaacaggtaacacctgaaagaatgtttagatttcataatcttttcatatacctacgatcatcacatttaaaaaagaactgtatttttgaattaaagtagaaacagattatgcatgaattctgtatatggagtaggaaacactttcttaaaggtcagggagccaatgatcagaaataacaccagacggacagcaataggaaagacagagaatgatctgttaggtcgtctaacagcttatacattcaacctttccttgcctgtggtatttaaatgtcagtgcctgcccagaggtcccgtagttatgtcttgtaaattaactctgttctttcaattctttagatgacacagtttatctctttgttgtaaaccacccagaattcaagaatacagtggaaatttttaaatttgaagaagcagaaaattctctgttgcatctgaaaacagtcaaacatgagcttcttccaaggtacttcctcattttgttccttctctaatttatccccagcatttgcaaacaatccctatggtgggttgtcctgtcatcttttataagcgctaatgtatatattagctaatatgtaagagctaaagagcttatatttccttatttataaatgtgtgtgtatagtttccttataaaccagggcaagcatggcatatgaaagttgatgtcactcatactattcactgttctatgcggactcctttgagaaatgatgaagtgcccgactacagggtgatactcttcaggcccatcttgagggtagaaggcaaaccctaacattttttcctgctgtcaccctccatcttagatgactcatcacccagatgagtgtcttgccaaggaagaatggcctgttttttattgggtttgtatgctttgcatgggactttataccaatcgctttcatagggttagtgatggttgcatgctagtaatcccacagaattagagccactcaagttgagagtgagtcattacacttcaagaacataaagctggttgaaaatgtggctaagagagaatcatgtgtacccccacccccagttcagtgtgtattagcctactgcttcttttagtttaaacttgatgaatatttttaatttctaatgaaatttcatttctaatgaaattaaaaatattgcctatctagggcctatctatgcctatctagggcataagcatgtaacttccaatcattccttccaaaaatgcacttgataaaaaaaaataggagcataaataccatccaagcattatggtgctctttcagaaaaatgagacctaccttccctgtagctctatatttttcatttagcaaagaataaagcagctctttcagaaatttttgcatagagtaattggaatttaaatttaataacaccctcacctaactggtcttaaaatgaaattgtttttagcatataaatctctcacctgaagcattgtactatggcaattttatcatccatctctctgcaagtgtttattgagtgcctgttcattctcggcatgtcagctttgtgaagcaggtagaaattgaacagtcaaccttagtttgactaataactaagccagggaaattagaaaaatccaggaactgagtaaatggaagctaggtaaatgttactgactgcctaaccagctcaccagccaatcaggctctctccagctctgtactgtggacagctctgtccttacgtataattgttaaaccctacatttcttgctgtcaaaaaacatgccctgatggcactaagttctttcttctcttatggtaatcctgccataattgctaaatgacctgtgttcagattacctggtaccatacaaaattgttctctggcaacaatattatagtatattgtatatgactatagtcgtgatttttagctcgtcttttcctcttaccaaaaatttaaagcacatgttgcataaatcttatgagtacttaatatttaatatggagaccaacaggccttttgtttcctctcacatgctatttttctttttcagtgtgaatgacatcacagctgttggaccggcacatttctatgccacaaatgaccactacttctctgatcctttcttaaagtatttagaaacatacttgaacttaca

SEQ ID NO: 13494 - DNA, 645 bp, Homo sapiens
agctgctggccaggccggagcgaggcagcgcgcccggctcccgcgccatggggcggctggtggctgtgggcttgctggggatcgcgctggcgctcctgggcgagaggcttctggcactcagaagctggctctgaagatattgacatacttcccaatggtctggctttttttagtgtggtgagtgtcttcttccttccccaaattcagcagaggagatacaagggtatttgatgagggctgcagaacaggtctaaaattcccaggactccacagctttgcaccagataagcctggaggaatactaatgatggatctaaaagaagaaaaaccaagggcacgggaattaagaatcagtcgtgggtttgatttggcctcattcaatccacatggcatcagcactttcatagacaacgatgacacagtttatctctttgttgtaaaccacccagaattcaagaatacagtggaaatttttaaatttgaagaagcagaaaattctctgttgcatctgaaaacagtcaaacatgagcttcttccaagtgtgaatgacatcacagctgttggaccggcacatttctatgccacaaatgaccactacttctctgatcctttcttaaagtatttagaaacatacttgaacttaca

SEQ ID NO: 13495 - DNA, 16855 bp, Homo sapiens
ccatcgagccgggaagatggcaccgcccacggagctgctggccaggccggagcgaggcagcgcgcccggctcccgcgccatggggcggctggtggctgtgggcttgctggggatcgcgctggcgctcctgggcgagaggcttctggcactcaggtaggtgggactcccgcgcgcccctcctcggcggtccccaggctcggggtggccgcgtggtgcggggagggcgcaggctgggggagggattcctgcgggacctggccctgcggccgggggtggagaatttttgaatgctgtccctcccccagctagttgaacccccatcaccccgactctccgcttctagtgaaaaaactagcaaagtttggagtgaatcgcgacactttcttgaaagtttataagcccttgctgctaacaaagttctcttctgcttaggctgacaagagaatgctttgcaattacccaagggccaaactagtggtttaaattgaaaacaaaatgactactcatgcattgaaaccttaactatgaagatttatttcaggtcattggtgctgtttctccttgttgcccaaaccagacccgtctttaataaagttgttctccacccatttctgcatagtttgagaaactcttcagctgtagatcaaagacacttgaaatattcagctactgttcttacttcctatttattcaccagggaagcctgaagccagaatgccagacagcgcagacactattccatctcgcattttagttttaatgaaaatctctggtaggtagacatcatcgtttataaattaccaactcaacgtttgttttttgtttattttattttttgtagagatggggtcttgctgtattgcccaggctgttccctaactcttgcactcaagcaatcctccagcctaggcctccccacagtgctgggattacaggtgtgagctgttctgccctgcctcaaccaaaattttataggcctcatgcaaaagagttccagaaagactgagcacctgctatgtgtaatgttctctcttaggcttctatagtagagtacgacccttatggagtttgatacaggggaagagagaattaaaatacagtaaatgtataaattaggatgttctaaggacagacacaaatgaaccgcataggcttaaagaggaaagattccatcccctgagggtggagttctagagggaggaagagacattcgacctgaccttgaagggtgggtgcaacacatatgagcatgaaggggcccatgccaaatgtatagtgcagcaggagcaaaggggctaaggtgggaagttggaagactagcaaatgggccaatttgaagggagcataaagtcaggagatgagaatagtagggtggtgggaaggataggttttgaggccattaaatataagttgaaaaatggggccccactttcataggcccaatagtgcttcaaaagggaaatattggtgggttttgcttttcaacaagaacttaatataactagttgtgttttatagagataagcctggaaggggggattggaggagagcaatggttctctgtacattagaatctcctggagggctggtgtctgagtggcaccaccaaagattctgattcagctgttctggatcagaatctacagctcacacctgtaatcccagcactgttggaggcctaagccagaagattgcttgagcccaggagttagtgacaggcctgggcaacatagcaagatcccacctctacaaaatgaataaataaataaataaataaataaaaaacaaaatttgagttggtaatttataaactatggtgtctacctaccagagatttttcgttataattaaaatgtgatatggaataatgtattgtttggcaagctggcttcagggttcccaggtaaatagataaataaggaagtgcataatgtaagaacagtggctgacagtagcagtggcattttttatttttaaaaacattcctgataattctaatgagcagtcaaggtcgagaactactagaatagagagcagacatggggtaactggttaaggtattgcagtaggtcagagaggataacagggacccaaactctggaaccccagggatgagggagaagtcaaaggtgctaccagagtttgtgccacagctccactgtcccatggttgtagtttcatctactgataaagcagtgcaaagaggaagcgtgtggtggctgagatgggagtgagatttgaggaaagaacgcttatgggtaggaaatggacatgttgaccttaattttcatgttaggtaatgcccattgtgctctacagaacattcatgagttggatgactttgtatatgatctgtcctgctctccatttcaaaggcaagaccaccaaaattcacaagcttattatgttgtcactaatgtgtaagccaccagtttttctgcaagttggaagttttctcaacagtcaaatattcccccttctcactaatcttaaggttttaaagttatagctgcaaatctaaaaaaaaaagaaaaagtaaataaaacttattgacagaatgcctgatagtttatttacaggtttttgtttgtttgttttttgtttttctttgttttttattttgacacaaggtcttgctctgccgcccaagccagagtacagtggtacatcaaagctcactgcaatctcaaacacctaggcacaagcagtcctccctcctcagcctcctgagtagctgggactacagatgcatgctaccatgcccagctagtatttttatttcttgcagagacagggtctcactttgttgcccaggctaatctcaaactcccagcctcaagtgatgctcctgcctcagcctcccaaagtggtaggattatacacatgagccaccaccctcggcctactttacaatttgatgcaccttttctttacgtgactgtgatgcactttaatgggcagtgactttataaaatggtaactttattggatatgtggagccccaaatgggctgacgtgagaatgttggggtaggtggtgggtggctggatttagcaaagaaaaatgtaggctacccagttaactttgaatttcacatggatttttttttttttttttagtataagcatgaaatacttataccatacttttagcattaagcgtggaatttgggacataattatactaaaatatcattcattgtttatctcaaattaaaatatcactgggtaccctgtattttatcatatgttcgagtgccttctgtcagaatttggtgaccctttgagtctgttttaaaaaggagcatgtttggccggacacagtggctcacgtctgtaatcccagcactttgggaggctgaggcgggcagatcactagaggtcaggggttcaagaccagcctggccaacatggtgaaaccccgtctctaataaaaatacaaaaattagccaggtgtggtggtgcatccctgtaatcccagctacttgggaggctgagtcaggagaattgcttgaaccccagaggtagaggttgcagtgagccaagattgagccactggactccagcctggacaacagagaaagactccctcaaaaaaaaaagaaaaaaagcatgttcccacctccccataaggaaaggctcttcagaggaagttgaaggaacagaggctttatgtttgatttttgctttaatctgatgcctactgtttgattattcaatatttagagatggtactttggcaatcaagttatttctctccccaggttgcccacttcaatttttagtataaggatgtcccagagggataaatgccatcaaagttgtctttcttcttctgaactgtaactgggattccacaccctccttttccacccctccctagttgagcaataaaggggaaaataacagtatacaaatattcccaggccagttcctggtgtcaaggtacacagccatggatgaatcatgaggcttgagtgcatcagagacctaagcgtgggcaggaacccccagagtacccatgtgaatgttctgcttgctgcctcgcaccttttatgacaattcccacaagaagctatgtggtctgtttctacttctgaaagagcagcctttttcccttttttttttttttaaaccaccatcctttaaatcatttattatgtaactcttgtgtgctggtcagtcagtgtgtcaaaagtgtaaaaacttctttatttatttttttaatctatcttttaaaaaatattttctttctttttttcttttttcttcaaggcaggttcttgctctgtcacccaggctggagtgcagcagcacaatcatagctcattgtaacccagaacacctgggctcaagcaatcctcccacctcagcctcctaagcagtgaggactataggcatgcaccactacacctggctaattaaaaaaacatggccgggcacggtggctcattactataatcccagcactttgggaggctgaggcgggtggatacctgaggtcgggagttcaagaccagcctgaccaacatggtgaaaccccatctctactaaaaatacaaaattagccaggcacggtggcacatgcctgtaatcccagctactcaggaggctgaggcaggagaatcacttgaacccgggaggcggaggttgcagtgagccattgcactccagcctggcaacagagcgagactctgtctcaaaaaaaaaaaaacaaaaaaatttttttgtagagatgggggtcttgctgtgttgcccaggctgatctcaaacttctagccataagtgatcctaccgcatcaacttcccaaagcactgggattatgggtatgagctactgagccctgccaaatttctttatattaaaccaaaacgtacatttactgatatttggaaagaaagctcttttacttttatgccttcatccagtcttcatagatatcttcccttttacattataactgtaaatactgaggttagagaggttaactagttagttcaacagaataatataaatattgaataatataattaatgaataattagtgctgaacctgtcgcctcagccaggtctcctgattccaaatacagtttgccccagctccccacagtcttctagcttctctgccagtggagcaaattttccctaggtttacaggcctaagcacagattcttagttacttagtgcaagtattgccagagcccaaggggtgaattccaaagggtttttacaaggctatacataaaagataaagccctggcttgtatatcacttgcacataggagataaagccccagcagttgtatgtaaatttcaaaagcagagaagtatggcacaaagaaactcctgatagtaacactgtgttcccactttgcttaggggcatattggcaccgtagcatggtacacccttactgctacctgccatgaggccagataatagctagcagcccctggtctcattctactctggatgggtactgctgtttcctgaatgaaagacactgagattgatttcatgctaatgactgttggttaagagttcatgctttctattcacaatagcaaagacttggaaccaacccaaatgtccgtcaatgatagactggattaagaaaacgtggcacatatacaccatggaatactatgcagccataaaaaaggatgagttcatgtcctttgtagggacatggatgaagctggaaaccgtcattcttagcaaactattggaaggacagaaaaccaaacaccacatgttctcacttataggtgggaattgaacaatgagaacacttggatacaggaaggggaacatcacacaccggggcctcttgtggggtagggggaggggggagggatagcattaggagatatacctaatgtaaatgacgagttaatgggtgcagcagaccaacatggcacatgtatacatatgtaacaaacctgcacgttgtgcacatgtaccctagaacttaaagtataaaaaaaaaaaaaagttcatgctttgtggacaggtagcctgagttcattcatagctctactatttacctgaaaccttggactaattatttcacttttctgtgccccagtgttgtaatctgtaggatggggtactgcctgctccacagtgggactatgagaatgcttaaaataatgccaagcgcacagtcagctcaataaatgtcatctatgtagacaatgaaattcaagcataattccttaaacctttgtgccatacatccctttggcagtctggtaaagccttcattccttctcagcatcatgtttttaaatgagtaaaataaaatatataggattacacaggaaaccaattaaatactgctaccaagctatttaaaaatctatgatataatatgctttttaaattaaacccttaaatggatctagaggtaggtaaatgtctaacagcagatattttgaagttgcaatgaatgtaaatggcactttgagctatctacaactgaaatgcgatagaaaagtatctataatttctattagtgacagtcacaaatactactaatagtattgtggtttgttgcttatactcatcatcaaaggaaatactcaatttgagttaaaggtttaaataaagatgtatttttcccccatccaagttcatggatccctgaattctacccatggattccttggtcactggactccataggggtcacttggggaatgattgtgacaccaatgaaggaagccagcggatactgtttgctgtattatacctaccataggctcgtgatgaggaaataataaaataaataactgtaatgaaaaagaaaagaaaggaaaacaaaaggaacctaaaacagagaaggcaaatagctttccttttgagtgtcaattttaacagactccctgtggttgcgaaacaatgtgtctgaggctggctctgggttagagggagagtgctgttattgattagcaattcctgcatgacagcagagtggcaacagccatgcatctctgacctggcacagtcataagcatgttatagacataaagtgttagggaacaaataggctctagcaaaagtaaagagtgttcctcctctcatatcatcacttatatgtgtttataccatttatgttgtattttttacatgaatacttttagatttattaatctaatccaaaaaggtttgtatagctttctctatattaagagaaatatatgtatttcttaaatacacaaagttcttaaatctgatgccagcgaggattgcttccagccacaagtaacatatatcagattaatagtagttcattcaaagagggatttattttcctcacatgaaaaacagctctgtgggtgacccaatatagagcttgttcattgagccagtgattatatcaaggaactgggttcttcatatattttcattctttgatctccccctattgactttatagctgtatctttctcaaggatgcagaatggctgccgcagtctcaaacactgcgtgtgtgttcaaatcatgaagaaaggagattgagtgatgccagctagctctcttctcgtgactctcctttgtatctagaacacagtgtctttccccaaaacctgggtcatatgactacacctcaatacagcggagtctgggaaagcaaatatttgctttgcccaccactacaatagaaacgacaagggagaaagaaagggggttgggcatggcgttaattttgtcagccgctagggtctgccacccagaaaacagaagtccactaacaagcagggaactgattgttctgccagggaaaaagtctggcagtttcctactgaagaaatttggaagtcttgatggtccaggaaggataaaggcaaaaccttcattttcttttatcaaaaaggaaagccaagaaaaaaattagttaagtagaagttatgcacaaccctcatgtaactcttccatgttaatagcaggtaggctgcatatgaaaacatgatattatacaagaaaactagttgatgaagattgccctatttagcaccaattacttacgcaaacctaagttgactctgaaacaggaaccccatattaaacttttcaaacacatcagaatatgttactttgaacagattttatttaatccaaagagattatctttgaaaaaggtagatggtaaacatcgttatccctatttttgtatagtcaaataggcatagtagtaagttgtgtaaaattgacatccaaaccaatgcatgatactaaaacttggtgtacaaacagcagttacatcctattgctttgtatctacatctgtttctggagtcatataacatttgtagaatcttggaggtgttttaggctcatccttattttatccataaagaagactgacacctatagagattaactgacctgccaagggtcatggcagtttcactgctgagacaagaacacagatccctttacttctttctgagaaaagtacaaagtagtttaaagcaaaagcttccctgcttccagcacttctggctaagttgcgccgtgggaaaattgttttgtctgattcagttttctcatcttttaaactggaataatgctacctaatttacagggttgtttgaagaattaaatgaatgcatggaggtaaatcacttagaacagcggtaaattatacttttttattatttatttcctttgaccacccacaattatcatcagtgtcatcctcatcatcacaattaagattactaccacattaggctacataaactttttttttctctctctgttttataatttcaattttattttagattcaaggggtacatgtgcaggttttacatgggtatattgtctgatgctgaggtttggggaacaactgatgccatcacccaggtagtgagtatagtaccctatagtttttcagcccttgtctactcccttcccttccccttctagtagtccccagtgtctaccatcgtcatctttatgtccatgtgcaccattgtttagctcccagttaaagtgagaacatgcagtatttggttttctagcttatttttcctctcttaaatcacttctgtgacacgtaggccatgagatttattgtattttttaatgccttatttaaaaatttgtattatttaatacatttaatgcattattttttattatatttaaatattgatttatttgtactttttgccttattgctatattgtttcaaaaaatttaacattatttgagttacatgatttcaaatacatactgattaacattttaattagaaactttatgtctgatatgaattgccaaaatgtgtagttggtacaacctatgagtcattctgggttatctagaagaaactggtagcctgccccatactccagaagccttccccagtgtctagacctcagaagctgtcaggaatatgcacaggagaaggacacatggcaaatagctatttcgtctcttaaatgtatggtatgtgggaaccactgaaaaatgtaaagtttctacaaggtgctatttttattatttatggctctagagaacagagaaggtgaaaaatgtgagagagaagggaaagccaatagtatgtggccttcaaaacaaaagatcccacagatattgtcccaaactgcttcctggccctctagagtggagagggagggggaagacatcctattagagttcaacattctcttattatttccttcttttaattttctgggtatacaacagcaaatagttttgctgaagtagttacagaactagttggtgttctccaaccttcctattccaatacatactgtcatggatgggtacactaaaatctcagaattcactgctatatcactcatccatgtaaccaaaaaccacatgtacccccaaaagctattgaaataagataaatacattcttatttaaaaaaatactgtcatagggatgctaccttcttttcttttttgttagtaactatttgtgggatgtctttggtgtgtcaggctctgagcaatgccattttctcttggcttctttgcagtctctgtgtgaggcttacagtcatttttcacgtttgactcttcagaaggaagacagggctactggttctacatctggaactcttttcccacaacaccaacactgagaaatgtgacatggtgctgtgtttacatttgcataggaacttgcattataagttttatttgttgagttattggctttttttttttaataacccacatcagtatatagaactttgcaataggcatttttgttttaacttcatttctggtgcagttttattttcctacccttgtctttctattttctctttcatctgctttagacttaaactgtgttttatgtattgctgtaagcctctttaaaccctttctaaaacaaagcagggaatacataaacaaatagttttttgttttttgtttttttttctttgtaacagaaatcgacttaaagcctccagagaagtagaatctgtagaccttccacactgccacctgattaaaggaattggtatgtatatgaaaatgcttgttgggcacattgcattttttggccattaacattaaaacactcattaatggcattttagcatgaaattactgcttttcagtggataaatcacattagatcaacaaaaacctctttggtcaacctcttgatctgatgaaccctgtatttattcttctttcctaccctcactgtaaattattcttttttgtgtgtaattctatgtttagcatttgatttcttgcttgttttgtgacttctctgaactatttttgttgcgtctgtattgtttgtcaggtatggccgctgcagtctgtgttctgtgagccttgtggtcagctagtgaaggaagctttatgtaggcagtgacagcatttaccctgctcactactctataactaggatctgatcttatggctaacacgtaactgaccaatatggtttggttgtgtccccacccgaatctcatcttgaattgtagttcccataatccccacgtgttgtgggagggacccagtgagaggtcattgaatcatgaggtggttaccctgtgctgctgttctcgtgatagtgagtgagttctcatgagatctgatggttttataagggcttttcccccttttgctcggcacttctccttgctgccgccatgtgaagaagggtgtgttttcttccccttccaccaagattgtaagtttcctgaagcctccccaaccacacggaacagtgagtcaattaaacctctttcctttataaattacccggtctcaggtatgtctttattagcagcctgagaacggactgatgtaccggcacttcacaatatgtattgtaaaaacttgtttttattttatcttctaagctatgactgcagagggggagtctccctcttcccttgactttatgtaggatgtattgtggagtctgagtctttgagtaggggttcctaagagcaagccccaattttgctatagataaggagggatctgtccagattcttctccagcactgagggtctctctggtgtgtttgcagtttttctccaaggtagagtctgtgtcttgctgtcttttaccctttatcatctactaagtacatgtccctagtacataatagactagtagttagattatcaatgaacaataaatattggctttccttttttttaaattttaattttttttttttttttttttgagaggtggcctcactttgtcacccaggccagaatgcagtagcgcaatcttggctcactgcagccctgatatcctgggctcaagcgatcctcccgcctcgtcctcccaggtagctgagactacaggcacatgcccccactcatggctagttttttatttttgtagagacagggtcttgttatgttgtccaggctggtcttgaactcctggcctcaagcaatcctcccagcttggtctcccaaagtgctgggattgcaggcatgaggcactgagcccagccaatattggctttccttagatatggttcatggtatgattagaaacaaaaagaattagcagtcaaaacacctagtttctagttctattctgccacaatgtaaccttaggcaaagttggtttttgtatttgtcacctataatgatgagtttgtgattagactaatggtttttagactttaaaaagcctgggaccatttatttataatcttactctgagagccacagtgtggaaataactagactgtcattgagtcacttctagtcctttacaacaacatccttctctagaggtaggagagacaatttaatattttgttttactctttagaaattaaaactcgggttacatggaaatgttctcttctctgaataggtaacattgttaaacaagttttgagtgtccttccatctttttctttttatgaatactcctgtacataatttttaaaaacataagtgaggtcaaattatgcataatatttcaaaactagctttttgtacttaatactaggttttggaaacttatgtttgtacataatgttaccttttcttcacaactgcacagtattttttgtgcaaagttcatataaacagtgtatgtgcaaacaatatagaaagatataaaatggaaagtaaataaaaataaaaatctctcatcaaactcttcatcacccccaacagaaataaccccaaagataaagctcccttttttatctttcctgatagtttcagtgcatttgcaaacaaatatattgactctttttttcacaaatagaattttagtgtaaatatttcacaaccttcttcattcctaaaacagtgtgagcagctttccacatcagcatatatagttactttgttctttttaatattttcacattccatgatttatttaaccattccccttttaatgtacatttgggttgttacagttttttgcaactatgaacaaatcagtgaacatcattgctgttgagtttgtgtgtctgtagaatatgtccttaacaatgggattgttgttcccttagaatatgtgtttagagttttgacagtcattgctaagttgctctcaatttggcaacagtaataaactcagtacctcatagttgtaaccacattcactccagacagagttctcagcactcttttagtaaaaataaaccatcagttgacagtgccaccttcagagtttctctacaaataccttgcttgcctccctttctttttttcttcttttaaatcagcttcctcaggttgatctgcctctcattccttaggcatctgtttcctatgtgttctttctcctttttttcattgatacttttgtatttccccagttctacctcccctcccctagactggttggctgtcctggaatttcccttccttctttcaattgcccaaacactaagtgggaggaggcaaactcatatcaaatagcagattgactacatctgtgctggatcatgcagacagttcaagagtcccaagtaacttagcagcttcatcttgccttccagctgcaatcaagaagagccctctcagaactggtcactcagcaaaagccagatggcattagtaaaagatgttgggcaagggtgggagtttgggccagtgatctcttaggttacttttgctgctgagttaataattgtcacattattaaacagcccttggccctgggaagcccaccttctgtgaatacaagtctcagagtagacaatagggcacaaccagccatgttacatgacagactgccaagtgcattcctcttacaactcactgggatggagcgctcctcagagaaaaacaagcccagcaacatttgtattctgaacaggcatctgtctatgtttgtgacctttatgttgtgatgtgtgtgagctgctgtctggaattggaaagaatgaggaaatatgtcacctatggcccctcttgtgaagtgttaaatgcctctgaggcacttcaaaaggcaacagagcggagaggatgagtgattagaagcacatttgggatacatttttagatctaattagaattgtccttttttttttcttttttgcttttgccctgtggttagcacacaccatatgaacgtttgtcgaatgctatgttagtgatgcataatggttaataataacttttggttatatatctttaacaacagttgcttattcacaggtctttgataagaagaaataacaatgtgctggacacacatttctatacaggcaaaagtgactttttatgatagagagggctgtttcttattttctgttttgaaaacagtagtagctatgcacttgaggccaactaatccctctaagaggtgaaccttccttcccccttgcccttgattcccatcaacacacacatacatatgcacacactaccgtgcttcagtcaccatcactggaagtgaactatgtgcaacttttgggtgctttatatatatcatatcatattgtgtctgctttaataaatcatagttattgactacatatcatacaggatgtgtgccttctgtgggtcagaaaataagttcactatttagtccttttcaaaaattccttcccgatctatcttatagacagaaactaagcttttatacacccaagatttggcagattaacatctgcatattaaaatgtcaagagctagttaactttatttgaggcttaaaagttaaaaaatctgattttctaaatgtctggccttcaaaatttgagtggactgtctttctcaagataactaacaattttatgcacttggcagtcaagacctttacaataactgctgcttgggagattgaggggaaaaaagcattaaagtttgtggcccttataatcaagtactttacagtctactgatgggagaaaaggaaaacaaaacaaaacaaaaaaccactgtgagatatagatatgtcttttctttctctagcagataagtacctgaggctcaaggaggttaagcaacttttgcaaattcactttccaatatagtgtcttttcccagggtgactaatgtatatacttgatgagtgaaccagaaaagtaggaaataatatgttacatatgggatgctctattgggtatagtaaaggatgcgttgctgttataaaattatagtcacttagaaaagagatgtttatttttatttttctctcatcagtcttaaggtaagtgaatggcctagggtagttaggtgactgtgttccatatggtcattcaggggcaaatgctgatgaagcaacacagctgtcttcatctaagactagaactctgcttgttgccatttcccagcaggaaggggttgaaagaaaatttatgtagatttttttttctacccagtagttgcatatatattgtattctcacatcctattgacccaaacttagacatatggccacatctgtcagccagaaagggtgggcaatgttatctatagctgtgttgctacgtgcctattgctaaaaaggctaaaaaggaagaaggggaacatggatgctggtgaacacttggccacctctgacacagataattgctaaagtaataagaagagatggaaattaaatgtgctaagctaggagactttctaaagaaagggtttgtcatgctacgctgtgccattcatgtgtttttttgctcatgctgttccttgtgcctggaaattctccccctaattcccctgagcagtggatgcagtggataccctccccagatcccccccaacttccctgagtgttggctaccaaaagctctgagtgcacccagggagctaagtcctcctgcccacaggcaataatggactgacacggggtagacttaaagaaataagaggcacatcaatcaattgaaatgtgtgggaccttacctggactctgaattaaacaaactgtaattttttaaagctacaccttttaaacatgattggctatttgaacactaactagatatttgatgatattgaggaattattgtgaatttttagtgtagtaatgatattgtggtttgtataaatatatttagggataatatgatgcctcagatttgctttaaaataacacaggatgaggataagtggtaggactgcaagggaaacaagactggccatgagctgataactgttgaaggtgggtactgggtatataagggctcaccacaccattctcttgatttgtgtctatttcccataataaaaagtttaaagagagagaaccgatgaaggggagggagagagtcaagcacacaataagagtgacaaacagtgccaaatcagcccacagtattaagttttcacatatttacataaatatcacctggaatgcaatattgaaattaatgtatatcactagaataaaaaaagtaaagatttaataaatttgttttgaaataaaataagttgaaatacgaaaaagacagaaaaggttttgaaagaggttttaaagaaaagtgcaggatattcattggtaaagatgttggtgagaggcttggaagcaaaacttcaggggaaaaagacaacatatggaattgaccacaattgaatttacaagtgaagtggctttacagaggaatcaggggatgtttctgagagaggaaattcattaaattctaacttgaatattttctgtttgcctttaagtcagagcaaaggctttgagtcccagcttcccagtttgtgaccttgagcaattgcttaacttttccaaagcctccaatagtcttcactctaaaataaaagataatcatatgagatattgtatgcagggtatttacaaggagcctggtacttggtgtacctaatgtatgttagttattattattaaattagaggagcaaaaatttctctagcattgactgctcctgaca

SEQ ID NO: 13496 - DNA, 451 bp, Homo sapiens
ccatcgagccgggaagatggcaccgcccacggagctgctggccaggccggagcgaggcagcgcgcccggctcccgcgccatggggcggctggtggctgtgggcttgctggggatcgcgctggcgctcctgggcgagaggcttctggcactcagaaatcgacttaaagcctccagagaagtagaatctgtagaccttccacactgccacctgattaaaggaattgtcagagcaaaggctttgagtcccagcttcccagtttgtgaccttgagcaattgcttaacttttccaaagcctccaatagtcttcactctaaaataaaagataatcatatgagatattgtatgcagggtatttacaaggagcctggtacttggtgtacctaatgtatgttagttattattattaaattagaggagcaaaaatttctctagcattgactgctcctgaca

SEQ ID NO: 13497 - DNA, 22628 bp, Homo sapiens
atggggcggctggtggctgtgggcttgctggggatcgcgctggcgctcctgggcgagaggcttctggcactcaggtaggtgggactcccgcgcgcccctcctcggcggtccccaggctcggggtggccgcgtggtgcggggagggcgcaggctgggggagggattcctgcgggacctggccctgcggccgggggtggagaatttttgaatgctgtccctcccccagctagttgaacccccatcaccccgactctccgcttctagtgaaaaaactagcaaagtttggagtgaatcgcgacactttcttgaaagtttataagcccttgctgctaacaaagttctcttctgcttaggctgacaagagaatgctttgcaattacccaagggccaaactagtggtttaaattgaaaacaaaatgactactcatgcattgaaaccttaactatgaagatttatttcaggtcattggtgctgtttctccttgttgcccaaaccagacccgtctttaataaagttgttctccacccatttctgcatagtttgagaaactcttcagctgtagatcaaagacacttgaaatattcagctactgttcttacttcctatttattcaccagggaagcctgaagccagaatgccagacagcgcagacactattccatctcgcattttagttttaatgaaaatctctggtaggtagacatcatcgtttataaattaccaactcaacgtttgttttttgtttattttattttttgtagagatggggtcttgctgtattgcccaggctgttccctaactcttgcactcaagcaatcctccagcctaggcctccccacagtgctgggattacaggtgtgagctgttctgccctgcctcaaccaaaattttataggcctcatgcaaaagagttccagaaagactgagcacctgctatgtgtaatgttctctcttaggcttctatagtagagtacgacccttatggagtttgatacaggggaagagagaattaaaatacagtaaatgtataaattaggatgttctaaggacagacacaaatgaaccgcataggcttaaagaggaaagattccatcccctgagggtggagttctagagggaggaagagacattcgacctgaccttgaagggtgggtgcaacacatatgagcatgaaggggcccatgccaaatgtatagtgcagcaggagcaaaggggctaaggtgggaagttggaagactagcaaatgggccaatttgaagggagcataaagtcaggagatgagaatagtagggtggtgggaaggataggttttgaggccattaaatataagttgaaaaatggggccccactttcataggcccaatagtgcttcaaaagggaaatattggtgggttttgcttttcaacaagaacttaatataactagttgtgttttatagagataagcctggaaggggggattggaggagagcaatggttctctgtacattagaatctcctggagggctggtgtctgagtggcaccaccaaagattctgattcagctgttctggatcagaatctacagctcacacctgtaatcccagcactgttggaggcctaagccagaagattgcttgagcccaggagttagtgacaggcctgggcaacatagcaagatcccacctctacaaaatgaataaataaataaataaataaataaaaaacaaaatttgagttggtaatttataaactatggtgtctacctaccagagatttttcgttataattaaaatgtgatatggaataatgtattgtttggcaagctggcttcagggttcccaggtaaatagataaataaggaagtgcataatgtaagaacagtggctgacagtagcagtggcattttttatttttaaaaacattcctgataattctaatgagcagtcaaggtcgagaactactagaatagagagcagacatggggtaactggttaaggtattgcagtaggtcagagaggataacagggacccaaactctggaaccccagggatgagggagaagtcaaaggtgctaccagagtttgtgccacagctccactgtcccatggttgtagtttcatctactgataaagcagtgcaaagaggaagcgtgtggtggctgagatgggagtgagatttgaggaaagaacgcttatgggtaggaaatggacatgttgaccttaattttcatgttaggtaatgcccattgtgctctacagaacattcatgagttggatgactttgtatatgatctgtcctgctctccatttcaaaggcaagaccaccaaaattcacaagcttattatgttgtcactaatgtgtaagccaccagtttttctgcaagttggaagttttctcaacagtcaaatattcccccttctcactaatcttaaggttttaaagttatagctgcaaatctaaaaaaaaaagaaaaagtaaataaaacttattgacagaatgcctgatagtttatttacaggtttttgtttgtttgttttttgtttttctttgttttttattttgacacaaggtcttgctctgccgcccaagccagagtacagtggtacatcaaagctcactgcaatctcaaacacctaggcacaagcagtcctccctcctcagcctcctgagtagctgggactacagatgcatgctaccatgcccagctagtatttttatttcttgcagagacagggtctcactttgttgcccaggctaatctcaaactcccagcctcaagtgatgctcctgcctcagcctcccaaagtggtaggattatacacatgagccaccaccctcggcctactttacaatttgatgcaccttttctttacgtgactgtgatgcactttaatgggcagtgactttataaaatggtaactttattggatatgtggagccccaaatgggctgacgtgagaatgttggggtaggtggtgggtggctggatttagcaaagaaaaatgtaggctacccagttaactttgaatttcacatggatttttttttttttttttagtataagcatgaaatacttataccatacttttagcattaagcgtggaatttgggacataattatactaaaatatcattcattgtttatctcaaattaaaatatcactgggtaccctgtattttatcatatgttcgagtgccttctgtcagaatttggtgaccctttgagtctgttttaaaaaggagcatgtttggccggacacagtggctcacgtctgtaatcccagcactttgggaggctgaggcgggcagatcactagaggtcaggggttcaagaccagcctggccaacatggtgaaaccccgtctctaataaaaatacaaaaattagccaggtgtggtggtgcatccctgtaatcccagctacttgggaggctgagtcaggagaattgcttgaaccccagaggtagaggttgcagtgagccaagattgagccactggactccagcctggacaacagagaaagactccctcaaaaaaaaaagaaaaaaagcatgttcccacctccccataaggaaaggctcttcagaggaagttgaaggaacagaggctttatgtttgatttttgctttaatctgatgcctactgtttgattattcaatatttagagatggtactttggcaatcaagttatttctctccccaggttgcccacttcaatttttagtataaggatgtcccagagggataaatgccatcaaagttgtctttcttcttctgaactgtaactgggattccacaccctccttttccacccctccctagttgagcaataaaggggaaaataacagtatacaaatattcccaggccagttcctggtgtcaaggtacacagccatggatgaatcatgaggcttgagtgcatcagagacctaagcgtgggcaggaacccccagagtacccatgtgaatgttctgcttgctgcctcgcaccttttatgacaattcccacaagaagctatgtggtctgtttctacttctgaaagagcagcctttttcccttttttttttttttaaaccaccatcctttaaatcatttattatgtaactcttgtgtgctggtcagtcagtgtgtcaaaagtgtaaaaacttctttatttatttttttaatctatcttttaaaaaatattttctttctttttttcttttttcttcaaggcaggttcttgctctgtcacccaggctggagtgcagcagcacaatcatagctcattgtaacccagaacacctgggctcaagcaatcctcccacctcagcctcctaagcagtgaggactataggcatgcaccactacacctggctaattaaaaaaacatggccgggcacggtggctcattactataatcccagcactttgggaggctgaggcgggtggatacctgaggtcgggagttcaagaccagcctgaccaacatggtgaaaccccatctctactaaaaatacaaaattagccaggcacggtggcacatgcctgtaatcccagctactcaggaggctgaggcaggagaatcacttgaacccgggaggcggaggttgcagtgagccattgcactccagcctggcaacagagcgagactctgtctcaaaaaaaaaaaaacaaaaaaatttttttgtagagatgggggtcttgctgtgttgcccaggctgatctcaaacttctagccataagtgatcctaccgcatcaacttcccaaagcactgggattatgggtatgagctactgagccctgccaaatttctttatattaaaccaaaacgtacatttactgatatttggaaagaaagctcttttacttttatgccttcatccagtcttcatagatatcttcccttttacattataactgtaaatactgaggttagagaggttaactagttagttcaacagaataatataaatattgaataatataattaatgaataattagtgctgaacctgtcgcctcagccaggtctcctgattccaaatacagtttgccccagctccccacagtcttctagcttctctgccagtggagcaaattttccctaggtttacaggcctaagcacagattcttagttacttagtgcaagtattgccagagcccaaggggtgaattccaaagggtttttacaaggctatacataaaagataaagccctggcttgtatatcacttgcacataggagataaagccccagcagttgtatgtaaatttcaaaagcagagaagtatggcacaaagaaactcctgatagtaacactgtgttcccactttgcttaggggcatattggcaccgtagcatggtacacccttactgctacctgccatgaggccagataatagctagcagcccctggtctcattctactctggatgggtactgctgtttcctgaatgaaagacactgagattgatttcatgctaatgactgttggttaagagttcatgctttctattcacaatagcaaagacttggaaccaacccaaatgtccgtcaatgatagactggattaagaaaacgtggcacatatacaccatggaatactatgcagccataaaaaaggatgagttcatgtcctttgtagggacatggatgaagctggaaaccgtcattcttagcaaactattggaaggacagaaaaccaaacaccacatgttctcacttataggtgggaattgaacaatgagaacacttggatacaggaaggggaacatcacacaccggggcctcttgtggggtagggggaggggggagggatagcattaggagatatacctaatgtaaatgacgagttaatgggtgcagcagaccaacatggcacatgtatacatatgtaacaaacctgcacgttgtgcacatgtaccctagaacttaaagtataaaaaaaaaaaaaagttcatgctttgtggacaggtagcctgagttcattcatagctctactatttacctgaaaccttggactaattatttcacttttctgtgccccagtgttgtaatctgtaggatggggtactgcctgctccacagtgggactatgagaatgcttaaaataatgccaagcgcacagtcagctcaataaatgtcatctatgtagacaatgaaattcaagcataattccttaaacctttgtgccatacatccctttggcagtctggtaaagccttcattccttctcagcatcatgtttttaaatgagtaaaataaaatatataggattacacaggaaaccaattaaatactgctaccaagctatttaaaaatctatgatataatatgctttttaaattaaacccttaaatggatctagaggtaggtaaatgtctaacagcagatattttgaagttgcaatgaatgtaaatggcactttgagctatctacaactgaaatgcgatagaaaagtatctataatttctattagtgacagtcacaaatactactaatagtattgtggtttgttgcttatactcatcatcaaaggaaatactcaatttgagttaaaggtttaaataaagatgtatttttcccccatccaagttcatggatccctgaattctacccatggattccttggtcactggactccataggggtcacttggggaatgattgtgacaccaatgaaggaagccagcggatactgtttgctgtattatacctaccataggctcgtgatgaggaaataataaaataaataactgtaatgaaaaagaaaagaaaggaaaacaaaaggaacctaaaacagagaaggcaaatagctttccttttgagtgtcaattttaacagactccctgtggttgcgaaacaatgtgtctgaggctggctctgggttagagggagagtgctgttattgattagcaattcctgcatgacagcagagtggcaacagccatgcatctctgacctggcacagtcataagcatgttatagacataaagtgttagggaacaaataggctctagcaaaagtaaagagtgttcctcctctcatatcatcacttatatgtgtttataccatttatgttgtattttttacatgaatacttttagatttattaatctaatccaaaaaggtttgtatagctttctctatattaagagaaatatatgtatttcttaaatacacaaagttcttaaatctgatgccagcgaggattgcttccagccacaagtaacatatatcagattaatagtagttcattcaaagagggatttattttcctcacatgaaaaacagctctgtgggtgacccaatatagagcttgttcattgagccagtgattatatcaaggaactgggttcttcatatattttcattctttgatctccccctattgactttatagctgtatctttctcaaggatgcagaatggctgccgcagtctcaaacactgcgtgtgtgttcaaatcatgaagaaaggagattgagtgatgccagctagctctcttctcgtgactctcctttgtatctagaacacagtgtctttccccaaaacctgggtcatatgactacacctcaatacagcggagtctgggaaagcaaatatttgctttgcccaccactacaatagaaacgacaagggagaaagaaagggggttgggcatggcgttaattttgtcagccgctagggtctgccacccagaaaacagaagtccactaacaagcagggaactgattgttctgccagggaaaaagtctggcagtttcctactgaagaaatttggaagtcttgatggtccaggaaggataaaggcaaaaccttcattttcttttatcaaaaaggaaagccaagaaaaaaattagttaagtagaagttatgcacaaccctcatgtaactcttccatgttaatagcaggtaggctgcatatgaaaacatgatattatacaagaaaactagttgatgaagattgccctatttagcaccaattacttacgcaaacctaagttgactctgaaacaggaaccccatattaaacttttcaaacacatcagaatatgttactttgaacagattttatttaatccaaagagattatctttgaaaaaggtagatggtaaacatcgttatccctatttttgtatagtcaaataggcatagtagtaagttgtgtaaaattgacatccaaaccaatgcatgatactaaaacttggtgtacaaacagcagttacatcctattgctttgtatctacatctgtttctggagtcatataacatttgtagaatcttggaggtgttttaggctcatccttattttatccataaagaagactgacacctatagagattaactgacctgccaagggtcatggcagtttcactgctgagacaagaacacagatccctttacttctttctgagaaaagtacaaagtagtttaaagcaaaagcttccctgcttccagcacttctggctaagttgcgccgtgggaaaattgttttgtctgattcagttttctcatcttttaaactggaataatgctacctaatttacagggttgtttgaagaattaaatgaatgcatggaggtaaatcacttagaacagcggtaaattatacttttttattatttatttcctttgaccacccacaattatcatcagtgtcatcctcatcatcacaattaagattactaccacattaggctacataaactttttttttctctctctgttttataatttcaattttattttagattcaaggggtacatgtgcaggttttacatgggtatattgtctgatgctgaggtttggggaacaactgatgccatcacccaggtagtgagtatagtaccctatagtttttcagcccttgtctactcccttcccttccccttctagtagtccccagtgtctaccatcgtcatctttatgtccatgtgcaccattgtttagctcccagttaaagtgagaacatgcagtatttggttttctagcttatttttcctctcttaaatcacttctgtgacacgtaggccatgagatttattgtattttttaatgccttatttaaaaatttgtattatttaatacatttaatgcattattttttattatatttaaatattgatttatttgtactttttgccttattgctatattgtttcaaaaaatttaacattatttgagttacatgatttcaaatacatactgattaacattttaattagaaactttatgtctgatatgaattgccaaaatgtgtagttggtacaacctatgagtcattctgggttatctagaagaaactggtagcctgccccatactccagaagccttccccagtgtctagacctcagaagctgtcaggaatatgcacaggagaaggacacatggcaaatagctatttcgtctcttaaatgtatggtatgtgggaaccactgaaaaatgtaaagtttctacaaggtgctatttttattatttatggctctagagaacagagaaggtgaaaaatgtgagagagaagggaaagccaatagtatgtggccttcaaaacaaaagatcccacagatattgtcccaaactgcttcctggccctctagagtggagagggagggggaagacatcctattagagttcaacattctcttattatttccttcttttaattttctgggtatacaacagcaaatagttttgctgaagtagttacagaactagttggtgttctccaaccttcctattccaatacatactgtcatggatgggtacactaaaatctcagaattcactgctatatcactcatccatgtaaccaaaaaccacatgtacccccaaaagctattgaaataagataaatacattcttatttaaaaaaatactgtcatagggatgctaccttcttttcttttttgttagtaactatttgtgggatgtctttggtgtgtcaggctctgagcaatgccattttctcttggcttctttgcagtctctgtgtgaggcttacagtcatttttcacgtttgactcttcagaaggaagacagggctactggttctacatctggaactcttttcccacaacaccaacactgagaaatgtgacatggtgctgtgtttacatttgcataggaacttgcattataagttttatttgttgagttattggctttttttttttaataacccacatcagtatatagaactttgcaataggcatttttgttttaacttcatttctggtgcagttttattttcctacccttgtctttctattttctctttcatctgctttagacttaaactgtgttttatgtattgctgtaagcctctttaaaccctttctaaaacaaagcagggaatacataaacaaatagttttttgttttttgtttttttttctttgtaacagaaatcgacttaaagcctccagagaagtagaatctgtagaccttccacactgccacctgattaaaggaattggtatgtatatgaaaatgcttgttgggcacattgcattttttggccattaacattaaaacactcattaatggcattttagcatgaaattactgcttttcagtggataaatcacattagatcaacaaaaacctctttggtcaacctcttgatctgatgaaccctgtatttattcttctttcctaccctcactgtaaattattcttttttgtgtgtaattctatgtttagcatttgatttcttgcttgttttgtgacttctctgaactatttttgttgcgtctgtattgtttgtcaggtatggccgctgcagtctgtgttctgtgagccttgtggtcagctagtgaaggaagctttatgtaggcagtgacagcatttaccctgctcactactctataactaggatctgatcttatggctaacacgtaactgaccaatatggtttggttgtgtccccacccgaatctcatcttgaattgtagttcccataatccccacgtgttgtgggagggacccagtgagaggtcattgaatcatgaggtggttaccctgtgctgctgttctcgtgatagtgagtgagttctcatgagatctgatggttttataagggcttttcccccttttgctcggcacttctccttgctgccgccatgtgaagaagggtgtgttttcttccccttccaccaagattgtaagtttcctgaagcctccccaaccacacggaacagtgagtcaattaaacctctttcctttataaattacccggtctcaggtatgtctttattagcagcctgagaacggactgatgtaccggcacttcacaatatgtattgtaaaaacttgtttttattttatcttctaagctatgactgcagagggggagtctccctcttcccttgactttatgtaggatgtattgtggagtctgagtctttgagtaggggttcctaagagcaagccccaattttgctatagataaggagggatctgtccagattcttctccagcactgagggtctctctggtgtgtttgcagtttttctccaaggtagagtctgtgtcttgctgtcttttaccctttatcatctactaagtacatgtccctagtacataatagactagtagttagattatcaatgaacaataaatattggctttccttttttttaaattttaattttttttttttttttttttgagaggtggcctcactttgtcacccaggccagaatgcagtagcgcaatcttggctcactgcagccctgatatcctgggctcaagcgatcctcccgcctcgtcctcccaggtagctgagactacaggcacatgcccccactcatggctagttttttatttttgtagagacagggtcttgttatgttgtccaggctggtcttgaactcctggcctcaagcaatcctcccagcttggtctcccaaagtgctgggattgcaggcatgaggcactgagcccagccaatattggctttccttagatatggttcatggtatgattagaaacaaaaagaattagcagtcaaaacacctagtttctagttctattctgccacaatgtaaccttaggcaaagttggtttttgtatttgtcacctataatgatgagtttgtgattagactaatggtttttagactttaaaaagcctgggaccatttatttataatcttactctgagagccacagtgtggaaataactagactgtcattgagtcacttctagtcctttacaacaacatccttctctagaggtaggagagacaatttaatattttgttttactctttagaaattaaaactcgggttacatggaaatgttctcttctctgaataggtaacattgttaaacaagttttgagtgtccttccatctttttctttttatgaatactcctgtacataatttttaaaaacataagtgaggtcaaattatgcataatatttcaaaactagctttttgtacttaatactaggttttggaaacttatgtttgtacataatgttaccttttcttcacaactgcacagtattttttgtgcaaagttcatataaacagtgtatgtgcaaacaatatagaaagatataaaatggaaagtaaataaaaataaaaatctctcatcaaactcttcatcacccccaacagaaataaccccaaagataaagctcccttttttatctttcctgatagtttcagtgcatttgcaaacaaatatattgactctttttttcacaaatagaattttagtgtaaatatttcacaaccttcttcattcctaaaacagtgtgagcagctttccacatcagcatatatagttactttgttctttttaatattttcacattccatgatttatttaaccattccccttttaatgtacatttgggttgttacagttttttgcaactatgaacaaatcagtgaacatcattgctgttgagtttgtgtgtctgtagaatatgtccttaacaatgggattgttgttcccttagaatatgtgtttagagttttgacagtcattgctaagttgctctcaatttggcaacagtaataaactcagtacctcatagttgtaaccacattcactccagacagagttctcagcactcttttagtaaaaataaaccatcagttgacagtgccaccttcagagtttctctacaaataccttgcttgcctccctttctttttttcttcttttaaatcagcttcctcaggttgatctgcctctcattccttaggcatctgtttcctatgtgttctttctcctttttttcattgatacttttgtatttccccagttctacctcccctcccctagactggttggctgtcctggaatttcccttccttctttcaattgcccaaacactaagtgggaggaggcaaactcatatcaaatagcagattgactacatctgtgctggatcatgcagacagttcaagagtcccaagtaacttagcagcttcatcttgccttccagctgcaatcaagaagagccctctcagaactggtcactcagcaaaagccagatggcattagtaaaagatgttgggcaagggtgggagtttgggccagtgatctcttaggttacttttgctgctgagttaataattgtcacattattaaacagcccttggccctgggaagcccaccttctgtgaatacaagtctcagagtagacaatagggcacaaccagccatgttacatgacagactgccaagtgcattcctcttacaactcactgggatggagcgctcctcagagaaaaacaagcccagcaacatttgtattctgaacaggcatctgtctatgtttgtgacctttatgttgtgatgtgtgtgagctgctgtctggaattggaaagaatgaggaaatatgtcacctatggcccctcttgtgaagtgttaaatgcctctgaggcacttcaaaaggcaacagagcggagaggatgagtgattagaagcacatttgggatacatttttagatctaattagaattgtccttttttttttcttttttgcttttgccctgtggttagcacacaccatatgaacgtttgtcgaatgctatgttagtgatgcataatggttaataataacttttggttatatatctttaacaacagttgcttattcacaggtctttgataagaagaaataacaatgtgctggacacacatttctatacaggcaaaagtgactttttatgatagagagggctgtttcttattttctgttttgaaaacagtagtagctatgcacttgaggccaactaatccctctaagaggtgaaccttccttcccccttgcccttgattcccatcaacacacacatacatatgcacacactaccgtgcttcagtcaccatcactggaagtgaactatgtgcaacttttgggtgctttatatatatcatatcatattgtgtctgctttaataaatcatagttattgactacatatcatacaggatgtgtgccttctgtgggtcagaaaataagttcactatttagtccttttcaaaaattccttcccgatctatcttatagacagaaactaagcttttatacacccaagatttggcagattaacatctgcatattaaaatgtcaagagctagttaactttatttgaggcttaaaagttaaaaaatctgattttctaaatgtctggccttcaaaatttgagtggactgtctttctcaagataactaacaattttatgcacttggcagtcaagacctttacaataactgctgcttgggagattgaggggaaaaaagcattaaagtttgtggcccttataatcaagtactttacagtctactgatgggagaaaaggaaaacaaaacaaaacaaaaaaccactgtgagatatagatatgtcttttctttctctagcagataagtacctgaggctcaaggaggttaagcaacttttgcaaattcactttccaatatagtgtcttttcccagggtgactaatgtatatacttgatgagtgaaccagaaaagtaggaaataatatgttacatatgggatgctctattgggtatagtaaaggatgcgttgctgttataaaattatagtcacttagaaaagagatgtttatttttatttttctctcatcagtcttaaggtaagtgaatggcctagggtagttaggtgactgtgttccatatggtcattcaggggcaaatgctgatgaagcaacacagctgtcttcatctaagactagaactctgcttgttgccatttcccagcaggaaggggttgaaagaaaatttatgtagatttttttttctacccagtagttgcatatatattgtattctcacatcctattgacccaaacttagacatatggccacatctgtcagccagaaagggtgggcaatgttatctatagctgtgttgctacgtgcctattgctaaaaaggctaaaaaggaagaaggggaacatggatgctggtgaacacttggccacctctgacacagataattgctaaagtaataagaagagatggaaattaaatgtgctaagctaggagactttctaaagaaagggtttgtcatgctacgctgtgccattcatgtgtttttttgctcatgctgttccttgtgcctggaaattctccccctaattcccctgagcagtggatgcagtggataccctccccagatcccccccaacttccctgagtgttggctaccaaaagctctgagtgcacccagggagctaagtcctcctgcccacaggcaataatggactgacacggggtagacttaaagaaataagaggcacatcaatcaattgaaatgtgtgggaccttacctggactctgaattaaacaaactgtaattttttaaagctacaccttttaaacatgattggctatttgaacactaactagatatttgatgatattgaggaattattgtgaatttttagtgtagtaatgatattgtggtttgtataaatatatttagggataatatgatgcctcagatttgctttaaaataacacaggatgaggataagtggtaggactgcaagggaaacaagactggccatgagctgataactgttgaaggtgggtactgggtatataagggctcaccacaccattctcttgatttgtgtctatttcccataataaaaagtttaaagagagagaaccgatgaaggggagggagagagtcaagcacacaataagagtgacaaacagtgccaaatcagcccacagtattaagttttcacatatttacataaatatcacctggaatgcaatattgaaattaatgtatatcactagaataaaaaaagtaaagatttaataaatttgttttgaaataaaataagttgaaatacgaaaaagacagaaaaggttttgaaagaggttttaaagaaaagtgcaggatattcattggtaaagatgttggtgagaggcttggaagcaaaacttcaggggaaaaagacaacatatggaattgaccacaattgaatttacaagtgaagtggctttacagaggaatcaggggatgtttctgagagaggaaattcattaaattctaacttgaatattttctgtttgcctttaagtcagagcaaaggctttgagtcccagcttcccagtttgtgaccttgagcaattgcttaacttttccaaagcctccaatagtcttcactctaaaataaaagataatcatatgagatattgtatgcagggtatttacaaggagcctggtacttggtgtacctaatgtatgttagttattattattaaattagaggagcaaaaatttctctagcattgactgctcctgacataatcacaccgaagaggggatacacgatgataaaaccttcctgcagtagtggctatagaaatgatgacggggagaagatctggaaaatattccaaagaaggctacagatagatacattttttccattggaattaggcaatggagttaaacagaagttacaatatggttgaaataaatgtatttttttaaaaaaagatttctctttccttaattattaaaaaatatacaattttgtagaaaattttaaacaaagtataaagaaaaaaataaaaatcattcataatcctatcaaagaagcattgttaattttttctatatatcttctttttccacgtgtatacttggaaattaaattttctaaaataattttcaggaaaaacaaattttaattaattgagcttctactaaataggactgaaaagcaaaacctggactagaattctctctcggtgtgtgtgtgtgtgtgtgtgtgtgtgtgtgtgtgtctgtgtgtacatgtgtatgtgctgtgtatacatgtgtatgtggtgtagcgttcccctgattcttaacttattaccagtggacaaccaccgtggaactagagtctagtcattcttaacctttttgggggaatcacagtctcttttttgaatctgatgaaaatcaaggaccgtttttacagaaacgttctcatctgtgcatacatgagacattttgcattgcatagaatttccgagggttcacagatactttgaagcccaaaagtgatccacagaccccagattgagaactcctccgctatgccatgcttaagcttatttctgtgtatcttctttctgaggagcaggcagatgggtcatctttacaatgtgaagttcttggcatttttattttgttttgtttttctgcactacgatggagcaagcaacactggaggcaactggctaaatgcaaactcatgaagcaagaccaaaatggctggatagatagatgctgtttggttttgacaacctagaaataaccttgaagaaatcctatggagaagtcttaaagaggaagattggattttgtagactcaaagaatgtgtcatggtttggcttaatctaagccatttttattcttcttttcttgtgtttgggtctattatctgtctgtagaatttatacagtgagactgctggggaaagtcttatgtctaattatttgctgtgctgtgtggagtgtactgcagacagtcaataaacaatcaatagtaattgtagcctgcctcagagacaggagttagaaacttcaactggcttaggtgcatggtatttttcattaattttcttctgctagtttttttctctaatttaaagcctaaatttaaagattaaatagaaaagctttctttgcttatgagcacaagtaggcactgtttttaaaagaaggaatatataatcccaggtgttttacctctgttaatgagaaagatgtctgtttgcttcagattgaatgagcaaagaagaggacaaggatatttgcatggttaaatgcctatgagcccttccttcagaaagtaatattcccctgatgtcaattacttttatacggacatctggatgtttatcatgagagtgtacagatgtcaactttttcagtattatagctggaaatgtggtgataacttgactttgatttgagtaaacataaaatatctaacatttaaagtcagaagttcacttcaggaaggggtttaaactgacatttattaaaaagaatggttccttggaaaaaacatcagaaccatccctaaagatacagtcactctgataaagtaaacagagtcccagttatgctctgtgtaacaaataacagaacttgaacatgacatttatctgttccttaaacttacagaagctggctctgaagatattgacatacttcccaatggtctggctttttttagtgtggtgagtgtcttcttccttccccaaattcagcagaggagatacaagggtatttgatgagggctgcagaacagtaagttgcttttaaaattcattttccaaaatgcattctgaagaaaagagaggtcaaacaagatcttggaaaacttcctccagcttttctaaatgtagagatgaagactctttgcccattgagatagtgttctttatttccccattgcattgcactaaaatattccaatgcaatctgtgttttgttttgttttttcttttttaattttttttattttttgagacggagtcttgttctggttgccccggctggagtgcagtggcatgatctcagcttactgcaacctccgcctcccgggttcaagcaattcttttgcctcagcctcccgagtagctgggattacaggcgcccgccaccatgcccggctaatttttgtatttttagtagagatggggtttcgccgtgttggccaggctggtctcaaacacctgacctcaggtgatcgcctgcctcagcctcccaaagtgctggcattacgggagtgagccaccacgcccagcgcaatctgtgttttaaatgtgcactattaagagggatatttgaggtcttactgtggatactcaatactaacattatactattttaaatacagcatctactcatctttctattactattcaacttgaagcaaatattcttgccattattatttattttcaaatattataccaaccttgcccttttgctttctttcttttttcccctgaatagccaatcataagtggaaagtcattgagtttatttacacccttcattttgccttgattcttgtaagctgaaaaacaatatcctttctgggtatacaatagaaagactttaaaaacaattggcttgtgaatattgttgtgaatattgttgaaactagcttgtaacaatgtccattctaattggaaatccagataaggggacagatgaggaggttctgaccacctacctccctggcttgggcagacataggagttcttggcatcttcataggtccagtttttctggaggaagaagtaaccaactctgacacctgactgtaattattccatttcctctcaacatccattattttcaggctctgagactcaagagggatgtgaaatactgggagatacttagaagggagtcaccacactaataaaatagttgttagacttatgagaaaggtgagagaactcaggttggagtagaatgagaattagaacactcttcaggttcctgatggtttttatgtgaaagacagtgagcagctggttattaccactgaggcaataaagagatactgtgggctttagcagaaacaccagtatatgtatttagtttttaaaataaggttttaaaaggaatgttttatttaattgcctacacagaatgaataaagtgatatttatagtaggactctgggtttgtttaggagcacatgcttgcacatgtgtggcttaggaaaaaccactgggaccactagtctaaaatattcataagtaaagatgcaaacattctgaataaagtagaaggcagttgcattgatttttttatttgtttatttgtgttttttgttgttgttttgcaaggatgtgttcttggagatttttataatctagaattcacctatttcaagatttctctccagcccccatagtaataaatctgaagtaggagggatgaggtctccaaacacataaatctacagccattttagcttgggggcatgttatagttacaaagatcttatagccatatcaatagaactttttctgctttttttctgttaccctcctttgctcatttgactttttttaaaatttagaaacattcccagtttgctgctgtttttcatttacttggcattgtctctaataaaacctagagtgtactctcttctaaataaagaggtcctacattgtggaggttgttcattcttcttcctagcattttagctcatctaacccaacctattttacagttatgggttgagggtcacctcaaaactaatgtcacacttcatgaagaattggatgacatagaataaaatataaaaaatgtaaacaatgtgagtgtgcttaacaccactgaactgtacacttaaaaatggtgaaagtgatgaatgttgtatgtattttatcataattaaaaataaatttttaaaaagagaaaaaatacttaaataaataaggagtgcgaacataaccatgactagttatcaccatctgatagtgcttcctttgcatgtaaatcatgcttttgttttggggacattcataaagaatagggattaactgaagtggcactgccatgtaacaatagcataattccagtttgttctacttaccaggcttgccctccatgaaaatatacaattgtagataatcttttttaattggagagatttcctcttatgtccaattttatacataaagtaagacttttttattgtgtgcctaaatttgtgtaaatatgactgcatcgtattagtaaactgaattaggtagtgcattcacataaaatttaacatcaccaagaaggctttaccttaagaatgtaatgatgaatcaccattttagatagactgataggtaatttattaactgatttaaaagagaaaagacctatatcatctcagtgagtaccaaaaagcatttaataaaattcaatactcattcctaaagttccaagcaaactagaaagataaggaaaattcccacaaaactacagcaaacatcattcttgatggtgaagcattggctgcatttgcattaatgctcagaacaggaagaaaatacccaacaccacaaccatcagtaatctactagagttcttagtaattcagtaaaacgagaaaaagaaatgtgagatagaaaagaaaaagacaaaactgtcattagagaagcagggactggctcaattgcccaggctgatgtgcagtagtgcaatcatagctcactgcagcctgaactcctaaactcctgcgctcaagaggtccttccacctcagccttccgagcagctaggactacaagtgctcaccataacactcagctaatttttttttttttttttttttttttttttgtagagacagagtcttgctatgttgcccaggctggtctcaaactgctggcctcaagcagtcctcccacgtcagcctcccaaagtgctggaattataggcatgagccaccaggcctgacctaaagctgtagtaatttaaaaagtgttatattggcacaggaatagacatgagacattaaaataacaaaacagagagtccctaaatagaccaatatgtaaatgtcagagatctagcacatgataaaggtgatattttgaatcagtgggagaaggatggactgtatgccaggcactgttccaggcactgggatctagcagtgaacaaatttccacagtcagtatgtagatgtcacttttctccaccctcagctctccctggaatcacctagtccaccaaccttctgattactctctgaagagaataaatccctgatcttcttttcagttattttcaggctttcagtattccacctccccgttattattttttctgttatcttttctctgttttttgagtttttgtggctttatgccactactttaaccacaatctctatttatccttcatgtacagttcccatgttagtccataaaaatacttaagcttttgtatttaacatttttcaccgttttggaaagggtctaaaattcccaggactccacagctttgcaccagataagcctggaggaatactaatgatggatctaaaagaagaaaaaccaagggcacgggaattaagaatcagtcgtgggtttgatttggcctcattcaatccacatggcatcagcactt

SEQ ID NO: 13498 - DNA, 555 bp, Homo sapiens
atggggcggctggtggctgtgggcttgctggggatcgcgctggcgctcctgggcgagaggcttctggcactcagggaagcctgaagccagaatgccagacagcgcagacactattccatctcgcattttagttttaatgaaaatctctgaaatcgacttaaagcctccagagaagtagaatctgtagaccttccacactgccacctgattaaaggaattgaagctggctctgaagatattgacatacttcccaatggtctggctttttttagtgtgataaggggacagatgaggaggttctgaccacctacctccctggcttgggcagacataggagttcttggcatcttcataggtccagtttttctggaggaagaagtaaccaactctgacacctgactggtctaaaattcccaggactccacagctttgcaccagataagcctggaggaatactaatgatggatctaaaagaagaaaaaccaagggcacgggaattaagaatcagtcgtgggtttgatttggcctcattcaatccacatggcatcagcactt

SEQ ID NO: 13499 - DNA, 6426 bp, Homo sapiens
agaaaattctctgttgcatctgaaaacagtcaaacatgagcttcttccaaggtacttcctcattttgttccttctctaatttatccccagcatttgcaaacaatccctatggtgggttgtcctgtcatcttttataagcgctaatgtatatattagctaatatgtaagagctaaagagcttatatttccttatttataaatgtgtgtgtatagtttccttataaaccagggcaagcatggcatatgaaagttgatgtcactcatactattcactgttctatgcggactcctttgagaaatgatgaagtgcccgactacagggtgatactcttcaggcccatcttgagggtagaaggcaaaccctaacattttttcctgctgtcaccctccatcttagatgactcatcacccagatgagtgtcttgccaaggaagaatggcctgttttttattgggtttgtatgctttgcatgggactttataccaatcgctttcatagggttagtgatggttgcatgctagtaatcccacagaattagagccactcaagttgagagtgagtcattacacttcaagaacataaagctggttgaaaatgtggctaagagagaatcatgtgtacccccacccccagttcagtgtgtattagcctactgcttcttttagtttaaacttgatgaatatttttaatttctaatgaaatttcatttctaatgaaattaaaaatattgcctatctagggcctatctatgcctatctagggcataagcatgtaacttccaatcattccttccaaaaatgcacttgataaaaaaaaataggagcataaataccatccaagcattatggtgctctttcagaaaaatgagacctaccttccctgtagctctatatttttcatttagcaaagaataaagcagctctttcagaaatttttgcatagagtaattggaatttaaatttaataacaccctcacctaactggtcttaaaatgaaattgtttttagcatataaatctctcacctgaagcattgtactatggcaattttatcatccatctctctgcaagtgtttattgagtgcctgttcattctcggcatgtcagctttgtgaagcaggtagaaattgaacagtcaaccttagtttgactaataactaagccagggaaattagaaaaatccaggaactgagtaaatggaagctaggtaaatgttactgactgcctaaccagctcaccagccaatcaggctctctccagctctgtactgtggacagctctgtccttacgtataattgttaaaccctacatttcttgctgtcaaaaaacatgccctgatggcactaagttctttcttctcttatggtaatcctgccataattgctaaatgacctgtgttcagattacctggtaccatacaaaattgttctctggcaacaatattatagtatattgtatatgactatagtcgtgatttttagctcgtcttttcctcttaccaaaaatttaaagcacatgttgcataaatcttatgagtacttaatatttaatatggagaccaacaggccttttgtttcctctcacatgctatttttctttttcagtgtgaatgacatcacagctgttggaccggcacatttctatgccacaaatgaccactacttctctgatcctttcttaaagtatttagaaacatacttgaacttacactgggcaaatgttgtttactacagtccaaatgaagttaaagtggtagcagaaggatttgattcagcaaatgggatcaatatttcacctgatgataagtatggccccttatagaatatcttcatttttcttcagttgtggtgctggccaaattctttactttgctttctttgtcaatgtgaaaatagttttcttgacatttatggtatattatacatataatatatagatacactatatatataattatatatgttttgtatatatatttacatatacttagtcacatgtatttatatgcaaatacaataccatatttaagtaaactatataatacagtaatatatatgtatttatatataatatataaagtttggaatacatcattgtcaaatttaattttataaatataaattttaaagtgtgatcatactgatgcatacatattgaagtatcaggtatttccttttaaataaatgtattatttttattggctatacattattccattataaggatgatcttaaactaatttaaccaattctctattgatggatatgtgtataggggtggggagttctacataaaaaatattttatacttcttatttaccatggaattttaaacaagtattttttttaaagaaaaagtccctaggagagtgttttttttttgttttgttttttggagatggagtctcactccgtcgcccaggctggagtgcaatggcatgatctcagctcacctcaacctccgcctcctgggttcaagtgattctcctgcctcagcctcccaagtagctgggattataggcatgcgccaccatgcttggctaattttgtatttttagtagagatgaggtttctccatgttggtcaggctagtcttgaacctccaacctcaggtgatccgcccacctcagcctcccgaagtgctgggattacaggcatatgccaccacacctggctctaagagagtattataacataatggttaaacttgcagattttggactcatacaggcctgggttcaaatcccacccagggcactggctaaatggttctatgagctacttttctgtagaacagacccctagaaatagaactatttgctcaaacagtgtgattcttttaaatgttaactttaatagatattgccaaattgtcctccagaattatctcattatttttatatgcacaaccacaacctataagagaagatattaaattcttgatagctttcttatctactgcctcagcacactgaaaaatttaaactactacaaatacaacataaaataaatttggcactccttgacaactaaatgcccttatttttgtaatccaatttctcctcctttcttgttgactatagaaaaagaatgtagaatcatttaatttaaattgtctctaactgacctgatccaacctctgcagccaaatctgtttttcactcttatatttccattatgagagtcaaactttccaatcacccaagctaacaaaaaaataacaataatgaaaagggagaatcagcttttactcctctttcaccattcctatccagcctgtaggcaggtcctgttggttctacctgtgcctccttcctctacccccaaactcctttccctttgagtgagacctgcctaatttaggttgtcatcctctctgactagcatatgagactttcttccaatttgttttctgtctacttggatttttttcactcttgccaattttgtctgtctatctctattagccttgaagggctccccaaagagggaactctgtcttcctcacctttgactccttatgccagtacagtgccaggcacaaagcaaatgctcaggaattgtggaacagaactgaccatttgttgccactttattattctaagatttcagtggaatccaattgcttatcaaatcaaggcagggtaaagggttggactttgtttaacaggccacctccaacctcccttttctactatttccatgctttctatgctttagacaaagaactcattgttttaaacattccttcctcttcttgctcctgtgattctgctcttgtgcttgcttctgcctgggaagtgcctcctccgtcctcatctcaaatctcatctctctttacacagccactgcagatgccccttccttggtgagcctttctgtgtcctcggaagttagctatttctagacctgaactatttctcatgcttattaggtgtttaatgtgtacaaaccagtgagatttgttccaacacactataaactttcaaggagagaggctgtgtcttcttcatgtttatatctgctgcaacactgagttcatggcttttcacacataattgctcaacagagcaggtgccatggaaagtcaattcaatgagtaaaattacctcaaaatagtctgttaattcactcacctttgaagtagacagattattctgcattgatacttatctcttactcttaaaattcgctatgtattaataaatattttattgaatattaaggaatgatcactattttaataagatgttctttaccatatatttctatatgtacatgataattagaagtatcaaattatattgtggaatgtaaaagcttttcttctgaagccaagcatttgttttattgtcatttcagtggcaaatatggacttcatattcaaaatgatgttctatattatttttccttacaagctttttgaaaaacaatttaataattccatgattgttgtagcaccactgaattgattctgaaagcttactttttaaataaaaattgacctttatcaagcattccttgagggcccatgattgattaacttcttggcaggttattaagacttattctttcacactgtattaatgaagctttatattggcatggagctctaaccactgtgtcctttctgcaaaggtatatctatgttgctgacatattggctcatgaaattcatgttttggaaaaacacactaatatgaatttaactcagttgaaggtaaaatatttatttttacatatagacagtaatctattatgctttgcaatgacatagtttttctataagagtaccacacgtagaacaaaatatggatgccagtgtagctattctgggtttttaaatactccctacaactagagaaagctcctgtttccagcgatctcaagaactgaccatgattacatgcagcagcaggttgagagtgatattcatcagatttagggcccattccatgaagtattgatggcagtggaagaattccaataagaattttcacaattgaaaatactaatagatgaattctcaaatgaaggtttatgcacagtgtcagttctttcaataatacatgaaggtagaaattgggttccacaccattattattttcttcctactcaacaacacatattttaggttgattaagaatttcctatcttgctttgattgagttccttgagctaactgatcattgtgcatcttttaaaggaaaaggagttcagtttttaagatagatttttacagagaccgattatcaccctaactttcttaatttcagggaagaagaaaagtggctccaaaccagtttttaatacattccttttaagcaatattggtgttagaaggtggaagcagggcgatgtgtaatttcctcacatgcatagaggcaggaaggttacctctaaattatttaatcaagtttctcatgtcatttagattttgacaatttctcatttggaaggtacttgagctggatacactggtggataatttatctattgatccttcctcgggggacatctgggtaggctgtcatcctaatggccagaagctcttcgtgtatgacccgaacaatcctccctcgtcagaggtttttatattttcagttttttaaacttaattattcaagtccttttgaactaataatacaataaattgtcacagggatgatttgtttagttattttaaagcaataatataataagcttatgtcgtggttttgtaattgcgttaagccaataattggcagaatgttacattgttcaaatactttaagaaaggtaatcttttgatgtattaaattatggtggaaactagtcaaaaggcatttttataaagacatgtgcccttcttgggtggtatactggcaatttttaaaatatctgatttattgtcagctcaccacatgatgtgatatttgttcatgttgaagtagtgtgaaagtaggcacattagtatgaaagtatttctattaaagctgaattgctataataacactaaatcctgtgttggcatggaataactagatggttttaagaaagtactttctttgaagattggagaaagtactttaatttaaacattaaaaagattggtaactgctattttcaacagcatgtccccttaatcagtgtgtcattgtggaaaacagggcttattgatgattgagtgacatgcatgtacggtggtcttatattcatactttgtatcccctgaataggttctccgcatccagaacattctatctgagaagcctacagtgactacagtttatgccaacaatgggtctgttctccaaggaagttctgtagcctcagtgtatgatgggaagctgctcataggcactttataccacagagccttgtattgtgaactctaaattgtacttttggcatgaaagtgcgataacttaacaattaattttctatgaa

SEQ ID NO: 13500 - DNA, 699 bp, Homo sapiens
agaaaattctctgttgcatctgaaaacagtcaaacatgagcttcttccaagtgtgaatgacatcacagctgttggaccggcacatttctatgccacaaatgaccactacttctctgatcctttcttaaagtatttagaaacatacttgaacttacactgggcaaatgttgtttactacagtccaaatgaagttaaagtggtagcagaaggatttgattcagcaaatgggatcaatatttcacctgatgataagtatatctatgttgctgacatattggctcatgaaattcatgttttggaaaaacacactaatatgaatttaactcagttgaagattttgacaatttctcatttggaaggtacttgagctggatacactggtggataatttatctattgatccttcctcgggggacatctgggtaggctgtcatcctaatggccagaagctcttcgtgtatgacccgaacaatcctccctcgtcagaggttctccgcatccagaacattctatctgagaagcctacagtgactacagtttatgccaacaatgggtctgttctccaaggaagttctgtagcctcagtgtatgatgggaagctgctcataggcactttataccacagagccttgtattgtgaactctaaattgtacttttggcatgaaagtgcgataacttaacaattaattttctatgaa

SEQ ID NO: 13501 - DNA, 23445 bp, Homo sapiens
gaggacaaagaccagggccaggcccagggcggagcctccgcggccccgacgcagggactcggcctaggcggaggacggggcggagcgcggccggcaccatcgagccgggaagatggcaccgcccacggagctgctggccaggccggagcgaggcagcgcgcccggctcccgcgccatggggcggctggtggctgtgggcttgctggggatcgcgctggcgctcctgggcgagaggcttctggcactcaggtaggtgggactcccgcgcgcccctcctcggcggtccccaggctcggggtggccgcgtggtgcggggagggcgcaggctgggggagggattcctgcgggacctggccctgcggccgggggtggagaatttttgaatgctgtccctcccccagctagttgaacccccatcaccccgactctccgcttctagtgaaaaaactagcaaagtttggagtgaatcgcgacactttcttgaaagtttataagcccttgctgctaacaaagttctcttctgcttaggctgacaagagaatgctttgcaattacccaagggccaaactagtggtttaaattgaaaacaaaatgactactcatgcattgaaaccttaactatgaagatttatttcaggtcattggtgctgtttctccttgttgcccaaaccagacccgtctttaataaagttgttctccacccatttctgcatagtttgagaaactcttcagctgtagatcaaagacacttgaaatattcagctactgttcttacttcctatttattcaccagggaagcctgaagccagaatgccagacagcgcagacactattccatctcgcattttagttttaatgaaaatctctggtaggtagacatcatcgtttataaattaccaactcaacgtttgttttttgtttattttattttttgtagagatggggtcttgctgtattgcccaggctgttccctaactcttgcactcaagcaatcctccagcctaggcctccccacagtgctgggattacaggtgtgagctgttctgccctgcctcaaccaaaattttataggcctcatgcaaaagagttccagaaagactgagcacctgctatgtgtaatgttctctcttaggcttctatagtagagtacgacccttatggagtttgatacaggggaagagagaattaaaatacagtaaatgtataaattaggatgttctaaggacagacacaaatgaaccgcataggcttaaagaggaaagattccatcccctgagggtggagttctagagggaggaagagacattcgacctgaccttgaagggtgggtgcaacacatatgagcatgaaggggcccatgccaaatgtatagtgcagcaggagcaaaggggctaaggtgggaagttggaagactagcaaatgggccaatttgaagggagcataaagtcaggagatgagaatagtagggtggtgggaaggataggttttgaggccattaaatataagttgaaaaatggggccccactttcataggcccaatagtgcttcaaaagggaaatattggtgggttttgcttttcaacaagaacttaatataactagttgtgttttatagagataagcctggaaggggggattggaggagagcaatggttctctgtacattagaatctcctggagggctggtgtctgagtggcaccaccaaagattctgattcagctgttctggatcagaatctacagctcacacctgtaatcccagcactgttggaggcctaagccagaagattgcttgagcccaggagttagtgacaggcctgggcaacatagcaagatcccacctctacaaaatgaataaataaataaataaataaataaaaaacaaaatttgagttggtaatttataaactatggtgtctacctaccagagatttttcgttataattaaaatgtgatatggaataatgtattgtttggcaagctggcttcagggttcccaggtaaatagataaataaggaagtgcataatgtaagaacagtggctgacagtagcagtggcattttttatttttaaaaacattcctgataattctaatgagcagtcaaggtcgagaactactagaatagagagcagacatggggtaactggttaaggtattgcagtaggtcagagaggataacagggacccaaactctggaaccccagggatgagggagaagtcaaaggtgctaccagagtttgtgccacagctccactgtcccatggttgtagtttcatctactgataaagcagtgcaaagaggaagcgtgtggtggctgagatgggagtgagatttgaggaaagaacgcttatgggtaggaaatggacatgttgaccttaattttcatgttaggtaatgcccattgtgctctacagaacattcatgagttggatgactttgtatatgatctgtcctgctctccatttcaaaggcaagaccaccaaaattcacaagcttattatgttgtcactaatgtgtaagccaccagtttttctgcaagttggaagttttctcaacagtcaaatattcccccttctcactaatcttaaggttttaaagttatagctgcaaatctaaaaaaaaaagaaaaagtaaataaaacttattgacagaatgcctgatagtttatttacaggtttttgtttgtttgttttttgtttttctttgttttttattttgacacaaggtcttgctctgccgcccaagccagagtacagtggtacatcaaagctcactgcaatctcaaacacctaggcacaagcagtcctccctcctcagcctcctgagtagctgggactacagatgcatgctaccatgcccagctagtatttttatttcttgcagagacagggtctcactttgttgcccaggctaatctcaaactcccagcctcaagtgatgctcctgcctcagcctcccaaagtggtaggattatacacatgagccaccaccctcggcctactttacaatttgatgcaccttttctttacgtgactgtgatgcactttaatgggcagtgactttataaaatggtaactttattggatatgtggagccccaaatgggctgacgtgagaatgttggggtaggtggtgggtggctggatttagcaaagaaaaatgtaggctacccagttaactttgaatttcacatggatttttttttttttttttagtataagcatgaaatacttataccatacttttagcattaagcgtggaatttgggacataattatactaaaatatcattcattgtttatctcaaattaaaatatcactgggtaccctgtattttatcatatgttcgagtgccttctgtcagaatttggtgaccctttgagtctgttttaaaaaggagcatgtttggccggacacagtggctcacgtctgtaatcccagcactttgggaggctgaggcgggcagatcactagaggtcaggggttcaagaccagcctggccaacatggtgaaaccccgtctctaataaaaatacaaaaattagccaggtgtggtggtgcatccctgtaatcccagctacttgggaggctgagtcaggagaattgcttgaaccccagaggtagaggttgcagtgagccaagattgagccactggactccagcctggacaacagagaaagactccctcaaaaaaaaaagaaaaaaagcatgttcccacctccccataaggaaaggctcttcagaggaagttgaaggaacagaggctttatgtttgatttttgctttaatctgatgcctactgtttgattattcaatatttagagatggtactttggcaatcaagttatttctctccccaggttgcccacttcaatttttagtataaggatgtcccagagggataaatgccatcaaagttgtctttcttcttctgaactgtaactgggattccacaccctccttttccacccctccctagttgagcaataaaggggaaaataacagtatacaaatattcccaggccagttcctggtgtcaaggtacacagccatggatgaatcatgaggcttgagtgcatcagagacctaagcgtgggcaggaacccccagagtacccatgtgaatgttctgcttgctgcctcgcaccttttatgacaattcccacaagaagctatgtggtctgtttctacttctgaaagagcagcctttttcccttttttttttttttaaaccaccatcctttaaatcatttattatgtaactcttgtgtgctggtcagtcagtgtgtcaaaagtgtaaaaacttctttatttatttttttaatctatcttttaaaaaatattttctttctttttttcttttttcttcaaggcaggttcttgctctgtcacccaggctggagtgcagcagcacaatcatagctcattgtaacccagaacacctgggctcaagcaatcctcccacctcagcctcctaagcagtgaggactataggcatgcaccactacacctggctaattaaaaaaacatggccgggcacggtggctcattactataatcccagcactttgggaggctgaggcgggtggatacctgaggtcgggagttcaagaccagcctgaccaacatggtgaaaccccatctctactaaaaatacaaaattagccaggcacggtggcacatgcctgtaatcccagctactcaggaggctgaggcaggagaatcacttgaacccgggaggcggaggttgcagtgagccattgcactccagcctggcaacagagcgagactctgtctcaaaaaaaaaaaaacaaaaaaatttttttgtagagatgggggtcttgctgtgttgcccaggctgatctcaaacttctagccataagtgatcctaccgcatcaacttcccaaagcactgggattatgggtatgagctactgagccctgccaaatttctttatattaaaccaaaacgtacatttactgatatttggaaagaaagctcttttacttttatgccttcatccagtcttcatagatatcttcccttttacattataactgtaaatactgaggttagagaggttaactagttagttcaacagaataatataaatattgaataatataattaatgaataattagtgctgaacctgtcgcctcagccaggtctcctgattccaaatacagtttgccccagctccccacagtcttctagcttctctgccagtggagcaaattttccctaggtttacaggcctaagcacagattcttagttacttagtgcaagtattgccagagcccaaggggtgaattccaaagggtttttacaaggctatacataaaagataaagccctggcttgtatatcacttgcacataggagataaagccccagcagttgtatgtaaatttcaaaagcagagaagtatggcacaaagaaactcctgatagtaacactgtgttcccactttgcttaggggcatattggcaccgtagcatggtacacccttactgctacctgccatgaggccagataatagctagcagcccctggtctcattctactctggatgggtactgctgtttcctgaatgaaagacactgagattgatttcatgctaatgactgttggttaagagttcatgctttctattcacaatagcaaagacttggaaccaacccaaatgtccgtcaatgatagactggattaagaaaacgtggcacatatacaccatggaatactatgcagccataaaaaaggatgagttcatgtcctttgtagggacatggatgaagctggaaaccgtcattcttagcaaactattggaaggacagaaaaccaaacaccacatgttctcacttataggtgggaattgaacaatgagaacacttggatacaggaaggggaacatcacacaccggggcctcttgtggggtagggggaggggggagggatagcattaggagatatacctaatgtaaatgacgagttaatgggtgcagcagaccaacatggcacatgtatacatatgtaacaaacctgcacgttgtgcacatgtaccctagaacttaaagtataaaaaaaaaaaaaagttcatgctttgtggacaggtagcctgagttcattcatagctctactatttacctgaaaccttggactaattatttcacttttctgtgccccagtgttgtaatctgtaggatggggtactgcctgctccacagtgggactatgagaatgcttaaaataatgccaagcgcacagtcagctcaataaatgtcatctatgtagacaatgaaattcaagcataattccttaaacctttgtgccatacatccctttggcagtctggtaaagccttcattccttctcagcatcatgtttttaaatgagtaaaataaaatatataggattacacaggaaaccaattaaatactgctaccaagctatttaaaaatctatgatataatatgctttttaaattaaacccttaaatggatctagaggtaggtaaatgtctaacagcagatattttgaagttgcaatgaatgtaaatggcactttgagctatctacaactgaaatgcgatagaaaagtatctataatttctattagtgacagtcacaaatactactaatagtattgtggtttgttgcttatactcatcatcaaaggaaatactcaatttgagttaaaggtttaaataaagatgtatttttcccccatccaagttcatggatccctgaattctacccatggattccttggtcactggactccataggggtcacttggggaatgattgtgacaccaatgaaggaagccagcggatactgtttgctgtattatacctaccataggctcgtgatgaggaaataataaaataaataactgtaatgaaaaagaaaagaaaggaaaacaaaaggaacctaaaacagagaaggcaaatagctttccttttgagtgtcaattttaacagactccctgtggttgcgaaacaatgtgtctgaggctggctctgggttagagggagagtgctgttattgattagcaattcctgcatgacagcagagtggcaacagccatgcatctctgacctggcacagtcataagcatgttatagacataaagtgttagggaacaaataggctctagcaaaagtaaagagtgttcctcctctcatatcatcacttatatgtgtttataccatttatgttgtattttttacatgaatacttttagatttattaatctaatccaaaaaggtttgtatagctttctctatattaagagaaatatatgtatttcttaaatacacaaagttcttaaatctgatgccagcgaggattgcttccagccacaagtaacatatatcagattaatagtagttcattcaaagagggatttattttcctcacatgaaaaacagctctgtgggtgacccaatatagagcttgttcattgagccagtgattatatcaaggaactgggttcttcatatattttcattctttgatctccccctattgactttatagctgtatctttctcaaggatgcagaatggctgccgcagtctcaaacactgcgtgtgtgttcaaatcatgaagaaaggagattgagtgatgccagctagctctcttctcgtgactctcctttgtatctagaacacagtgtctttccccaaaacctgggtcatatgactacacctcaatacagcggagtctgggaaagcaaatatttgctttgcccaccactacaatagaaacgacaagggagaaagaaagggggttgggcatggcgttaattttgtcagccgctagggtctgccacccagaaaacagaagtccactaacaagcagggaactgattgttctgccagggaaaaagtctggcagtttcctactgaagaaatttggaagtcttgatggtccaggaaggataaaggcaaaaccttcattttcttttatcaaaaaggaaagccaagaaaaaaattagttaagtagaagttatgcacaaccctcatgtaactcttccatgttaatagcaggtaggctgcatatgaaaacatgatattatacaagaaaactagttgatgaagattgccctatttagcaccaattacttacgcaaacctaagttgactctgaaacaggaaccccatattaaacttttcaaacacatcagaatatgttactttgaacagattttatttaatccaaagagattatctttgaaaaaggtagatggtaaacatcgttatccctatttttgtatagtcaaataggcatagtagtaagttgtgtaaaattgacatccaaaccaatgcatgatactaaaacttggtgtacaaacagcagttacatcctattgctttgtatctacatctgtttctggagtcatataacatttgtagaatcttggaggtgttttaggctcatccttattttatccataaagaagactgacacctatagagattaactgacctgccaagggtcatggcagtttcactgctgagacaagaacacagatccctttacttctttctgagaaaagtacaaagtagtttaaagcaaaagcttccctgcttccagcacttctggctaagttgcgccgtgggaaaattgttttgtctgattcagttttctcatcttttaaactggaataatgctacctaatttacagggttgtttgaagaattaaatgaatgcatggaggtaaatcacttagaacagcggtaaattatacttttttattatttatttcctttgaccacccacaattatcatcagtgtcatcctcatcatcacaattaagattactaccacattaggctacataaactttttttttctctctctgttttataatttcaattttattttagattcaaggggtacatgtgcaggttttacatgggtatattgtctgatgctgaggtttggggaacaactgatgccatcacccaggtagtgagtatagtaccctatagtttttcagcccttgtctactcccttcccttccccttctagtagtccccagtgtctaccatcgtcatctttatgtccatgtgcaccattgtttagctcccagttaaagtgagaacatgcagtatttggttttctagcttatttttcctctcttaaatcacttctgtgacacgtaggccatgagatttattgtattttttaatgccttatttaaaaatttgtattatttaatacatttaatgcattattttttattatatttaaatattgatttatttgtactttttgccttattgctatattgtttcaaaaaatttaacattatttgagttacatgatttcaaatacatactgattaacattttaattagaaactttatgtctgatatgaattgccaaaatgtgtagttggtacaacctatgagtcattctgggttatctagaagaaactggtagcctgccccatactccagaagccttccccagtgtctagacctcagaagctgtcaggaatatgcacaggagaaggacacatggcaaatagctatttcgtctcttaaatgtatggtatgtgggaaccactgaaaaatgtaaagtttctacaaggtgctatttttattatttatggctctagagaacagagaaggtgaaaaatgtgagagagaagggaaagccaatagtatgtggccttcaaaacaaaagatcccacagatattgtcccaaactgcttcctggccctctagagtggagagggagggggaagacatcctattagagttcaacattctcttattatttccttcttttaattttctgggtatacaacagcaaatagttttgctgaagtagttacagaactagttggtgttctccaaccttcctattccaatacatactgtcatggatgggtacactaaaatctcagaattcactgctatatcactcatccatgtaaccaaaaaccacatgtacccccaaaagctattgaaataagataaatacattcttatttaaaaaaatactgtcatagggatgctaccttcttttcttttttgttagtaactatttgtgggatgtctttggtgtgtcaggctctgagcaatgccattttctcttggcttctttgcagtctctgtgtgaggcttacagtcatttttcacgtttgactcttcagaaggaagacagggctactggttctacatctggaactcttttcccacaacaccaacactgagaaatgtgacatggtgctgtgtttacatttgcataggaacttgcattataagttttatttgttgagttattggctttttttttttaataacccacatcagtatatagaactttgcaataggcatttttgttttaacttcatttctggtgcagttttattttcctacccttgtctttctattttctctttcatctgctttagacttaaactgtgttttatgtattgctgtaagcctctttaaaccctttctaaaacaaagcagggaatacataaacaaatagttttttgttttttgtttttttttctttgtaacagaaatcgacttaaagcctccagagaagtagaatctgtagaccttccacactgccacctgattaaaggaattggtatgtatatgaaaatgcttgttgggcacattgcattttttggccattaacattaaaacactcattaatggcattttagcatgaaattactgcttttcagtggataaatcacattagatcaacaaaaacctctttggtcaacctcttgatctgatgaaccctgtatttattcttctttcctaccctcactgtaaattattcttttttgtgtgtaattctatgtttagcatttgatttcttgcttgttttgtgacttctctgaactatttttgttgcgtctgtattgtttgtcaggtatggccgctgcagtctgtgttctgtgagccttgtggtcagctagtgaaggaagctttatgtaggcagtgacagcatttaccctgctcactactctataactaggatctgatcttatggctaacacgtaactgaccaatatggtttggttgtgtccccacccgaatctcatcttgaattgtagttcccataatccccacgtgttgtgggagggacccagtgagaggtcattgaatcatgaggtggttaccctgtgctgctgttctcgtgatagtgagtgagttctcatgagatctgatggttttataagggcttttcccccttttgctcggcacttctccttgctgccgccatgtgaagaagggtgtgttttcttccccttccaccaagattgtaagtttcctgaagcctccccaaccacacggaacagtgagtcaattaaacctctttcctttataaattacccggtctcaggtatgtctttattagcagcctgagaacggactgatgtaccggcacttcacaatatgtattgtaaaaacttgtttttattttatcttctaagctatgactgcagagggggagtctccctcttcccttgactttatgtaggatgtattgtggagtctgagtctttgagtaggggttcctaagagcaagccccaattttgctatagataaggagggatctgtccagattcttctccagcactgagggtctctctggtgtgtttgcagtttttctccaaggtagagtctgtgtcttgctgtcttttaccctttatcatctactaagtacatgtccctagtacataatagactagtagttagattatcaatgaacaataaatattggctttccttttttttaaattttaattttttttttttttttttttgagaggtggcctcactttgtcacccaggccagaatgcagtagcgcaatcttggctcactgcagccctgatatcctgggctcaagcgatcctcccgcctcgtcctcccaggtagctgagactacaggcacatgcccccactcatggctagttttttatttttgtagagacagggtcttgttatgttgtccaggctggtcttgaactcctggcctcaagcaatcctcccagcttggtctcccaaagtgctgggattgcaggcatgaggcactgagcccagccaatattggctttccttagatatggttcatggtatgattagaaacaaaaagaattagcagtcaaaacacctagtttctagttctattctgccacaatgtaaccttaggcaaagttggtttttgtatttgtcacctataatgatgagtttgtgattagactaatggtttttagactttaaaaagcctgggaccatttatttataatcttactctgagagccacagtgtggaaataactagactgtcattgagtcacttctagtcctttacaacaacatccttctctagaggtaggagagacaatttaatattttgttttactctttagaaattaaaactcgggttacatggaaatgttctcttctctgaataggtaacattgttaaacaagttttgagtgtccttccatctttttctttttatgaatactcctgtacataatttttaaaaacataagtgaggtcaaattatgcataatatttcaaaactagctttttgtacttaatactaggttttggaaacttatgtttgtacataatgttaccttttcttcacaactgcacagtattttttgtgcaaagttcatataaacagtgtatgtgcaaacaatatagaaagatataaaatggaaagtaaataaaaataaaaatctctcatcaaactcttcatcacccccaacagaaataaccccaaagataaagctcccttttttatctttcctgatagtttcagtgcatttgcaaacaaatatattgactctttttttcacaaatagaattttagtgtaaatatttcacaaccttcttcattcctaaaacagtgtgagcagctttccacatcagcatatatagttactttgttctttttaatattttcacattccatgatttatttaaccattccccttttaatgtacatttgggttgttacagttttttgcaactatgaacaaatcagtgaacatcattgctgttgagtttgtgtgtctgtagaatatgtccttaacaatgggattgttgttcccttagaatatgtgtttagagttttgacagtcattgctaagttgctctcaatttggcaacagtaataaactcagtacctcatagttgtaaccacattcactccagacagagttctcagcactcttttagtaaaaataaaccatcagttgacagtgccaccttcagagtttctctacaaataccttgcttgcctccctttctttttttcttcttttaaatcagcttcctcaggttgatctgcctctcattccttaggcatctgtttcctatgtgttctttctcctttttttcattgatacttttgtatttccccagttctacctcccctcccctagactggttggctgtcctggaatttcccttccttctttcaattgcccaaacactaagtgggaggaggcaaactcatatcaaatagcagattgactacatctgtgctggatcatgcagacagttcaagagtcccaagtaacttagcagcttcatcttgccttccagctgcaatcaagaagagccctctcagaactggtcactcagcaaaagccagatggcattagtaaaagatgttgggcaagggtgggagtttgggccagtgatctcttaggttacttttgctgctgagttaataattgtcacattattaaacagcccttggccctgggaagcccaccttctgtgaatacaagtctcagagtagacaatagggcacaaccagccatgttacatgacagactgccaagtgcattcctcttacaactcactgggatggagcgctcctcagagaaaaacaagcccagcaacatttgtattctgaacaggcatctgtctatgtttgtgacctttatgttgtgatgtgtgtgagctgctgtctggaattggaaagaatgaggaaatatgtcacctatggcccctcttgtgaagtgttaaatgcctctgaggcacttcaaaaggcaacagagcggagaggatgagtgattagaagcacatttgggatacatttttagatctaattagaattgtccttttttttttcttttttgcttttgccctgtggttagcacacaccatatgaacgtttgtcgaatgctatgttagtgatgcataatggttaataataacttttggttatatatctttaacaacagttgcttattcacaggtctttgataagaagaaataacaatgtgctggacacacatttctatacaggcaaaagtgactttttatgatagagagggctgtttcttattttctgttttgaaaacagtagtagctatgcacttgaggccaactaatccctctaagaggtgaaccttccttcccccttgcccttgattcccatcaacacacacatacatatgcacacactaccgtgcttcagtcaccatcactggaagtgaactatgtgcaacttttgggtgctttatatatatcatatcatattgtgtctgctttaataaatcatagttattgactacatatcatacaggatgtgtgccttctgtgggtcagaaaataagttcactatttagtccttttcaaaaattccttcccgatctatcttatagacagaaactaagcttttatacacccaagatttggcagattaacatctgcatattaaaatgtcaagagctagttaactttatttgaggcttaaaagttaaaaaatctgattttctaaatgtctggccttcaaaatttgagtggactgtctttctcaagataactaacaattttatgcacttggcagtcaagacctttacaataactgctgcttgggagattgaggggaaaaaagcattaaagtttgtggcccttataatcaagtactttacagtctactgatgggagaaaaggaaaacaaaacaaaacaaaaaaccactgtgagatatagatatgtcttttctttctctagcagataagtacctgaggctcaaggaggttaagcaacttttgcaaattcactttccaatatagtgtcttttcccagggtgactaatgtatatacttgatgagtgaaccagaaaagtaggaaataatatgttacatatgggatgctctattgggtatagtaaaggatgcgttgctgttataaaattatagtcacttagaaaagagatgtttatttttatttttctctcatcagtcttaaggtaagtgaatggcctagggtagttaggtgactgtgttccatatggtcattcaggggcaaatgctgatgaagcaacacagctgtcttcatctaagactagaactctgcttgttgccatttcccagcaggaaggggttgaaagaaaatttatgtagatttttttttctacccagtagttgcatatatattgtattctcacatcctattgacccaaacttagacatatggccacatctgtcagccagaaagggtgggcaatgttatctatagctgtgttgctacgtgcctattgctaaaaaggctaaaaaggaagaaggggaacatggatgctggtgaacacttggccacctctgacacagataattgctaaagtaataagaagagatggaaattaaatgtgctaagctaggagactttctaaagaaagggtttgtcatgctacgctgtgccattcatgtgtttttttgctcatgctgttccttgtgcctggaaattctccccctaattcccctgagcagtggatgcagtggataccctccccagatcccccccaacttccctgagtgttggctaccaaaagctctgagtgcacccagggagctaagtcctcctgcccacaggcaataatggactgacacggggtagacttaaagaaataagaggcacatcaatcaattgaaatgtgtgggaccttacctggactctgaattaaacaaactgtaattttttaaagctacaccttttaaacatgattggctatttgaacactaactagatatttgatgatattgaggaattattgtgaatttttagtgtagtaatgatattgtggtttgtataaatatatttagggataatatgatgcctcagatttgctttaaaataacacaggatgaggataagtggtaggactgcaagggaaacaagactggccatgagctgataactgttgaaggtgggtactgggtatataagggctcaccacaccattctcttgatttgtgtctatttcccataataaaaagtttaaagagagagaaccgatgaaggggagggagagagtcaagcacacaataagagtgacaaacagtgccaaatcagcccacagtattaagttttcacatatttacataaatatcacctggaatgcaatattgaaattaatgtatatcactagaataaaaaaagtaaagatttaataaatttgttttgaaataaaataagttgaaatacgaaaaagacagaaaaggttttgaaagaggttttaaagaaaagtgcaggatattcattggtaaagatgttggtgagaggcttggaagcaaaacttcaggggaaaaagacaacatatggaattgaccacaattgaatttacaagtgaagtggctttacagaggaatcaggggatgtttctgagagaggaaattcattaaattctaacttgaatattttctgtttgcctttaagtcagagcaaaggctttgagtcccagcttcccagtttgtgaccttgagcaattgcttaacttttccaaagcctccaatagtcttcactctaaaataaaagataatcatatgagatattgtatgcagggtatttacaaggagcctggtacttggtgtacctaatgtatgttagttattattattaaattagaggagcaaaaatttctctagcattgactgctcctgacataatcacaccgaagaggggatacacgatgataaaaccttcctgcagtagtggctatagaaatgatgacggggagaagatctggaaaatattccaaagaaggctacagatagatacattttttccattggaattaggcaatggagttaaacagaagttacaatatggttgaaataaatgtatttttttaaaaaaagatttctctttccttaattattaaaaaatatacaattttgtagaaaattttaaacaaagtataaagaaaaaaataaaaatcattcataatcctatcaaagaagcattgttaattttttctatatatcttctttttccacgtgtatacttggaaattaaattttctaaaataattttcaggaaaaacaaattttaattaattgagcttctactaaataggactgaaaagcaaaacctggactagaattctctctcggtgtgtgtgtgtgtgtgtgtgtgtgtgtgtgtgtgtctgtgtgtacatgtgtatgtgctgtgtatacatgtgtatgtggtgtagcgttcccctgattcttaacttattaccagtggacaaccaccgtggaactagagtctagtcattcttaacctttttgggggaatcacagtctcttttttgaatctgatgaaaatcaaggaccgtttttacagaaacgttctcatctgtgcatacatgagacattttgcattgcatagaatttccgagggttcacagatactttgaagcccaaaagtgatccacagaccccagattgagaactcctccgctatgccatgcttaagcttatttctgtgtatcttctttctgaggagcaggcagatgggtcatctttacaatgtgaagttcttggcatttttattttgttttgtttttctgcactacgatggagcaagcaacactggaggcaactggctaaatgcaaactcatgaagcaagaccaaaatggctggatagatagatgctgtttggttttgacaacctagaaataaccttgaagaaatcctatggagaagtcttaaagaggaagattggattttgtagactcaaagaatgtgtcatggtttggcttaatctaagccatttttattcttcttttcttgtgtttgggtctattatctgtctgtagaatttatacagtgagactgctggggaaagtcttatgtctaattatttgctgtgctgtgtggagtgtactgcagacagtcaataaacaatcaatagtaattgtagcctgcctcagagacaggagttagaaacttcaactggcttaggtgcatggtatttttcattaattttcttctgctagtttttttctctaatttaaagcctaaatttaaagattaaatagaaaagctttctttgcttatgagcacaagtaggcactgtttttaaaagaaggaatatataatcccaggtgttttacctctgttaatgagaaagatgtctgtttgcttcagattgaatgagcaaagaagaggacaaggatatttgcatggttaaatgcctatgagcccttccttcagaaagtaatattcccctgatgtcaattacttttatacggacatctggatgtttatcatgagagtgtacagatgtcaactttttcagtattatagctggaaatgtggtgataacttgactttgatttgagtaaacataaaatatctaacatttaaagtcagaagttcacttcaggaaggggtttaaactgacatttattaaaaagaatggttccttggaaaaaacatcagaaccatccctaaagatacagtcactctgataaagtaaacagagtcccagttatgctctgtgtaacaaataacagaacttgaacatgacatttatctgttccttaaacttacagaagctggctctgaagatattgacatacttcccaatggtctggctttttttagtgtggtgagtgtcttcttccttccccaaattcagcagaggagatacaagggtatttgatgagggctgcagaacagtaagttgcttttaaaattcattttccaaaatgcattctgaagaaaagagaggtcaaacaagatcttggaaaacttcctccagcttttctaaatgtagagatgaagactctttgcccattgagatagtgttctttatttccccattgcattgcactaaaatattccaatgcaatctgtgttttgttttgttttttcttttttaattttttttattttttgagacggagtcttgttctggttgccccggctggagtgcagtggcatgatctcagcttactgcaacctccgcctcccgggttcaagcaattcttttgcctcagcctcccgagtagctgggattacaggcgcccgccaccatgcccggctaatttttgtatttttagtagagatggggtttcgccgtgttggccaggctggtctcaaacacctgacctcaggtgatcgcctgcctcagcctcccaaagtgctggcattacgggagtgagccaccacgcccagcgcaatctgtgttttaaatgtgcactattaagagggatatttgaggtcttactgtggatactcaatactaacattatactattttaaatacagcatctactcatctttctattactattcaacttgaagcaaatattcttgccattattatttattttcaaatattataccaaccttgcccttttgctttctttcttttttcccctgaatagccaatcataagtggaaagtcattgagtttatttacacccttcattttgccttgattcttgtaagctgaaaaacaatatcctttctgggtatacaatagaaagactttaaaaacaattggcttgtgaatattgttgtgaatattgttgaaactagcttgtaacaatgtccattctaattggaaatccagataaggggacagatgaggaggttctgaccacctacctccctggcttgggcagacataggagttcttggcatcttcataggtccagtttttctggaggaagaagtaaccaactctgacacctgactgtaattattccatttcctctcaacatccattattttcaggctctgagactcaagagggatgtgaaatactgggagatacttagaagggagtcaccacactaataaaatagttgttagacttatgagaaaggtgagagaactcaggttggagtagaatgagaattagaacactcttcaggttcctgatggtttttatgtgaaagacagtgagcagctggttattaccactgaggcaataaagagatactgtgggctttagcagaaacaccagtatatgtatttagtttttaaaataaggttttaaaaggaatgttttatttaattgcctacacagaatgaataaagtgatatttatagtaggactctgggtttgtttaggagcacatgcttgcacatgtgtggcttaggaaaaaccactgggaccactagtctaaaatattcataagtaaagatgcaaacattctgaataaagtagaaggcagttgcattgatttttttatttgtttatttgtgttttttgttgttgttttgcaaggatgtgttcttggagatttttataatctagaattcacctatttcaagatttctctccagcccccatagtaataaatctgaagtaggagggatgaggtctccaaacacataaatctacagccattttagcttgggggcatgttatagttacaaagatcttatagccatatcaatagaactttttctgctttttttctgttaccctcctttgctcatttgactttttttaaaatttagaaacattcccagtttgctgctgtttttcatttacttggcattgtctctaataaaacctagagtgtactctcttctaaataaagaggtcctacattgtggaggttgttcattcttcttcctagcattttagctcatctaacccaacctattttacagttatgggttgagggtcacctcaaaactaatgtcacacttcatgaagaattggatgacatagaataaaatataaaaaatgtaaacaatgtgagtgtgcttaacaccactgaactgtacacttaaaaatggtgaaagtgatgaatgttgtatgtattttatcataattaaaaataaatttttaaaaagagaaaaaatacttaaataaataaggagtgcgaacataaccatgactagttatcaccatctgatagtgcttcctttgcatgtaaatcatgcttttgttttggggacattcataaagaatagggattaactgaagtggcactgccatgtaacaatagcataattccagtttgttctacttaccaggcttgccctccatgaaaatatacaattgtagataatcttttttaattggagagatttcctcttatgtccaattttatacataaagtaagacttttttattgtgtgcctaaatttgtgtaaatatgactgcatcgtattagtaaactgaattaggtagtgcattcacataaaatttaacatcaccaagaaggctttaccttaagaatgtaatgatgaatcaccattttagatagactgataggtaatttattaactgatttaaaagagaaaagacctatatcatctcagtgagtaccaaaaagcatttaataaaattcaatactcattcctaaagttccaagcaaactagaaagataaggaaaattcccacaaaactacagcaaacatcattcttgatggtgaagcattggctgcatttgcattaatgctcagaacaggaagaaaatacccaacaccacaaccatcagtaatctactagagttcttagtaattcagtaaaacgagaaaaagaaatgtgagatagaaaagaaaaagacaaaactgtcattagagaagcagggactggctcaattgcccaggctgatgtgcagtagtgcaatcatagctcactgcagcctgaactcctaaactcctgcgctcaagaggtccttccacctcagccttccgagcagctaggactacaagtgctcaccataacactcagctaatttttttttttttttttttttttttttttgtagagacagagtcttgctatgttgcccaggctggtctcaaactgctggcctcaagcagtcctcccacgtcagcctcccaaagtgctggaattataggcatgagccaccaggcctgacctaaagctgtagtaatttaaaaagtgttatattggcacaggaatagacatgagacattaaaataacaaaacagagagtccctaaatagaccaatatgtaaatgtcagagatctagcacatgataaaggtgatattttgaatcagtgggagaaggatggactgtatgccaggcactgttccaggcactgggatctagcagtgaacaaatttccacagtcagtatgtagatgtcacttttctccaccctcagctctccctggaatcacctagtccaccaaccttctgattactctctgaagagaataaatccctgatcttcttttcagttattttcaggctttcagtattccacctccccgttattattttttctgttatcttttctctgttttttgagtttttgtggctttatgccactactttaaccacaatctctatttatccttcatgtacagttcccatgttagtccataaaaatacttaagcttttgtatttaacatttttcaccgttttggaaagggtctaaaattcccaggactccacagctttgcaccagataagcctggaggaatactaatgatggatctaaaagaagaaaaaccaagggcacgggaattaagaatcagtcgtgggtttgatttggcctcattcaatccacatggcatcagcactttcatagacaacggtaagagccaatgggctaccaacatttagtaacgtgtgatggttcacaaatgactgtgaaaaatagatttggatcatatttctaggaagagaagaacaattaactcatgagtgatttctgtattcttcattacaaagaacttgttcatttgcctcttcagctggcagtaagttatgctacattttgaaattcctaacaggtaacacctgaaagaatgtttagatttcataatcttttcatatacctacgatcatcacatttaaaaaagaactgtatttttgaattaaagtagaaacagattatgcatgaattctgtatatggagtaggaaacactttcttaaaggtcagggagccaatgatcagaaataacaccagacggacagcaataggaaagacagagaatgatctgttaggtcgtctaacagcttatacattcaacctttccttgcctgtggtatttaaatgtcagtgcctgcccagaggtcccgtagttatgtcttgtaaattaactctgttctttcaattctttagatgacacagtttatctctttgttgtaaaccacccagaattcaagaatacagtggaaatttttaaatttgaagaagcagaaaattctctgttgcatctg

SEQ ID NO: 13502 - DNA, 694 bp, Homo sapiens
gaggacaaagaccagggccaggcccagggcggagcctccgcggccccgacgcagggactcggcctaggcggaggacggggcggagcgcggccggcaccatcgagccgggaagatggcaccgcccacggagctgctggccaggccggagcgaggcagcgcgcccggctcccgcgccatggggcggctggtggctgtgggcttgctggggatcgcgctggcgctcctgggcgagaggcttctggcactcagaaatcgacttaaagcctccagagaagtagaatctgtagaccttccacactgccacctgattaaaggaattgaagctggctctgaagatattgacatacttcccaatggtctggctttttttagtgtggtgagtgtcttcttccttccccaaattcagcagaggagatacaagggtatttgatgagggctgcagaacagactccacagctttgcaccagataagcctggaggaatactaatgatggatctaaaagaagaaaaaccaagggcacgggaattaagaatcagtcgtgggtttgatttggcctcattcaatccacatggcatcagcactttcatagacaacgatgacacagtttatctctttgttgtaaaccacccagaattcaagaatacagtggaaatttttaaatttgaagaagcagaaaattctctgttgcatctg

SEQ ID NO: 13503 - DNA, 23301 bp, Homo sapiens
atggggcggctggtggctgtgggcttgctggggatcgcgctggcgctcctgggcgagaggcttctggcactcaggtaggtgggactcccgcgcgcccctcctcggcggtccccaggctcggggtggccgcgtggtgcggggagggcgcaggctgggggagggattcctgcgggacctggccctgcggccgggggtggagaatttttgaatgctgtccctcccccagctagttgaacccccatcaccccgactctccgcttctagtgaaaaaactagcaaagtttggagtgaatcgcgacactttcttgaaagtttataagcccttgctgctaacaaagttctcttctgcttaggctgacaagagaatgctttgcaattacccaagggccaaactagtggtttaaattgaaaacaaaatgactactcatgcattgaaaccttaactatgaagatttatttcaggtcattggtgctgtttctccttgttgcccaaaccagacccgtctttaataaagttgttctccacccatttctgcatagtttgagaaactcttcagctgtagatcaaagacacttgaaatattcagctactgttcttacttcctatttattcaccagggaagcctgaagccagaatgccagacagcgcagacactattccatctcgcattttagttttaatgaaaatctctggtaggtagacatcatcgtttataaattaccaactcaacgtttgttttttgtttattttattttttgtagagatggggtcttgctgtattgcccaggctgttccctaactcttgcactcaagcaatcctccagcctaggcctccccacagtgctgggattacaggtgtgagctgttctgccctgcctcaaccaaaattttataggcctcatgcaaaagagttccagaaagactgagcacctgctatgtgtaatgttctctcttaggcttctatagtagagtacgacccttatggagtttgatacaggggaagagagaattaaaatacagtaaatgtataaattaggatgttctaaggacagacacaaatgaaccgcataggcttaaagaggaaagattccatcccctgagggtggagttctagagggaggaagagacattcgacctgaccttgaagggtgggtgcaacacatatgagcatgaaggggcccatgccaaatgtatagtgcagcaggagcaaaggggctaaggtgggaagttggaagactagcaaatgggccaatttgaagggagcataaagtcaggagatgagaatagtagggtggtgggaaggataggttttgaggccattaaatataagttgaaaaatggggccccactttcataggcccaatagtgcttcaaaagggaaatattggtgggttttgcttttcaacaagaacttaatataactagttgtgttttatagagataagcctggaaggggggattggaggagagcaatggttctctgtacattagaatctcctggagggctggtgtctgagtggcaccaccaaagattctgattcagctgttctggatcagaatctacagctcacacctgtaatcccagcactgttggaggcctaagccagaagattgcttgagcccaggagttagtgacaggcctgggcaacatagcaagatcccacctctacaaaatgaataaataaataaataaataaataaaaaacaaaatttgagttggtaatttataaactatggtgtctacctaccagagatttttcgttataattaaaatgtgatatggaataatgtattgtttggcaagctggcttcagggttcccaggtaaatagataaataaggaagtgcataatgtaagaacagtggctgacagtagcagtggcattttttatttttaaaaacattcctgataattctaatgagcagtcaaggtcgagaactactagaatagagagcagacatggggtaactggttaaggtattgcagtaggtcagagaggataacagggacccaaactctggaaccccagggatgagggagaagtcaaaggtgctaccagagtttgtgccacagctccactgtcccatggttgtagtttcatctactgataaagcagtgcaaagaggaagcgtgtggtggctgagatgggagtgagatttgaggaaagaacgcttatgggtaggaaatggacatgttgaccttaattttcatgttaggtaatgcccattgtgctctacagaacattcatgagttggatgactttgtatatgatctgtcctgctctccatttcaaaggcaagaccaccaaaattcacaagcttattatgttgtcactaatgtgtaagccaccagtttttctgcaagttggaagttttctcaacagtcaaatattcccccttctcactaatcttaaggttttaaagttatagctgcaaatctaaaaaaaaaagaaaaagtaaataaaacttattgacagaatgcctgatagtttatttacaggtttttgtttgtttgttttttgtttttctttgttttttattttgacacaaggtcttgctctgccgcccaagccagagtacagtggtacatcaaagctcactgcaatctcaaacacctaggcacaagcagtcctccctcctcagcctcctgagtagctgggactacagatgcatgctaccatgcccagctagtatttttatttcttgcagagacagggtctcactttgttgcccaggctaatctcaaactcccagcctcaagtgatgctcctgcctcagcctcccaaagtggtaggattatacacatgagccaccaccctcggcctactttacaatttgatgcaccttttctttacgtgactgtgatgcactttaatgggcagtgactttataaaatggtaactttattggatatgtggagccccaaatgggctgacgtgagaatgttggggtaggtggtgggtggctggatttagcaaagaaaaatgtaggctacccagttaactttgaatttcacatggatttttttttttttttttagtataagcatgaaatacttataccatacttttagcattaagcgtggaatttgggacataattatactaaaatatcattcattgtttatctcaaattaaaatatcactgggtaccctgtattttatcatatgttcgagtgccttctgtcagaatttggtgaccctttgagtctgttttaaaaaggagcatgtttggccggacacagtggctcacgtctgtaatcccagcactttgggaggctgaggcgggcagatcactagaggtcaggggttcaagaccagcctggccaacatggtgaaaccccgtctctaataaaaatacaaaaattagccaggtgtggtggtgcatccctgtaatcccagctacttgggaggctgagtcaggagaattgcttgaaccccagaggtagaggttgcagtgagccaagattgagccactggactccagcctggacaacagagaaagactccctcaaaaaaaaaagaaaaaaagcatgttcccacctccccataaggaaaggctcttcagaggaagttgaaggaacagaggctttatgtttgatttttgctttaatctgatgcctactgtttgattattcaatatttagagatggtactttggcaatcaagttatttctctccccaggttgcccacttcaatttttagtataaggatgtcccagagggataaatgccatcaaagttgtctttcttcttctgaactgtaactgggattccacaccctccttttccacccctccctagttgagcaataaaggggaaaataacagtatacaaatattcccaggccagttcctggtgtcaaggtacacagccatggatgaatcatgaggcttgagtgcatcagagacctaagcgtgggcaggaacccccagagtacccatgtgaatgttctgcttgctgcctcgcaccttttatgacaattcccacaagaagctatgtggtctgtttctacttctgaaagagcagcctttttcccttttttttttttttaaaccaccatcctttaaatcatttattatgtaactcttgtgtgctggtcagtcagtgtgtcaaaagtgtaaaaacttctttatttatttttttaatctatcttttaaaaaatattttctttctttttttcttttttcttcaaggcaggttcttgctctgtcacccaggctggagtgcagcagcacaatcatagctcattgtaacccagaacacctgggctcaagcaatcctcccacctcagcctcctaagcagtgaggactataggcatgcaccactacacctggctaattaaaaaaacatggccgggcacggtggctcattactataatcccagcactttgggaggctgaggcgggtggatacctgaggtcgggagttcaagaccagcctgaccaacatggtgaaaccccatctctactaaaaatacaaaattagccaggcacggtggcacatgcctgtaatcccagctactcaggaggctgaggcaggagaatcacttgaacccgggaggcggaggttgcagtgagccattgcactccagcctggcaacagagcgagactctgtctcaaaaaaaaaaaaacaaaaaaatttttttgtagagatgggggtcttgctgtgttgcccaggctgatctcaaacttctagccataagtgatcctaccgcatcaacttcccaaagcactgggattatgggtatgagctactgagccctgccaaatttctttatattaaaccaaaacgtacatttactgatatttggaaagaaagctcttttacttttatgccttcatccagtcttcatagatatcttcccttttacattataactgtaaatactgaggttagagaggttaactagttagttcaacagaataatataaatattgaataatataattaatgaataattagtgctgaacctgtcgcctcagccaggtctcctgattccaaatacagtttgccccagctccccacagtcttctagcttctctgccagtggagcaaattttccctaggtttacaggcctaagcacagattcttagttacttagtgcaagtattgccagagcccaaggggtgaattccaaagggtttttacaaggctatacataaaagataaagccctggcttgtatatcacttgcacataggagataaagccccagcagttgtatgtaaatttcaaaagcagagaagtatggcacaaagaaactcctgatagtaacactgtgttcccactttgcttaggggcatattggcaccgtagcatggtacacccttactgctacctgccatgaggccagataatagctagcagcccctggtctcattctactctggatgggtactgctgtttcctgaatgaaagacactgagattgatttcatgctaatgactgttggttaagagttcatgctttctattcacaatagcaaagacttggaaccaacccaaatgtccgtcaatgatagactggattaagaaaacgtggcacatatacaccatggaatactatgcagccataaaaaaggatgagttcatgtcctttgtagggacatggatgaagctggaaaccgtcattcttagcaaactattggaaggacagaaaaccaaacaccacatgttctcacttataggtgggaattgaacaatgagaacacttggatacaggaaggggaacatcacacaccggggcctcttgtggggtagggggaggggggagggatagcattaggagatatacctaatgtaaatgacgagttaatgggtgcagcagaccaacatggcacatgtatacatatgtaacaaacctgcacgttgtgcacatgtaccctagaacttaaagtataaaaaaaaaaaaaagttcatgctttgtggacaggtagcctgagttcattcatagctctactatttacctgaaaccttggactaattatttcacttttctgtgccccagtgttgtaatctgtaggatggggtactgcctgctccacagtgggactatgagaatgcttaaaataatgccaagcgcacagtcagctcaataaatgtcatctatgtagacaatgaaattcaagcataattccttaaacctttgtgccatacatccctttggcagtctggtaaagccttcattccttctcagcatcatgtttttaaatgagtaaaataaaatatataggattacacaggaaaccaattaaatactgctaccaagctatttaaaaatctatgatataatatgctttttaaattaaacccttaaatggatctagaggtaggtaaatgtctaacagcagatattttgaagttgcaatgaatgtaaatggcactttgagctatctacaactgaaatgcgatagaaaagtatctataatttctattagtgacagtcacaaatactactaatagtattgtggtttgttgcttatactcatcatcaaaggaaatactcaatttgagttaaaggtttaaataaagatgtatttttcccccatccaagttcatggatccctgaattctacccatggattccttggtcactggactccataggggtcacttggggaatgattgtgacaccaatgaaggaagccagcggatactgtttgctgtattatacctaccataggctcgtgatgaggaaataataaaataaataactgtaatgaaaaagaaaagaaaggaaaacaaaaggaacctaaaacagagaaggcaaatagctttccttttgagtgtcaattttaacagactccctgtggttgcgaaacaatgtgtctgaggctggctctgggttagagggagagtgctgttattgattagcaattcctgcatgacagcagagtggcaacagccatgcatctctgacctggcacagtcataagcatgttatagacataaagtgttagggaacaaataggctctagcaaaagtaaagagtgttcctcctctcatatcatcacttatatgtgtttataccatttatgttgtattttttacatgaatacttttagatttattaatctaatccaaaaaggtttgtatagctttctctatattaagagaaatatatgtatttcttaaatacacaaagttcttaaatctgatgccagcgaggattgcttccagccacaagtaacatatatcagattaatagtagttcattcaaagagggatttattttcctcacatgaaaaacagctctgtgggtgacccaatatagagcttgttcattgagccagtgattatatcaaggaactgggttcttcatatattttcattctttgatctccccctattgactttatagctgtatctttctcaaggatgcagaatggctgccgcagtctcaaacactgcgtgtgtgttcaaatcatgaagaaaggagattgagtgatgccagctagctctcttctcgtgactctcctttgtatctagaacacagtgtctttccccaaaacctgggtcatatgactacacctcaatacagcggagtctgggaaagcaaatatttgctttgcccaccactacaatagaaacgacaagggagaaagaaagggggttgggcatggcgttaattttgtcagccgctagggtctgccacccagaaaacagaagtccactaacaagcagggaactgattgttctgccagggaaaaagtctggcagtttcctactgaagaaatttggaagtcttgatggtccaggaaggataaaggcaaaaccttcattttcttttatcaaaaaggaaagccaagaaaaaaattagttaagtagaagttatgcacaaccctcatgtaactcttccatgttaatagcaggtaggctgcatatgaaaacatgatattatacaagaaaactagttgatgaagattgccctatttagcaccaattacttacgcaaacctaagttgactctgaaacaggaaccccatattaaacttttcaaacacatcagaatatgttactttgaacagattttatttaatccaaagagattatctttgaaaaaggtagatggtaaacatcgttatccctatttttgtatagtcaaataggcatagtagtaagttgtgtaaaattgacatccaaaccaatgcatgatactaaaacttggtgtacaaacagcagttacatcctattgctttgtatctacatctgtttctggagtcatataacatttgtagaatcttggaggtgttttaggctcatccttattttatccataaagaagactgacacctatagagattaactgacctgccaagggtcatggcagtttcactgctgagacaagaacacagatccctttacttctttctgagaaaagtacaaagtagtttaaagcaaaagcttccctgcttccagcacttctggctaagttgcgccgtgggaaaattgttttgtctgattcagttttctcatcttttaaactggaataatgctacctaatttacagggttgtttgaagaattaaatgaatgcatggaggtaaatcacttagaacagcggtaaattatacttttttattatttatttcctttgaccacccacaattatcatcagtgtcatcctcatcatcacaattaagattactaccacattaggctacataaactttttttttctctctctgttttataatttcaattttattttagattcaaggggtacatgtgcaggttttacatgggtatattgtctgatgctgaggtttggggaacaactgatgccatcacccaggtagtgagtatagtaccctatagtttttcagcccttgtctactcccttcccttccccttctagtagtccccagtgtctaccatcgtcatctttatgtccatgtgcaccattgtttagctcccagttaaagtgagaacatgcagtatttggttttctagcttatttttcctctcttaaatcacttctgtgacacgtaggccatgagatttattgtattttttaatgccttatttaaaaatttgtattatttaatacatttaatgcattattttttattatatttaaatattgatttatttgtactttttgccttattgctatattgtttcaaaaaatttaacattatttgagttacatgatttcaaatacatactgattaacattttaattagaaactttatgtctgatatgaattgccaaaatgtgtagttggtacaacctatgagtcattctgggttatctagaagaaactggtagcctgccccatactccagaagccttccccagtgtctagacctcagaagctgtcaggaatatgcacaggagaaggacacatggcaaatagctatttcgtctcttaaatgtatggtatgtgggaaccactgaaaaatgtaaagtttctacaaggtgctatttttattatttatggctctagagaacagagaaggtgaaaaatgtgagagagaagggaaagccaatagtatgtggccttcaaaacaaaagatcccacagatattgtcccaaactgcttcctggccctctagagtggagagggagggggaagacatcctattagagttcaacattctcttattatttccttcttttaattttctgggtatacaacagcaaatagttttgctgaagtagttacagaactagttggtgttctccaaccttcctattccaatacatactgtcatggatgggtacactaaaatctcagaattcactgctatatcactcatccatgtaaccaaaaaccacatgtacccccaaaagctattgaaataagataaatacattcttatttaaaaaaatactgtcatagggatgctaccttcttttcttttttgttagtaactatttgtgggatgtctttggtgtgtcaggctctgagcaatgccattttctcttggcttctttgcagtctctgtgtgaggcttacagtcatttttcacgtttgactcttcagaaggaagacagggctactggttctacatctggaactcttttcccacaacaccaacactgagaaatgtgacatggtgctgtgtttacatttgcataggaacttgcattataagttttatttgttgagttattggctttttttttttaataacccacatcagtatatagaactttgcaataggcatttttgttttaacttcatttctggtgcagttttattttcctacccttgtctttctattttctctttcatctgctttagacttaaactgtgttttatgtattgctgtaagcctctttaaaccctttctaaaacaaagcagggaatacataaacaaatagttttttgttttttgtttttttttctttgtaacagaaatcgacttaaagcctccagagaagtagaatctgtagaccttccacactgccacctgattaaaggaattggtatgtatatgaaaatgcttgttgggcacattgcattttttggccattaacattaaaacactcattaatggcattttagcatgaaattactgcttttcagtggataaatcacattagatcaacaaaaacctctttggtcaacctcttgatctgatgaaccctgtatttattcttctttcctaccctcactgtaaattattcttttttgtgtgtaattctatgtttagcatttgatttcttgcttgttttgtgacttctctgaactatttttgttgcgtctgtattgtttgtcaggtatggccgctgcagtctgtgttctgtgagccttgtggtcagctagtgaaggaagctttatgtaggcagtgacagcatttaccctgctcactactctataactaggatctgatcttatggctaacacgtaactgaccaatatggtttggttgtgtccccacccgaatctcatcttgaattgtagttcccataatccccacgtgttgtgggagggacccagtgagaggtcattgaatcatgaggtggttaccctgtgctgctgttctcgtgatagtgagtgagttctcatgagatctgatggttttataagggcttttcccccttttgctcggcacttctccttgctgccgccatgtgaagaagggtgtgttttcttccccttccaccaagattgtaagtttcctgaagcctccccaaccacacggaacagtgagtcaattaaacctctttcctttataaattacccggtctcaggtatgtctttattagcagcctgagaacggactgatgtaccggcacttcacaatatgtattgtaaaaacttgtttttattttatcttctaagctatgactgcagagggggagtctccctcttcccttgactttatgtaggatgtattgtggagtctgagtctttgagtaggggttcctaagagcaagccccaattttgctatagataaggagggatctgtccagattcttctccagcactgagggtctctctggtgtgtttgcagtttttctccaaggtagagtctgtgtcttgctgtcttttaccctttatcatctactaagtacatgtccctagtacataatagactagtagttagattatcaatgaacaataaatattggctttccttttttttaaattttaattttttttttttttttttttgagaggtggcctcactttgtcacccaggccagaatgcagtagcgcaatcttggctcactgcagccctgatatcctgggctcaagcgatcctcccgcctcgtcctcccaggtagctgagactacaggcacatgcccccactcatggctagttttttatttttgtagagacagggtcttgttatgttgtccaggctggtcttgaactcctggcctcaagcaatcctcccagcttggtctcccaaagtgctgggattgcaggcatgaggcactgagcccagccaatattggctttccttagatatggttcatggtatgattagaaacaaaaagaattagcagtcaaaacacctagtttctagttctattctgccacaatgtaaccttaggcaaagttggtttttgtatttgtcacctataatgatgagtttgtgattagactaatggtttttagactttaaaaagcctgggaccatttatttataatcttactctgagagccacagtgtggaaataactagactgtcattgagtcacttctagtcctttacaacaacatccttctctagaggtaggagagacaatttaatattttgttttactctttagaaattaaaactcgggttacatggaaatgttctcttctctgaataggtaacattgttaaacaagttttgagtgtccttccatctttttctttttatgaatactcctgtacataatttttaaaaacataagtgaggtcaaattatgcataatatttcaaaactagctttttgtacttaatactaggttttggaaacttatgtttgtacataatgttaccttttcttcacaactgcacagtattttttgtgcaaagttcatataaacagtgtatgtgcaaacaatatagaaagatataaaatggaaagtaaataaaaataaaaatctctcatcaaactcttcatcacccccaacagaaataaccccaaagataaagctcccttttttatctttcctgatagtttcagtgcatttgcaaacaaatatattgactctttttttcacaaatagaattttagtgtaaatatttcacaaccttcttcattcctaaaacagtgtgagcagctttccacatcagcatatatagttactttgttctttttaatattttcacattccatgatttatttaaccattccccttttaatgtacatttgggttgttacagttttttgcaactatgaacaaatcagtgaacatcattgctgttgagtttgtgtgtctgtagaatatgtccttaacaatgggattgttgttcccttagaatatgtgtttagagttttgacagtcattgctaagttgctctcaatttggcaacagtaataaactcagtacctcatagttgtaaccacattcactccagacagagttctcagcactcttttagtaaaaataaaccatcagttgacagtgccaccttcagagtttctctacaaataccttgcttgcctccctttctttttttcttcttttaaatcagcttcctcaggttgatctgcctctcattccttaggcatctgtttcctatgtgttctttctcctttttttcattgatacttttgtatttccccagttctacctcccctcccctagactggttggctgtcctggaatttcccttccttctttcaattgcccaaacactaagtgggaggaggcaaactcatatcaaatagcagattgactacatctgtgctggatcatgcagacagttcaagagtcccaagtaacttagcagcttcatcttgccttccagctgcaatcaagaagagccctctcagaactggtcactcagcaaaagccagatggcattagtaaaagatgttgggcaagggtgggagtttgggccagtgatctcttaggttacttttgctgctgagttaataattgtcacattattaaacagcccttggccctgggaagcccaccttctgtgaatacaagtctcagagtagacaatagggcacaaccagccatgttacatgacagactgccaagtgcattcctcttacaactcactgggatggagcgctcctcagagaaaaacaagcccagcaacatttgtattctgaacaggcatctgtctatgtttgtgacctttatgttgtgatgtgtgtgagctgctgtctggaattggaaagaatgaggaaatatgtcacctatggcccctcttgtgaagtgttaaatgcctctgaggcacttcaaaaggcaacagagcggagaggatgagtgattagaagcacatttgggatacatttttagatctaattagaattgtccttttttttttcttttttgcttttgccctgtggttagcacacaccatatgaacgtttgtcgaatgctatgttagtgatgcataatggttaataataacttttggttatatatctttaacaacagttgcttattcacaggtctttgataagaagaaataacaatgtgctggacacacatttctatacaggcaaaagtgactttttatgatagagagggctgtttcttattttctgttttgaaaacagtagtagctatgcacttgaggccaactaatccctctaagaggtgaaccttccttcccccttgcccttgattcccatcaacacacacatacatatgcacacactaccgtgcttcagtcaccatcactggaagtgaactatgtgcaacttttgggtgctttatatatatcatatcatattgtgtctgctttaataaatcatagttattgactacatatcatacaggatgtgtgccttctgtgggtcagaaaataagttcactatttagtccttttcaaaaattccttcccgatctatcttatagacagaaactaagcttttatacacccaagatttggcagattaacatctgcatattaaaatgtcaagagctagttaactttatttgaggcttaaaagttaaaaaatctgattttctaaatgtctggccttcaaaatttgagtggactgtctttctcaagataactaacaattttatgcacttggcagtcaagacctttacaataactgctgcttgggagattgaggggaaaaaagcattaaagtttgtggcccttataatcaagtactttacagtctactgatgggagaaaaggaaaacaaaacaaaacaaaaaaccactgtgagatatagatatgtcttttctttctctagcagataagtacctgaggctcaaggaggttaagcaacttttgcaaattcactttccaatatagtgtcttttcccagggtgactaatgtatatacttgatgagtgaaccagaaaagtaggaaataatatgttacatatgggatgctctattgggtatagtaaaggatgcgttgctgttataaaattatagtcacttagaaaagagatgtttatttttatttttctctcatcagtcttaaggtaagtgaatggcctagggtagttaggtgactgtgttccatatggtcattcaggggcaaatgctgatgaagcaacacagctgtcttcatctaagactagaactctgcttgttgccatttcccagcaggaaggggttgaaagaaaatttatgtagatttttttttctacccagtagttgcatatatattgtattctcacatcctattgacccaaacttagacatatggccacatctgtcagccagaaagggtgggcaatgttatctatagctgtgttgctacgtgcctattgctaaaaaggctaaaaaggaagaaggggaacatggatgctggtgaacacttggccacctctgacacagataattgctaaagtaataagaagagatggaaattaaatgtgctaagctaggagactttctaaagaaagggtttgtcatgctacgctgtgccattcatgtgtttttttgctcatgctgttccttgtgcctggaaattctccccctaattcccctgagcagtggatgcagtggataccctccccagatcccccccaacttccctgagtgttggctaccaaaagctctgagtgcacccagggagctaagtcctcctgcccacaggcaataatggactgacacggggtagacttaaagaaataagaggcacatcaatcaattgaaatgtgtgggaccttacctggactctgaattaaacaaactgtaattttttaaagctacaccttttaaacatgattggctatttgaacactaactagatatttgatgatattgaggaattattgtgaatttttagtgtagtaatgatattgtggtttgtataaatatatttagggataatatgatgcctcagatttgctttaaaataacacaggatgaggataagtggtaggactgcaagggaaacaagactggccatgagctgataactgttgaaggtgggtactgggtatataagggctcaccacaccattctcttgatttgtgtctatttcccataataaaaagtttaaagagagagaaccgatgaaggggagggagagagtcaagcacacaataagagtgacaaacagtgccaaatcagcccacagtattaagttttcacatatttacataaatatcacctggaatgcaatattgaaattaatgtatatcactagaataaaaaaagtaaagatttaataaatttgttttgaaataaaataagttgaaatacgaaaaagacagaaaaggttttgaaagaggttttaaagaaaagtgcaggatattcattggtaaagatgttggtgagaggcttggaagcaaaacttcaggggaaaaagacaacatatggaattgaccacaattgaatttacaagtgaagtggctttacagaggaatcaggggatgtttctgagagaggaaattcattaaattctaacttgaatattttctgtttgcctttaagtcagagcaaaggctttgagtcccagcttcccagtttgtgaccttgagcaattgcttaacttttccaaagcctccaatagtcttcactctaaaataaaagataatcatatgagatattgtatgcagggtatttacaaggagcctggtacttggtgtacctaatgtatgttagttattattattaaattagaggagcaaaaatttctctagcattgactgctcctgacataatcacaccgaagaggggatacacgatgataaaaccttcctgcagtagtggctatagaaatgatgacggggagaagatctggaaaatattccaaagaaggctacagatagatacattttttccattggaattaggcaatggagttaaacagaagttacaatatggttgaaataaatgtatttttttaaaaaaagatttctctttccttaattattaaaaaatatacaattttgtagaaaattttaaacaaagtataaagaaaaaaataaaaatcattcataatcctatcaaagaagcattgttaattttttctatatatcttctttttccacgtgtatacttggaaattaaattttctaaaataattttcaggaaaaacaaattttaattaattgagcttctactaaataggactgaaaagcaaaacctggactagaattctctctcggtgtgtgtgtgtgtgtgtgtgtgtgtgtgtgtgtgtctgtgtgtacatgtgtatgtgctgtgtatacatgtgtatgtggtgtagcgttcccctgattcttaacttattaccagtggacaaccaccgtggaactagagtctagtcattcttaacctttttgggggaatcacagtctcttttttgaatctgatgaaaatcaaggaccgtttttacagaaacgttctcatctgtgcatacatgagacattttgcattgcatagaatttccgagggttcacagatactttgaagcccaaaagtgatccacagaccccagattgagaactcctccgctatgccatgcttaagcttatttctgtgtatcttctttctgaggagcaggcagatgggtcatctttacaatgtgaagttcttggcatttttattttgttttgtttttctgcactacgatggagcaagcaacactggaggcaactggctaaatgcaaactcatgaagcaagaccaaaatggctggatagatagatgctgtttggttttgacaacctagaaataaccttgaagaaatcctatggagaagtcttaaagaggaagattggattttgtagactcaaagaatgtgtcatggtttggcttaatctaagccatttttattcttcttttcttgtgtttgggtctattatctgtctgtagaatttatacagtgagactgctggggaaagtcttatgtctaattatttgctgtgctgtgtggagtgtactgcagacagtcaataaacaatcaatagtaattgtagcctgcctcagagacaggagttagaaacttcaactggcttaggtgcatggtatttttcattaattttcttctgctagtttttttctctaatttaaagcctaaatttaaagattaaatagaaaagctttctttgcttatgagcacaagtaggcactgtttttaaaagaaggaatatataatcccaggtgttttacctctgttaatgagaaagatgtctgtttgcttcagattgaatgagcaaagaagaggacaaggatatttgcatggttaaatgcctatgagcccttccttcagaaagtaatattcccctgatgtcaattacttttatacggacatctggatgtttatcatgagagtgtacagatgtcaactttttcagtattatagctggaaatgtggtgataacttgactttgatttgagtaaacataaaatatctaacatttaaagtcagaagttcacttcaggaaggggtttaaactgacatttattaaaaagaatggttccttggaaaaaacatcagaaccatccctaaagatacagtcactctgataaagtaaacagagtcccagttatgctctgtgtaacaaataacagaacttgaacatgacatttatctgttccttaaacttacagaagctggctctgaagatattgacatacttcccaatggtctggctttttttagtgtggtgagtgtcttcttccttccccaaattcagcagaggagatacaagggtatttgatgagggctgcagaacagtaagttgcttttaaaattcattttccaaaatgcattctgaagaaaagagaggtcaaacaagatcttggaaaacttcctccagcttttctaaatgtagagatgaagactctttgcccattgagatagtgttctttatttccccattgcattgcactaaaatattccaatgcaatctgtgttttgttttgttttttcttttttaattttttttattttttgagacggagtcttgttctggttgccccggctggagtgcagtggcatgatctcagcttactgcaacctccgcctcccgggttcaagcaattcttttgcctcagcctcccgagtagctgggattacaggcgcccgccaccatgcccggctaatttttgtatttttagtagagatggggtttcgccgtgttggccaggctggtctcaaacacctgacctcaggtgatcgcctgcctcagcctcccaaagtgctggcattacgggagtgagccaccacgcccagcgcaatctgtgttttaaatgtgcactattaagagggatatttgaggtcttactgtggatactcaatactaacattatactattttaaatacagcatctactcatctttctattactattcaacttgaagcaaatattcttgccattattatttattttcaaatattataccaaccttgcccttttgctttctttcttttttcccctgaatagccaatcataagtggaaagtcattgagtttatttacacccttcattttgccttgattcttgtaagctgaaaaacaatatcctttctgggtatacaatagaaagactttaaaaacaattggcttgtgaatattgttgtgaatattgttgaaactagcttgtaacaatgtccattctaattggaaatccagataaggggacagatgaggaggttctgaccacctacctccctggcttgggcagacataggagttcttggcatcttcataggtccagtttttctggaggaagaagtaaccaactctgacacctgactgtaattattccatttcctctcaacatccattattttcaggctctgagactcaagagggatgtgaaatactgggagatacttagaagggagtcaccacactaataaaatagttgttagacttatgagaaaggtgagagaactcaggttggagtagaatgagaattagaacactcttcaggttcctgatggtttttatgtgaaagacagtgagcagctggttattaccactgaggcaataaagagatactgtgggctttagcagaaacaccagtatatgtatttagtttttaaaataaggttttaaaaggaatgttttatttaattgcctacacagaatgaataaagtgatatttatagtaggactctgggtttgtttaggagcacatgcttgcacatgtgtggcttaggaaaaaccactgggaccactagtctaaaatattcataagtaaagatgcaaacattctgaataaagtagaaggcagttgcattgatttttttatttgtttatttgtgttttttgttgttgttttgcaaggatgtgttcttggagatttttataatctagaattcacctatttcaagatttctctccagcccccatagtaataaatctgaagtaggagggatgaggtctccaaacacataaatctacagccattttagcttgggggcatgttatagttacaaagatcttatagccatatcaatagaactttttctgctttttttctgttaccctcctttgctcatttgactttttttaaaatttagaaacattcccagtttgctgctgtttttcatttacttggcattgtctctaataaaacctagagtgtactctcttctaaataaagaggtcctacattgtggaggttgttcattcttcttcctagcattttagctcatctaacccaacctattttacagttatgggttgagggtcacctcaaaactaatgtcacacttcatgaagaattggatgacatagaataaaatataaaaaatgtaaacaatgtgagtgtgcttaacaccactgaactgtacacttaaaaatggtgaaagtgatgaatgttgtatgtattttatcataattaaaaataaatttttaaaaagagaaaaaatacttaaataaataaggagtgcgaacataaccatgactagttatcaccatctgatagtgcttcctttgcatgtaaatcatgcttttgttttggggacattcataaagaatagggattaactgaagtggcactgccatgtaacaatagcataattccagtttgttctacttaccaggcttgccctccatgaaaatatacaattgtagataatcttttttaattggagagatttcctcttatgtccaattttatacataaagtaagacttttttattgtgtgcctaaatttgtgtaaatatgactgcatcgtattagtaaactgaattaggtagtgcattcacataaaatttaacatcaccaagaaggctttaccttaagaatgtaatgatgaatcaccattttagatagactgataggtaatttattaactgatttaaaagagaaaagacctatatcatctcagtgagtaccaaaaagcatttaataaaattcaatactcattcctaaagttccaagcaaactagaaagataaggaaaattcccacaaaactacagcaaacatcattcttgatggtgaagcattggctgcatttgcattaatgctcagaacaggaagaaaatacccaacaccacaaccatcagtaatctactagagttcttagtaattcagtaaaacgagaaaaagaaatgtgagatagaaaagaaaaagacaaaactgtcattagagaagcagggactggctcaattgcccaggctgatgtgcagtagtgcaatcatagctcactgcagcctgaactcctaaactcctgcgctcaagaggtccttccacctcagccttccgagcagctaggactacaagtgctcaccataacactcagctaatttttttttttttttttttttttttttttgtagagacagagtcttgctatgttgcccaggctggtctcaaactgctggcctcaagcagtcctcccacgtcagcctcccaaagtgctggaattataggcatgagccaccaggcctgacctaaagctgtagtaatttaaaaagtgttatattggcacaggaatagacatgagacattaaaataacaaaacagagagtccctaaatagaccaatatgtaaatgtcagagatctagcacatgataaaggtgatattttgaatcagtgggagaaggatggactgtatgccaggcactgttccaggcactgggatctagcagtgaacaaatttccacagtcagtatgtagatgtcacttttctccaccctcagctctccctggaatcacctagtccaccaaccttctgattactctctgaagagaataaatccctgatcttcttttcagttattttcaggctttcagtattccacctccccgttattattttttctgttatcttttctctgttttttgagtttttgtggctttatgccactactttaaccacaatctctatttatccttcatgtacagttcccatgttagtccataaaaatacttaagcttttgtatttaacatttttcaccgttttggaaagggtctaaaattcccaggactccacagctttgcaccagataagcctggaggaatactaatgatggatctaaaagaagaaaaaccaagggcacgggaattaagaatcagtcgtgggtttgatttggcctcattcaatccacatggcatcagcactttcatagacaacggtaagagccaatgggctaccaacatttagtaacgtgtgatggttcacaaatgactgtgaaaaatagatttggatcatatttctaggaagagaagaacaattaactcatgagtgatttctgtattcttcattacaaagaacttgttcatttgcctcttcagctggcagtaagttatgctacattttgaaattcctaacaggtaacacctgaaagaatgtttagatttcataatcttttcatatacctacgatcatcacatttaaaaaagaactgtatttttgaattaaagtagaaacagattatgcatgaattctgtatatggagtaggaaacactttcttaaaggtcagggagccaatgatcagaaataacaccagacggacagcaataggaaagacagagaatgatctgttaggtcgtctaacagcttatacattcaacctttccttgcctgtggtatttaaatgtcagtgcctgcccagaggtcccgtagttatgtcttgtaaattaactctgttctttcaattctttagatgacacagtttatctctttgttgtaaaccacccagaattcaagaatacagtggaaatttttaaatttgaagaagcagaaaattctctgttgcatctgaaaacagtcaaacatgagcttcttccaaggt

SEQ ID NO: 13504 - DNA, 566 bp, Homo sapiens
atggggcggctggtggctgtgggcttgctggggatcgcgctggcgctcctgggcgagaggcttctggcactcagaaatcgacttaaagcctccagagaagtagaatctgtagaccttccacactgccacctgattaaaggaattgaagctggctctgaagatattgacatacttcccaatggtctggctttttttagtgtggtgagtgtcttcttccttccccaaattcagcagaggagatacaagggtatttgatgagggctgcagaacaggtctaaaattcccaggactccacagctttgcaccagataagcctggaggaatactaatgatggatctaaaagaagaaaaaccaagggcacgggaattaagaatcagtcgtgggtttgatttggcctcattcaatccacatggcatcagcactttcatagacaacgatgacacagtttatctctttgttgtaaaccacccagaattcaagaatacagtggaaatttttaaatttgaagaagcagaaaattctctgttgcatctgaaaacagtcaaacatgagcttcttccaaggt

SEQ ID NO: 13505 - DNA, 23280 bp, Homo sapiens
accgcccacggagctgctggccaggccggagcgaggcagcgcgcccggctcccgcgccatggggcggctggtggctgtgggcttgctggggatcgcgctggcgctcctgggcgagaggcttctggcactcaggtaggtgggactcccgcgcgcccctcctcggcggtccccaggctcggggtggccgcgtggtgcggggagggcgcaggctgggggagggattcctgcgggacctggccctgcggccgggggtggagaatttttgaatgctgtccctcccccagctagttgaacccccatcaccccgactctccgcttctagtgaaaaaactagcaaagtttggagtgaatcgcgacactttcttgaaagtttataagcccttgctgctaacaaagttctcttctgcttaggctgacaagagaatgctttgcaattacccaagggccaaactagtggtttaaattgaaaacaaaatgactactcatgcattgaaaccttaactatgaagatttatttcaggtcattggtgctgtttctccttgttgcccaaaccagacccgtctttaataaagttgttctccacccatttctgcatagtttgagaaactcttcagctgtagatcaaagacacttgaaatattcagctactgttcttacttcctatttattcaccagggaagcctgaagccagaatgccagacagcgcagacactattccatctcgcattttagttttaatgaaaatctctggtaggtagacatcatcgtttataaattaccaactcaacgtttgttttttgtttattttattttttgtagagatggggtcttgctgtattgcccaggctgttccctaactcttgcactcaagcaatcctccagcctaggcctccccacagtgctgggattacaggtgtgagctgttctgccctgcctcaaccaaaattttataggcctcatgcaaaagagttccagaaagactgagcacctgctatgtgtaatgttctctcttaggcttctatagtagagtacgacccttatggagtttgatacaggggaagagagaattaaaatacagtaaatgtataaattaggatgttctaaggacagacacaaatgaaccgcataggcttaaagaggaaagattccatcccctgagggtggagttctagagggaggaagagacattcgacctgaccttgaagggtgggtgcaacacatatgagcatgaaggggcccatgccaaatgtatagtgcagcaggagcaaaggggctaaggtgggaagttggaagactagcaaatgggccaatttgaagggagcataaagtcaggagatgagaatagtagggtggtgggaaggataggttttgaggccattaaatataagttgaaaaatggggccccactttcataggcccaatagtgcttcaaaagggaaatattggtgggttttgcttttcaacaagaacttaatataactagttgtgttttatagagataagcctggaaggggggattggaggagagcaatggttctctgtacattagaatctcctggagggctggtgtctgagtggcaccaccaaagattctgattcagctgttctggatcagaatctacagctcacacctgtaatcccagcactgttggaggcctaagccagaagattgcttgagcccaggagttagtgacaggcctgggcaacatagcaagatcccacctctacaaaatgaataaataaataaataaataaataaaaaacaaaatttgagttggtaatttataaactatggtgtctacctaccagagatttttcgttataattaaaatgtgatatggaataatgtattgtttggcaagctggcttcagggttcccaggtaaatagataaataaggaagtgcataatgtaagaacagtggctgacagtagcagtggcattttttatttttaaaaacattcctgataattctaatgagcagtcaaggtcgagaactactagaatagagagcagacatggggtaactggttaaggtattgcagtaggtcagagaggataacagggacccaaactctggaaccccagggatgagggagaagtcaaaggtgctaccagagtttgtgccacagctccactgtcccatggttgtagtttcatctactgataaagcagtgcaaagaggaagcgtgtggtggctgagatgggagtgagatttgaggaaagaacgcttatgggtaggaaatggacatgttgaccttaattttcatgttaggtaatgcccattgtgctctacagaacattcatgagttggatgactttgtatatgatctgtcctgctctccatttcaaaggcaagaccaccaaaattcacaagcttattatgttgtcactaatgtgtaagccaccagtttttctgcaagttggaagttttctcaacagtcaaatattcccccttctcactaatcttaaggttttaaagttatagctgcaaatctaaaaaaaaaagaaaaagtaaataaaacttattgacagaatgcctgatagtttatttacaggtttttgtttgtttgttttttgtttttctttgttttttattttgacacaaggtcttgctctgccgcccaagccagagtacagtggtacatcaaagctcactgcaatctcaaacacctaggcacaagcagtcctccctcctcagcctcctgagtagctgggactacagatgcatgctaccatgcccagctagtatttttatttcttgcagagacagggtctcactttgttgcccaggctaatctcaaactcccagcctcaagtgatgctcctgcctcagcctcccaaagtggtaggattatacacatgagccaccaccctcggcctactttacaatttgatgcaccttttctttacgtgactgtgatgcactttaatgggcagtgactttataaaatggtaactttattggatatgtggagccccaaatgggctgacgtgagaatgttggggtaggtggtgggtggctggatttagcaaagaaaaatgtaggctacccagttaactttgaatttcacatggatttttttttttttttttagtataagcatgaaatacttataccatacttttagcattaagcgtggaatttgggacataattatactaaaatatcattcattgtttatctcaaattaaaatatcactgggtaccctgtattttatcatatgttcgagtgccttctgtcagaatttggtgaccctttgagtctgttttaaaaaggagcatgtttggccggacacagtggctcacgtctgtaatcccagcactttgggaggctgaggcgggcagatcactagaggtcaggggttcaagaccagcctggccaacatggtgaaaccccgtctctaataaaaatacaaaaattagccaggtgtggtggtgcatccctgtaatcccagctacttgggaggctgagtcaggagaattgcttgaaccccagaggtagaggttgcagtgagccaagattgagccactggactccagcctggacaacagagaaagactccctcaaaaaaaaaagaaaaaaagcatgttcccacctccccataaggaaaggctcttcagaggaagttgaaggaacagaggctttatgtttgatttttgctttaatctgatgcctactgtttgattattcaatatttagagatggtactttggcaatcaagttatttctctccccaggttgcccacttcaatttttagtataaggatgtcccagagggataaatgccatcaaagttgtctttcttcttctgaactgtaactgggattccacaccctccttttccacccctccctagttgagcaataaaggggaaaataacagtatacaaatattcccaggccagttcctggtgtcaaggtacacagccatggatgaatcatgaggcttgagtgcatcagagacctaagcgtgggcaggaacccccagagtacccatgtgaatgttctgcttgctgcctcgcaccttttatgacaattcccacaagaagctatgtggtctgtttctacttctgaaagagcagcctttttcccttttttttttttttaaaccaccatcctttaaatcatttattatgtaactcttgtgtgctggtcagtcagtgtgtcaaaagtgtaaaaacttctttatttatttttttaatctatcttttaaaaaatattttctttctttttttcttttttcttcaaggcaggttcttgctctgtcacccaggctggagtgcagcagcacaatcatagctcattgtaacccagaacacctgggctcaagcaatcctcccacctcagcctcctaagcagtgaggactataggcatgcaccactacacctggctaattaaaaaaacatggccgggcacggtggctcattactataatcccagcactttgggaggctgaggcgggtggatacctgaggtcgggagttcaagaccagcctgaccaacatggtgaaaccccatctctactaaaaatacaaaattagccaggcacggtggcacatgcctgtaatcccagctactcaggaggctgaggcaggagaatcacttgaacccgggaggcggaggttgcagtgagccattgcactccagcctggcaacagagcgagactctgtctcaaaaaaaaaaaaacaaaaaaatttttttgtagagatgggggtcttgctgtgttgcccaggctgatctcaaacttctagccataagtgatcctaccgcatcaacttcccaaagcactgggattatgggtatgagctactgagccctgccaaatttctttatattaaaccaaaacgtacatttactgatatttggaaagaaagctcttttacttttatgccttcatccagtcttcatagatatcttcccttttacattataactgtaaatactgaggttagagaggttaactagttagttcaacagaataatataaatattgaataatataattaatgaataattagtgctgaacctgtcgcctcagccaggtctcctgattccaaatacagtttgccccagctccccacagtcttctagcttctctgccagtggagcaaattttccctaggtttacaggcctaagcacagattcttagttacttagtgcaagtattgccagagcccaaggggtgaattccaaagggtttttacaaggctatacataaaagataaagccctggcttgtatatcacttgcacataggagataaagccccagcagttgtatgtaaatttcaaaagcagagaagtatggcacaaagaaactcctgatagtaacactgtgttcccactttgcttaggggcatattggcaccgtagcatggtacacccttactgctacctgccatgaggccagataatagctagcagcccctggtctcattctactctggatgggtactgctgtttcctgaatgaaagacactgagattgatttcatgctaatgactgttggttaagagttcatgctttctattcacaatagcaaagacttggaaccaacccaaatgtccgtcaatgatagactggattaagaaaacgtggcacatatacaccatggaatactatgcagccataaaaaaggatgagttcatgtcctttgtagggacatggatgaagctggaaaccgtcattcttagcaaactattggaaggacagaaaaccaaacaccacatgttctcacttataggtgggaattgaacaatgagaacacttggatacaggaaggggaacatcacacaccggggcctcttgtggggtagggggaggggggagggatagcattaggagatatacctaatgtaaatgacgagttaatgggtgcagcagaccaacatggcacatgtatacatatgtaacaaacctgcacgttgtgcacatgtaccctagaacttaaagtataaaaaaaaaaaaaagttcatgctttgtggacaggtagcctgagttcattcatagctctactatttacctgaaaccttggactaattatttcacttttctgtgccccagtgttgtaatctgtaggatggggtactgcctgctccacagtgggactatgagaatgcttaaaataatgccaagcgcacagtcagctcaataaatgtcatctatgtagacaatgaaattcaagcataattccttaaacctttgtgccatacatccctttggcagtctggtaaagccttcattccttctcagcatcatgtttttaaatgagtaaaataaaatatataggattacacaggaaaccaattaaatactgctaccaagctatttaaaaatctatgatataatatgctttttaaattaaacccttaaatggatctagaggtaggtaaatgtctaacagcagatattttgaagttgcaatgaatgtaaatggcactttgagctatctacaactgaaatgcgatagaaaagtatctataatttctattagtgacagtcacaaatactactaatagtattgtggtttgttgcttatactcatcatcaaaggaaatactcaatttgagttaaaggtttaaataaagatgtatttttcccccatccaagttcatggatccctgaattctacccatggattccttggtcactggactccataggggtcacttggggaatgattgtgacaccaatgaaggaagccagcggatactgtttgctgtattatacctaccataggctcgtgatgaggaaataataaaataaataactgtaatgaaaaagaaaagaaaggaaaacaaaaggaacctaaaacagagaaggcaaatagctttccttttgagtgtcaattttaacagactccctgtggttgcgaaacaatgtgtctgaggctggctctgggttagagggagagtgctgttattgattagcaattcctgcatgacagcagagtggcaacagccatgcatctctgacctggcacagtcataagcatgttatagacataaagtgttagggaacaaataggctctagcaaaagtaaagagtgttcctcctctcatatcatcacttatatgtgtttataccatttatgttgtattttttacatgaatacttttagatttattaatctaatccaaaaaggtttgtatagctttctctatattaagagaaatatatgtatttcttaaatacacaaagttcttaaatctgatgccagcgaggattgcttccagccacaagtaacatatatcagattaatagtagttcattcaaagagggatttattttcctcacatgaaaaacagctctgtgggtgacccaatatagagcttgttcattgagccagtgattatatcaaggaactgggttcttcatatattttcattctttgatctccccctattgactttatagctgtatctttctcaaggatgcagaatggctgccgcagtctcaaacactgcgtgtgtgttcaaatcatgaagaaaggagattgagtgatgccagctagctctcttctcgtgactctcctttgtatctagaacacagtgtctttccccaaaacctgggtcatatgactacacctcaatacagcggagtctgggaaagcaaatatttgctttgcccaccactacaatagaaacgacaagggagaaagaaagggggttgggcatggcgttaattttgtcagccgctagggtctgccacccagaaaacagaagtccactaacaagcagggaactgattgttctgccagggaaaaagtctggcagtttcctactgaagaaatttggaagtcttgatggtccaggaaggataaaggcaaaaccttcattttcttttatcaaaaaggaaagccaagaaaaaaattagttaagtagaagttatgcacaaccctcatgtaactcttccatgttaatagcaggtaggctgcatatgaaaacatgatattatacaagaaaactagttgatgaagattgccctatttagcaccaattacttacgcaaacctaagttgactctgaaacaggaaccccatattaaacttttcaaacacatcagaatatgttactttgaacagattttatttaatccaaagagattatctttgaaaaaggtagatggtaaacatcgttatccctatttttgtatagtcaaataggcatagtagtaagttgtgtaaaattgacatccaaaccaatgcatgatactaaaacttggtgtacaaacagcagttacatcctattgctttgtatctacatctgtttctggagtcatataacatttgtagaatcttggaggtgttttaggctcatccttattttatccataaagaagactgacacctatagagattaactgacctgccaagggtcatggcagtttcactgctgagacaagaacacagatccctttacttctttctgagaaaagtacaaagtagtttaaagcaaaagcttccctgcttccagcacttctggctaagttgcgccgtgggaaaattgttttgtctgattcagttttctcatcttttaaactggaataatgctacctaatttacagggttgtttgaagaattaaatgaatgcatggaggtaaatcacttagaacagcggtaaattatacttttttattatttatttcctttgaccacccacaattatcatcagtgtcatcctcatcatcacaattaagattactaccacattaggctacataaactttttttttctctctctgttttataatttcaattttattttagattcaaggggtacatgtgcaggttttacatgggtatattgtctgatgctgaggtttggggaacaactgatgccatcacccaggtagtgagtatagtaccctatagtttttcagcccttgtctactcccttcccttccccttctagtagtccccagtgtctaccatcgtcatctttatgtccatgtgcaccattgtttagctcccagttaaagtgagaacatgcagtatttggttttctagcttatttttcctctcttaaatcacttctgtgacacgtaggccatgagatttattgtattttttaatgccttatttaaaaatttgtattatttaatacatttaatgcattattttttattatatttaaatattgatttatttgtactttttgccttattgctatattgtttcaaaaaatttaacattatttgagttacatgatttcaaatacatactgattaacattttaattagaaactttatgtctgatatgaattgccaaaatgtgtagttggtacaacctatgagtcattctgggttatctagaagaaactggtagcctgccccatactccagaagccttccccagtgtctagacctcagaagctgtcaggaatatgcacaggagaaggacacatggcaaatagctatttcgtctcttaaatgtatggtatgtgggaaccactgaaaaatgtaaagtttctacaaggtgctatttttattatttatggctctagagaacagagaaggtgaaaaatgtgagagagaagggaaagccaatagtatgtggccttcaaaacaaaagatcccacagatattgtcccaaactgcttcctggccctctagagtggagagggagggggaagacatcctattagagttcaacattctcttattatttccttcttttaattttctgggtatacaacagcaaatagttttgctgaagtagttacagaactagttggtgttctccaaccttcctattccaatacatactgtcatggatgggtacactaaaatctcagaattcactgctatatcactcatccatgtaaccaaaaaccacatgtacccccaaaagctattgaaataagataaatacattcttatttaaaaaaatactgtcatagggatgctaccttcttttcttttttgttagtaactatttgtgggatgtctttggtgtgtcaggctctgagcaatgccattttctcttggcttctttgcagtctctgtgtgaggcttacagtcatttttcacgtttgactcttcagaaggaagacagggctactggttctacatctggaactcttttcccacaacaccaacactgagaaatgtgacatggtgctgtgtttacatttgcataggaacttgcattataagttttatttgttgagttattggctttttttttttaataacccacatcagtatatagaactttgcaataggcatttttgttttaacttcatttctggtgcagttttattttcctacccttgtctttctattttctctttcatctgctttagacttaaactgtgttttatgtattgctgtaagcctctttaaaccctttctaaaacaaagcagggaatacataaacaaatagttttttgttttttgtttttttttctttgtaacagaaatcgacttaaagcctccagagaagtagaatctgtagaccttccacactgccacctgattaaaggaattggtatgtatatgaaaatgcttgttgggcacattgcattttttggccattaacattaaaacactcattaatggcattttagcatgaaattactgcttttcagtggataaatcacattagatcaacaaaaacctctttggtcaacctcttgatctgatgaaccctgtatttattcttctttcctaccctcactgtaaattattcttttttgtgtgtaattctatgtttagcatttgatttcttgcttgttttgtgacttctctgaactatttttgttgcgtctgtattgtttgtcaggtatggccgctgcagtctgtgttctgtgagccttgtggtcagctagtgaaggaagctttatgtaggcagtgacagcatttaccctgctcactactctataactaggatctgatcttatggctaacacgtaactgaccaatatggtttggttgtgtccccacccgaatctcatcttgaattgtagttcccataatccccacgtgttgtgggagggacccagtgagaggtcattgaatcatgaggtggttaccctgtgctgctgttctcgtgatagtgagtgagttctcatgagatctgatggttttataagggcttttcccccttttgctcggcacttctccttgctgccgccatgtgaagaagggtgtgttttcttccccttccaccaagattgtaagtttcctgaagcctccccaaccacacggaacagtgagtcaattaaacctctttcctttataaattacccggtctcaggtatgtctttattagcagcctgagaacggactgatgtaccggcacttcacaatatgtattgtaaaaacttgtttttattttatcttctaagctatgactgcagagggggagtctccctcttcccttgactttatgtaggatgtattgtggagtctgagtctttgagtaggggttcctaagagcaagccccaattttgctatagataaggagggatctgtccagattcttctccagcactgagggtctctctggtgtgtttgcagtttttctccaaggtagagtctgtgtcttgctgtcttttaccctttatcatctactaagtacatgtccctagtacataatagactagtagttagattatcaatgaacaataaatattggctttccttttttttaaattttaattttttttttttttttttttgagaggtggcctcactttgtcacccaggccagaatgcagtagcgcaatcttggctcactgcagccctgatatcctgggctcaagcgatcctcccgcctcgtcctcccaggtagctgagactacaggcacatgcccccactcatggctagttttttatttttgtagagacagggtcttgttatgttgtccaggctggtcttgaactcctggcctcaagcaatcctcccagcttggtctcccaaagtgctgggattgcaggcatgaggcactgagcccagccaatattggctttccttagatatggttcatggtatgattagaaacaaaaagaattagcagtcaaaacacctagtttctagttctattctgccacaatgtaaccttaggcaaagttggtttttgtatttgtcacctataatgatgagtttgtgattagactaatggtttttagactttaaaaagcctgggaccatttatttataatcttactctgagagccacagtgtggaaataactagactgtcattgagtcacttctagtcctttacaacaacatccttctctagaggtaggagagacaatttaatattttgttttactctttagaaattaaaactcgggttacatggaaatgttctcttctctgaataggtaacattgttaaacaagttttgagtgtccttccatctttttctttttatgaatactcctgtacataatttttaaaaacataagtgaggtcaaattatgcataatatttcaaaactagctttttgtacttaatactaggttttggaaacttatgtttgtacataatgttaccttttcttcacaactgcacagtattttttgtgcaaagttcatataaacagtgtatgtgcaaacaatatagaaagatataaaatggaaagtaaataaaaataaaaatctctcatcaaactcttcatcacccccaacagaaataaccccaaagataaagctcccttttttatctttcctgatagtttcagtgcatttgcaaacaaatatattgactctttttttcacaaatagaattttagtgtaaatatttcacaaccttcttcattcctaaaacagtgtgagcagctttccacatcagcatatatagttactttgttctttttaatattttcacattccatgatttatttaaccattccccttttaatgtacatttgggttgttacagttttttgcaactatgaacaaatcagtgaacatcattgctgttgagtttgtgtgtctgtagaatatgtccttaacaatgggattgttgttcccttagaatatgtgtttagagttttgacagtcattgctaagttgctctcaatttggcaacagtaataaactcagtacctcatagttgtaaccacattcactccagacagagttctcagcactcttttagtaaaaataaaccatcagttgacagtgccaccttcagagtttctctacaaataccttgcttgcctccctttctttttttcttcttttaaatcagcttcctcaggttgatctgcctctcattccttaggcatctgtttcctatgtgttctttctcctttttttcattgatacttttgtatttccccagttctacctcccctcccctagactggttggctgtcctggaatttcccttccttctttcaattgcccaaacactaagtgggaggaggcaaactcatatcaaatagcagattgactacatctgtgctggatcatgcagacagttcaagagtcccaagtaacttagcagcttcatcttgccttccagctgcaatcaagaagagccctctcagaactggtcactcagcaaaagccagatggcattagtaaaagatgttgggcaagggtgggagtttgggccagtgatctcttaggttacttttgctgctgagttaataattgtcacattattaaacagcccttggccctgggaagcccaccttctgtgaatacaagtctcagagtagacaatagggcacaaccagccatgttacatgacagactgccaagtgcattcctcttacaactcactgggatggagcgctcctcagagaaaaacaagcccagcaacatttgtattctgaacaggcatctgtctatgtttgtgacctttatgttgtgatgtgtgtgagctgctgtctggaattggaaagaatgaggaaatatgtcacctatggcccctcttgtgaagtgttaaatgcctctgaggcacttcaaaaggcaacagagcggagaggatgagtgattagaagcacatttgggatacatttttagatctaattagaattgtccttttttttttcttttttgcttttgccctgtggttagcacacaccatatgaacgtttgtcgaatgctatgttagtgatgcataatggttaataataacttttggttatatatctttaacaacagttgcttattcacaggtctttgataagaagaaataacaatgtgctggacacacatttctatacaggcaaaagtgactttttatgatagagagggctgtttcttattttctgttttgaaaacagtagtagctatgcacttgaggccaactaatccctctaagaggtgaaccttccttcccccttgcccttgattcccatcaacacacacatacatatgcacacactaccgtgcttcagtcaccatcactggaagtgaactatgtgcaacttttgggtgctttatatatatcatatcatattgtgtctgctttaataaatcatagttattgactacatatcatacaggatgtgtgccttctgtgggtcagaaaataagttcactatttagtccttttcaaaaattccttcccgatctatcttatagacagaaactaagcttttatacacccaagatttggcagattaacatctgcatattaaaatgtcaagagctagttaactttatttgaggcttaaaagttaaaaaatctgattttctaaatgtctggccttcaaaatttgagtggactgtctttctcaagataactaacaattttatgcacttggcagtcaagacctttacaataactgctgcttgggagattgaggggaaaaaagcattaaagtttgtggcccttataatcaagtactttacagtctactgatgggagaaaaggaaaacaaaacaaaacaaaaaaccactgtgagatatagatatgtcttttctttctctagcagataagtacctgaggctcaaggaggttaagcaacttttgcaaattcactttccaatatagtgtcttttcccagggtgactaatgtatatacttgatgagtgaaccagaaaagtaggaaataatatgttacatatgggatgctctattgggtatagtaaaggatgcgttgctgttataaaattatagtcacttagaaaagagatgtttatttttatttttctctcatcagtcttaaggtaagtgaatggcctagggtagttaggtgactgtgttccatatggtcattcaggggcaaatgctgatgaagcaacacagctgtcttcatctaagactagaactctgcttgttgccatttcccagcaggaaggggttgaaagaaaatttatgtagatttttttttctacccagtagttgcatatatattgtattctcacatcctattgacccaaacttagacatatggccacatctgtcagccagaaagggtgggcaatgttatctatagctgtgttgctacgtgcctattgctaaaaaggctaaaaaggaagaaggggaacatggatgctggtgaacacttggccacctctgacacagataattgctaaagtaataagaagagatggaaattaaatgtgctaagctaggagactttctaaagaaagggtttgtcatgctacgctgtgccattcatgtgtttttttgctcatgctgttccttgtgcctggaaattctccccctaattcccctgagcagtggatgcagtggataccctccccagatcccccccaacttccctgagtgttggctaccaaaagctctgagtgcacccagggagctaagtcctcctgcccacaggcaataatggactgacacggggtagacttaaagaaataagaggcacatcaatcaattgaaatgtgtgggaccttacctggactctgaattaaacaaactgtaattttttaaagctacaccttttaaacatgattggctatttgaacactaactagatatttgatgatattgaggaattattgtgaatttttagtgtagtaatgatattgtggtttgtataaatatatttagggataatatgatgcctcagatttgctttaaaataacacaggatgaggataagtggtaggactgcaagggaaacaagactggccatgagctgataactgttgaaggtgggtactgggtatataagggctcaccacaccattctcttgatttgtgtctatttcccataataaaaagtttaaagagagagaaccgatgaaggggagggagagagtcaagcacacaataagagtgacaaacagtgccaaatcagcccacagtattaagttttcacatatttacataaatatcacctggaatgcaatattgaaattaatgtatatcactagaataaaaaaagtaaagatttaataaatttgttttgaaataaaataagttgaaatacgaaaaagacagaaaaggttttgaaagaggttttaaagaaaagtgcaggatattcattggtaaagatgttggtgagaggcttggaagcaaaacttcaggggaaaaagacaacatatggaattgaccacaattgaatttacaagtgaagtggctttacagaggaatcaggggatgtttctgagagaggaaattcattaaattctaacttgaatattttctgtttgcctttaagtcagagcaaaggctttgagtcccagcttcccagtttgtgaccttgagcaattgcttaacttttccaaagcctccaatagtcttcactctaaaataaaagataatcatatgagatattgtatgcagggtatttacaaggagcctggtacttggtgtacctaatgtatgttagttattattattaaattagaggagcaaaaatttctctagcattgactgctcctgacataatcacaccgaagaggggatacacgatgataaaaccttcctgcagtagtggctatagaaatgatgacggggagaagatctggaaaatattccaaagaaggctacagatagatacattttttccattggaattaggcaatggagttaaacagaagttacaatatggttgaaataaatgtatttttttaaaaaaagatttctctttccttaattattaaaaaatatacaattttgtagaaaattttaaacaaagtataaagaaaaaaataaaaatcattcataatcctatcaaagaagcattgttaattttttctatatatcttctttttccacgtgtatacttggaaattaaattttctaaaataattttcaggaaaaacaaattttaattaattgagcttctactaaataggactgaaaagcaaaacctggactagaattctctctcggtgtgtgtgtgtgtgtgtgtgtgtgtgtgtgtgtgtctgtgtgtacatgtgtatgtgctgtgtatacatgtgtatgtggtgtagcgttcccctgattcttaacttattaccagtggacaaccaccgtggaactagagtctagtcattcttaacctttttgggggaatcacagtctcttttttgaatctgatgaaaatcaaggaccgtttttacagaaacgttctcatctgtgcatacatgagacattttgcattgcatagaatttccgagggttcacagatactttgaagcccaaaagtgatccacagaccccagattgagaactcctccgctatgccatgcttaagcttatttctgtgtatcttctttctgaggagcaggcagatgggtcatctttacaatgtgaagttcttggcatttttattttgttttgtttttctgcactacgatggagcaagcaacactggaggcaactggctaaatgcaaactcatgaagcaagaccaaaatggctggatagatagatgctgtttggttttgacaacctagaaataaccttgaagaaatcctatggagaagtcttaaagaggaagattggattttgtagactcaaagaatgtgtcatggtttggcttaatctaagccatttttattcttcttttcttgtgtttgggtctattatctgtctgtagaatttatacagtgagactgctggggaaagtcttatgtctaattatttgctgtgctgtgtggagtgtactgcagacagtcaataaacaatcaatagtaattgtagcctgcctcagagacaggagttagaaacttcaactggcttaggtgcatggtatttttcattaattttcttctgctagtttttttctctaatttaaagcctaaatttaaagattaaatagaaaagctttctttgcttatgagcacaagtaggcactgtttttaaaagaaggaatatataatcccaggtgttttacctctgttaatgagaaagatgtctgtttgcttcagattgaatgagcaaagaagaggacaaggatatttgcatggttaaatgcctatgagcccttccttcagaaagtaatattcccctgatgtcaattacttttatacggacatctggatgtttatcatgagagtgtacagatgtcaactttttcagtattatagctggaaatgtggtgataacttgactttgatttgagtaaacataaaatatctaacatttaaagtcagaagttcacttcaggaaggggtttaaactgacatttattaaaaagaatggttccttggaaaaaacatcagaaccatccctaaagatacagtcactctgataaagtaaacagagtcccagttatgctctgtgtaacaaataacagaacttgaacatgacatttatctgttccttaaacttacagaagctggctctgaagatattgacatacttcccaatggtctggctttttttagtgtggtgagtgtcttcttccttccccaaattcagcagaggagatacaagggtatttgatgagggctgcagaacagtaagttgcttttaaaattcattttccaaaatgcattctgaagaaaagagaggtcaaacaagatcttggaaaacttcctccagcttttctaaatgtagagatgaagactctttgcccattgagatagtgttctttatttccccattgcattgcactaaaatattccaatgcaatctgtgttttgttttgttttttcttttttaattttttttattttttgagacggagtcttgttctggttgccccggctggagtgcagtggcatgatctcagcttactgcaacctccgcctcccgggttcaagcaattcttttgcctcagcctcccgagtagctgggattacaggcgcccgccaccatgcccggctaatttttgtatttttagtagagatggggtttcgccgtgttggccaggctggtctcaaacacctgacctcaggtgatcgcctgcctcagcctcccaaagtgctggcattacgggagtgagccaccacgcccagcgcaatctgtgttttaaatgtgcactattaagagggatatttgaggtcttactgtggatactcaatactaacattatactattttaaatacagcatctactcatctttctattactattcaacttgaagcaaatattcttgccattattatttattttcaaatattataccaaccttgcccttttgctttctttcttttttcccctgaatagccaatcataagtggaaagtcattgagtttatttacacccttcattttgccttgattcttgtaagctgaaaaacaatatcctttctgggtatacaatagaaagactttaaaaacaattggcttgtgaatattgttgtgaatattgttgaaactagcttgtaacaatgtccattctaattggaaatccagataaggggacagatgaggaggttctgaccacctacctccctggcttgggcagacataggagttcttggcatcttcataggtccagtttttctggaggaagaagtaaccaactctgacacctgactgtaattattccatttcctctcaacatccattattttcaggctctgagactcaagagggatgtgaaatactgggagatacttagaagggagtcaccacactaataaaatagttgttagacttatgagaaaggtgagagaactcaggttggagtagaatgagaattagaacactcttcaggttcctgatggtttttatgtgaaagacagtgagcagctggttattaccactgaggcaataaagagatactgtgggctttagcagaaacaccagtatatgtatttagtttttaaaataaggttttaaaaggaatgttttatttaattgcctacacagaatgaataaagtgatatttatagtaggactctgggtttgtttaggagcacatgcttgcacatgtgtggcttaggaaaaaccactgggaccactagtctaaaatattcataagtaaagatgcaaacattctgaataaagtagaaggcagttgcattgatttttttatttgtttatttgtgttttttgttgttgttttgcaaggatgtgttcttggagatttttataatctagaattcacctatttcaagatttctctccagcccccatagtaataaatctgaagtaggagggatgaggtctccaaacacataaatctacagccattttagcttgggggcatgttatagttacaaagatcttatagccatatcaatagaactttttctgctttttttctgttaccctcctttgctcatttgactttttttaaaatttagaaacattcccagtttgctgctgtttttcatttacttggcattgtctctaataaaacctagagtgtactctcttctaaataaagaggtcctacattgtggaggttgttcattcttcttcctagcattttagctcatctaacccaacctattttacagttatgggttgagggtcacctcaaaactaatgtcacacttcatgaagaattggatgacatagaataaaatataaaaaatgtaaacaatgtgagtgtgcttaacaccactgaactgtacacttaaaaatggtgaaagtgatgaatgttgtatgtattttatcataattaaaaataaatttttaaaaagagaaaaaatacttaaataaataaggagtgcgaacataaccatgactagttatcaccatctgatagtgcttcctttgcatgtaaatcatgcttttgttttggggacattcataaagaatagggattaactgaagtggcactgccatgtaacaatagcataattccagtttgttctacttaccaggcttgccctccatgaaaatatacaattgtagataatcttttttaattggagagatttcctcttatgtccaattttatacataaagtaagacttttttattgtgtgcctaaatttgtgtaaatatgactgcatcgtattagtaaactgaattaggtagtgcattcacataaaatttaacatcaccaagaaggctttaccttaagaatgtaatgatgaatcaccattttagatagactgataggtaatttattaactgatttaaaagagaaaagacctatatcatctcagtgagtaccaaaaagcatttaataaaattcaatactcattcctaaagttccaagcaaactagaaagataaggaaaattcccacaaaactacagcaaacatcattcttgatggtgaagcattggctgcatttgcattaatgctcagaacaggaagaaaatacccaacaccacaaccatcagtaatctactagagttcttagtaattcagtaaaacgagaaaaagaaatgtgagatagaaaagaaaaagacaaaactgtcattagagaagcagggactggctcaattgcccaggctgatgtgcagtagtgcaatcatagctcactgcagcctgaactcctaaactcctgcgctcaagaggtccttccacctcagccttccgagcagctaggactacaagtgctcaccataacactcagctaatttttttttttttttttttttttttttttgtagagacagagtcttgctatgttgcccaggctggtctcaaactgctggcctcaagcagtcctcccacgtcagcctcccaaagtgctggaattataggcatgagccaccaggcctgacctaaagctgtagtaatttaaaaagtgttatattggcacaggaatagacatgagacattaaaataacaaaacagagagtccctaaatagaccaatatgtaaatgtcagagatctagcacatgataaaggtgatattttgaatcagtgggagaaggatggactgtatgccaggcactgttccaggcactgggatctagcagtgaacaaatttccacagtcagtatgtagatgtcacttttctccaccctcagctctccctggaatcacctagtccaccaaccttctgattactctctgaagagaataaatccctgatcttcttttcagttattttcaggctttcagtattccacctccccgttattattttttctgttatcttttctctgttttttgagtttttgtggctttatgccactactttaaccacaatctctatttatccttcatgtacagttcccatgttagtccataaaaatacttaagcttttgtatttaacatttttcaccgttttggaaagggtctaaaattcccaggactccacagctttgcaccagataagcctggaggaatactaatgatggatctaaaagaagaaaaaccaagggcacgggaattaagaatcagtcgtgggtttgatttggcctcattcaatccacatggcatcagcactttcatagacaacggtaagagccaatgggctaccaacatttagtaacgtgtgatggttcacaaatgactgtgaaaaatagatttggatcatatttctaggaagagaagaacaattaactcatgagtgatttctgtattcttcattacaaagaacttgttcatttgcctcttcagctggcagtaagttatgctacattttgaaattcctaacaggtaacacctgaaagaatgtttagatttcataatcttttcatatacctacgatcatcacatttaaaaaagaactgtatttttgaattaaagtagaaacagattatgcatgaattctgtatatggagtaggaaacactttcttaaaggtcagggagccaatgatcagaaataacaccagacggacagcaataggaaagacagagaatgatctgttaggtcgtctaacagcttatacattcaacctttccttgcctgtggtatttaaatgtcagtgcctgcccagaggtcccgtagttatgtcttgtaaattaactctgttctttcaattctttagatgacacagtttatctctttgttgtaaaccacccagaattcaagaataca

SEQ ID NO: 13506 - DNA, 550 bp, Homo sapiens
accgcccacggagctgctggccaggccggagcgaggcagcgcgcccggctcccgcgccatggggcggctggtggctgtgggcttgctggggatcgcgctggcgctcctgggcgagaggcttctggcactcagggaagcctgaagccagaatgccagacagcgcagacactattccatctcgcattttagttttaatgaaaatctctgaaatcgacttaaagcctccagagaagtagaatctgtagaccttccacactgccacctgattaaaggaattgaagctggctctgaagatattgacatacttcccaatggtctggctttttttagtgtgggtctaaaattcccaggactccacagctttgcaccagataagcctggaggaatactaatgatggatctaaaagaagaaaaaccaagggcacgggaattaagaatcagtcgtgggtttgatttggcctcattcaatccacatggcatcagcactttcatagacaacgatgacacagtttatctctttgttgtaaaccacccagaattcaagaataca

SEQ ID NO: 13507 - DNA, 19088 bp, Homo sapiens
ggctcccgcgccatggggcggctggtggctgtgggcttgctggggatcgcgctggcgctcctgggcgagaggcttctggcactcaggtaggtgggactcccgcgcgcccctcctcggcggtccccaggctcggggtggccgcgtggtgcggggagggcgcaggctgggggagggattcctgcgggacctggccctgcggccgggggtggagaatttttgaatgctgtccctcccccagctagttgaacccccatcaccccgactctccgcttctagtgaaaaaactagcaaagtttggagtgaatcgcgacactttcttgaaagtttataagcccttgctgctaacaaagttctcttctgcttaggctgacaagagaatgctttgcaattacccaagggccaaactagtggtttaaattgaaaacaaaatgactactcatgcattgaaaccttaactatgaagatttatttcaggtcattggtgctgtttctccttgttgcccaaaccagacccgtctttaataaagttgttctccacccatttctgcatagtttgagaaactcttcagctgtagatcaaagacacttgaaatattcagctactgttcttacttcctatttattcaccagggaagcctgaagccagaatgccagacagcgcagacactattccatctcgcattttagttttaatgaaaatctctggtaggtagacatcatcgtttataaattaccaactcaacgtttgttttttgtttattttattttttgtagagatggggtcttgctgtattgcccaggctgttccctaactcttgcactcaagcaatcctccagcctaggcctccccacagtgctgggattacaggtgtgagctgttctgccctgcctcaaccaaaattttataggcctcatgcaaaagagttccagaaagactgagcacctgctatgtgtaatgttctctcttaggcttctatagtagagtacgacccttatggagtttgatacaggggaagagagaattaaaatacagtaaatgtataaattaggatgttctaaggacagacacaaatgaaccgcataggcttaaagaggaaagattccatcccctgagggtggagttctagagggaggaagagacattcgacctgaccttgaagggtgggtgcaacacatatgagcatgaaggggcccatgccaaatgtatagtgcagcaggagcaaaggggctaaggtgggaagttggaagactagcaaatgggccaatttgaagggagcataaagtcaggagatgagaatagtagggtggtgggaaggataggttttgaggccattaaatataagttgaaaaatggggccccactttcataggcccaatagtgcttcaaaagggaaatattggtgggttttgcttttcaacaagaacttaatataactagttgtgttttatagagataagcctggaaggggggattggaggagagcaatggttctctgtacattagaatctcctggagggctggtgtctgagtggcaccaccaaagattctgattcagctgttctggatcagaatctacagctcacacctgtaatcccagcactgttggaggcctaagccagaagattgcttgagcccaggagttagtgacaggcctgggcaacatagcaagatcccacctctacaaaatgaataaataaataaataaataaataaaaaacaaaatttgagttggtaatttataaactatggtgtctacctaccagagatttttcgttataattaaaatgtgatatggaataatgtattgtttggcaagctggcttcagggttcccaggtaaatagataaataaggaagtgcataatgtaagaacagtggctgacagtagcagtggcattttttatttttaaaaacattcctgataattctaatgagcagtcaaggtcgagaactactagaatagagagcagacatggggtaactggttaaggtattgcagtaggtcagagaggataacagggacccaaactctggaaccccagggatgagggagaagtcaaaggtgctaccagagtttgtgccacagctccactgtcccatggttgtagtttcatctactgataaagcagtgcaaagaggaagcgtgtggtggctgagatgggagtgagatttgaggaaagaacgcttatgggtaggaaatggacatgttgaccttaattttcatgttaggtaatgcccattgtgctctacagaacattcatgagttggatgactttgtatatgatctgtcctgctctccatttcaaaggcaagaccaccaaaattcacaagcttattatgttgtcactaatgtgtaagccaccagtttttctgcaagttggaagttttctcaacagtcaaatattcccccttctcactaatcttaaggttttaaagttatagctgcaaatctaaaaaaaaaagaaaaagtaaataaaacttattgacagaatgcctgatagtttatttacaggtttttgtttgtttgttttttgtttttctttgttttttattttgacacaaggtcttgctctgccgcccaagccagagtacagtggtacatcaaagctcactgcaatctcaaacacctaggcacaagcagtcctccctcctcagcctcctgagtagctgggactacagatgcatgctaccatgcccagctagtatttttatttcttgcagagacagggtctcactttgttgcccaggctaatctcaaactcccagcctcaagtgatgctcctgcctcagcctcccaaagtggtaggattatacacatgagccaccaccctcggcctactttacaatttgatgcaccttttctttacgtgactgtgatgcactttaatgggcagtgactttataaaatggtaactttattggatatgtggagccccaaatgggctgacgtgagaatgttggggtaggtggtgggtggctggatttagcaaagaaaaatgtaggctacccagttaactttgaatttcacatggatttttttttttttttttagtataagcatgaaatacttataccatacttttagcattaagcgtggaatttgggacataattatactaaaatatcattcattgtttatctcaaattaaaatatcactgggtaccctgtattttatcatatgttcgagtgccttctgtcagaatttggtgaccctttgagtctgttttaaaaaggagcatgtttggccggacacagtggctcacgtctgtaatcccagcactttgggaggctgaggcgggcagatcactagaggtcaggggttcaagaccagcctggccaacatggtgaaaccccgtctctaataaaaatacaaaaattagccaggtgtggtggtgcatccctgtaatcccagctacttgggaggctgagtcaggagaattgcttgaaccccagaggtagaggttgcagtgagccaagattgagccactggactccagcctggacaacagagaaagactccctcaaaaaaaaaagaaaaaaagcatgttcccacctccccataaggaaaggctcttcagaggaagttgaaggaacagaggctttatgtttgatttttgctttaatctgatgcctactgtttgattattcaatatttagagatggtactttggcaatcaagttatttctctccccaggttgcccacttcaatttttagtataaggatgtcccagagggataaatgccatcaaagttgtctttcttcttctgaactgtaactgggattccacaccctccttttccacccctccctagttgagcaataaaggggaaaataacagtatacaaatattcccaggccagttcctggtgtcaaggtacacagccatggatgaatcatgaggcttgagtgcatcagagacctaagcgtgggcaggaacccccagagtacccatgtgaatgttctgcttgctgcctcgcaccttttatgacaattcccacaagaagctatgtggtctgtttctacttctgaaagagcagcctttttcccttttttttttttttaaaccaccatcctttaaatcatttattatgtaactcttgtgtgctggtcagtcagtgtgtcaaaagtgtaaaaacttctttatttatttttttaatctatcttttaaaaaatattttctttctttttttcttttttcttcaaggcaggttcttgctctgtcacccaggctggagtgcagcagcacaatcatagctcattgtaacccagaacacctgggctcaagcaatcctcccacctcagcctcctaagcagtgaggactataggcatgcaccactacacctggctaattaaaaaaacatggccgggcacggtggctcattactataatcccagcactttgggaggctgaggcgggtggatacctgaggtcgggagttcaagaccagcctgaccaacatggtgaaaccccatctctactaaaaatacaaaattagccaggcacggtggcacatgcctgtaatcccagctactcaggaggctgaggcaggagaatcacttgaacccgggaggcggaggttgcagtgagccattgcactccagcctggcaacagagcgagactctgtctcaaaaaaaaaaaaacaaaaaaatttttttgtagagatgggggtcttgctgtgttgcccaggctgatctcaaacttctagccataagtgatcctaccgcatcaacttcccaaagcactgggattatgggtatgagctactgagccctgccaaatttctttatattaaaccaaaacgtacatttactgatatttggaaagaaagctcttttacttttatgccttcatccagtcttcatagatatcttcccttttacattataactgtaaatactgaggttagagaggttaactagttagttcaacagaataatataaatattgaataatataattaatgaataattagtgctgaacctgtcgcctcagccaggtctcctgattccaaatacagtttgccccagctccccacagtcttctagcttctctgccagtggagcaaattttccctaggtttacaggcctaagcacagattcttagttacttagtgcaagtattgccagagcccaaggggtgaattccaaagggtttttacaaggctatacataaaagataaagccctggcttgtatatcacttgcacataggagataaagccccagcagttgtatgtaaatttcaaaagcagagaagtatggcacaaagaaactcctgatagtaacactgtgttcccactttgcttaggggcatattggcaccgtagcatggtacacccttactgctacctgccatgaggccagataatagctagcagcccctggtctcattctactctggatgggtactgctgtttcctgaatgaaagacactgagattgatttcatgctaatgactgttggttaagagttcatgctttctattcacaatagcaaagacttggaaccaacccaaatgtccgtcaatgatagactggattaagaaaacgtggcacatatacaccatggaatactatgcagccataaaaaaggatgagttcatgtcctttgtagggacatggatgaagctggaaaccgtcattcttagcaaactattggaaggacagaaaaccaaacaccacatgttctcacttataggtgggaattgaacaatgagaacacttggatacaggaaggggaacatcacacaccggggcctcttgtggggtagggggaggggggagggatagcattaggagatatacctaatgtaaatgacgagttaatgggtgcagcagaccaacatggcacatgtatacatatgtaacaaacctgcacgttgtgcacatgtaccctagaacttaaagtataaaaaaaaaaaaaagttcatgctttgtggacaggtagcctgagttcattcatagctctactatttacctgaaaccttggactaattatttcacttttctgtgccccagtgttgtaatctgtaggatggggtactgcctgctccacagtgggactatgagaatgcttaaaataatgccaagcgcacagtcagctcaataaatgtcatctatgtagacaatgaaattcaagcataattccttaaacctttgtgccatacatccctttggcagtctggtaaagccttcattccttctcagcatcatgtttttaaatgagtaaaataaaatatataggattacacaggaaaccaattaaatactgctaccaagctatttaaaaatctatgatataatatgctttttaaattaaacccttaaatggatctagaggtaggtaaatgtctaacagcagatattttgaagttgcaatgaatgtaaatggcactttgagctatctacaactgaaatgcgatagaaaagtatctataatttctattagtgacagtcacaaatactactaatagtattgtggtttgttgcttatactcatcatcaaaggaaatactcaatttgagttaaaggtttaaataaagatgtatttttcccccatccaagttcatggatccctgaattctacccatggattccttggtcactggactccataggggtcacttggggaatgattgtgacaccaatgaaggaagccagcggatactgtttgctgtattatacctaccataggctcgtgatgaggaaataataaaataaataactgtaatgaaaaagaaaagaaaggaaaacaaaaggaacctaaaacagagaaggcaaatagctttccttttgagtgtcaattttaacagactccctgtggttgcgaaacaatgtgtctgaggctggctctgggttagagggagagtgctgttattgattagcaattcctgcatgacagcagagtggcaacagccatgcatctctgacctggcacagtcataagcatgttatagacataaagtgttagggaacaaataggctctagcaaaagtaaagagtgttcctcctctcatatcatcacttatatgtgtttataccatttatgttgtattttttacatgaatacttttagatttattaatctaatccaaaaaggtttgtatagctttctctatattaagagaaatatatgtatttcttaaatacacaaagttcttaaatctgatgccagcgaggattgcttccagccacaagtaacatatatcagattaatagtagttcattcaaagagggatttattttcctcacatgaaaaacagctctgtgggtgacccaatatagagcttgttcattgagccagtgattatatcaaggaactgggttcttcatatattttcattctttgatctccccctattgactttatagctgtatctttctcaaggatgcagaatggctgccgcagtctcaaacactgcgtgtgtgttcaaatcatgaagaaaggagattgagtgatgccagctagctctcttctcgtgactctcctttgtatctagaacacagtgtctttccccaaaacctgggtcatatgactacacctcaatacagcggagtctgggaaagcaaatatttgctttgcccaccactacaatagaaacgacaagggagaaagaaagggggttgggcatggcgttaattttgtcagccgctagggtctgccacccagaaaacagaagtccactaacaagcagggaactgattgttctgccagggaaaaagtctggcagtttcctactgaagaaatttggaagtcttgatggtccaggaaggataaaggcaaaaccttcattttcttttatcaaaaaggaaagccaagaaaaaaattagttaagtagaagttatgcacaaccctcatgtaactcttccatgttaatagcaggtaggctgcatatgaaaacatgatattatacaagaaaactagttgatgaagattgccctatttagcaccaattacttacgcaaacctaagttgactctgaaacaggaaccccatattaaacttttcaaacacatcagaatatgttactttgaacagattttatttaatccaaagagattatctttgaaaaaggtagatggtaaacatcgttatccctatttttgtatagtcaaataggcatagtagtaagttgtgtaaaattgacatccaaaccaatgcatgatactaaaacttggtgtacaaacagcagttacatcctattgctttgtatctacatctgtttctggagtcatataacatttgtagaatcttggaggtgttttaggctcatccttattttatccataaagaagactgacacctatagagattaactgacctgccaagggtcatggcagtttcactgctgagacaagaacacagatccctttacttctttctgagaaaagtacaaagtagtttaaagcaaaagcttccctgcttccagcacttctggctaagttgcgccgtgggaaaattgttttgtctgattcagttttctcatcttttaaactggaataatgctacctaatttacagggttgtttgaagaattaaatgaatgcatggaggtaaatcacttagaacagcggtaaattatacttttttattatttatttcctttgaccacccacaattatcatcagtgtcatcctcatcatcacaattaagattactaccacattaggctacataaactttttttttctctctctgttttataatttcaattttattttagattcaaggggtacatgtgcaggttttacatgggtatattgtctgatgctgaggtttggggaacaactgatgccatcacccaggtagtgagtatagtaccctatagtttttcagcccttgtctactcccttcccttccccttctagtagtccccagtgtctaccatcgtcatctttatgtccatgtgcaccattgtttagctcccagttaaagtgagaacatgcagtatttggttttctagcttatttttcctctcttaaatcacttctgtgacacgtaggccatgagatttattgtattttttaatgccttatttaaaaatttgtattatttaatacatttaatgcattattttttattatatttaaatattgatttatttgtactttttgccttattgctatattgtttcaaaaaatttaacattatttgagttacatgatttcaaatacatactgattaacattttaattagaaactttatgtctgatatgaattgccaaaatgtgtagttggtacaacctatgagtcattctgggttatctagaagaaactggtagcctgccccatactccagaagccttccccagtgtctagacctcagaagctgtcaggaatatgcacaggagaaggacacatggcaaatagctatttcgtctcttaaatgtatggtatgtgggaaccactgaaaaatgtaaagtttctacaaggtgctatttttattatttatggctctagagaacagagaaggtgaaaaatgtgagagagaagggaaagccaatagtatgtggccttcaaaacaaaagatcccacagatattgtcccaaactgcttcctggccctctagagtggagagggagggggaagacatcctattagagttcaacattctcttattatttccttcttttaattttctgggtatacaacagcaaatagttttgctgaagtagttacagaactagttggtgttctccaaccttcctattccaatacatactgtcatggatgggtacactaaaatctcagaattcactgctatatcactcatccatgtaaccaaaaaccacatgtacccccaaaagctattgaaataagataaatacattcttatttaaaaaaatactgtcatagggatgctaccttcttttcttttttgttagtaactatttgtgggatgtctttggtgtgtcaggctctgagcaatgccattttctcttggcttctttgcagtctctgtgtgaggcttacagtcatttttcacgtttgactcttcagaaggaagacagggctactggttctacatctggaactcttttcccacaacaccaacactgagaaatgtgacatggtgctgtgtttacatttgcataggaacttgcattataagttttatttgttgagttattggctttttttttttaataacccacatcagtatatagaactttgcaataggcatttttgttttaacttcatttctggtgcagttttattttcctacccttgtctttctattttctctttcatctgctttagacttaaactgtgttttatgtattgctgtaagcctctttaaaccctttctaaaacaaagcagggaatacataaacaaatagttttttgttttttgtttttttttctttgtaacagaaatcgacttaaagcctccagagaagtagaatctgtagaccttccacactgccacctgattaaaggaattggtatgtatatgaaaatgcttgttgggcacattgcattttttggccattaacattaaaacactcattaatggcattttagcatgaaattactgcttttcagtggataaatcacattagatcaacaaaaacctctttggtcaacctcttgatctgatgaaccctgtatttattcttctttcctaccctcactgtaaattattcttttttgtgtgtaattctatgtttagcatttgatttcttgcttgttttgtgacttctctgaactatttttgttgcgtctgtattgtttgtcaggtatggccgctgcagtctgtgttctgtgagccttgtggtcagctagtgaaggaagctttatgtaggcagtgacagcatttaccctgctcactactctataactaggatctgatcttatggctaacacgtaactgaccaatatggtttggttgtgtccccacccgaatctcatcttgaattgtagttcccataatccccacgtgttgtgggagggacccagtgagaggtcattgaatcatgaggtggttaccctgtgctgctgttctcgtgatagtgagtgagttctcatgagatctgatggttttataagggcttttcccccttttgctcggcacttctccttgctgccgccatgtgaagaagggtgtgttttcttccccttccaccaagattgtaagtttcctgaagcctccccaaccacacggaacagtgagtcaattaaacctctttcctttataaattacccggtctcaggtatgtctttattagcagcctgagaacggactgatgtaccggcacttcacaatatgtattgtaaaaacttgtttttattttatcttctaagctatgactgcagagggggagtctccctcttcccttgactttatgtaggatgtattgtggagtctgagtctttgagtaggggttcctaagagcaagccccaattttgctatagataaggagggatctgtccagattcttctccagcactgagggtctctctggtgtgtttgcagtttttctccaaggtagagtctgtgtcttgctgtcttttaccctttatcatctactaagtacatgtccctagtacataatagactagtagttagattatcaatgaacaataaatattggctttccttttttttaaattttaattttttttttttttttttttgagaggtggcctcactttgtcacccaggccagaatgcagtagcgcaatcttggctcactgcagccctgatatcctgggctcaagcgatcctcccgcctcgtcctcccaggtagctgagactacaggcacatgcccccactcatggctagttttttatttttgtagagacagggtcttgttatgttgtccaggctggtcttgaactcctggcctcaagcaatcctcccagcttggtctcccaaagtgctgggattgcaggcatgaggcactgagcccagccaatattggctttccttagatatggttcatggtatgattagaaacaaaaagaattagcagtcaaaacacctagtttctagttctattctgccacaatgtaaccttaggcaaagttggtttttgtatttgtcacctataatgatgagtttgtgattagactaatggtttttagactttaaaaagcctgggaccatttatttataatcttactctgagagccacagtgtggaaataactagactgtcattgagtcacttctagtcctttacaacaacatccttctctagaggtaggagagacaatttaatattttgttttactctttagaaattaaaactcgggttacatggaaatgttctcttctctgaataggtaacattgttaaacaagttttgagtgtccttccatctttttctttttatgaatactcctgtacataatttttaaaaacataagtgaggtcaaattatgcataatatttcaaaactagctttttgtacttaatactaggttttggaaacttatgtttgtacataatgttaccttttcttcacaactgcacagtattttttgtgcaaagttcatataaacagtgtatgtgcaaacaatatagaaagatataaaatggaaagtaaataaaaataaaaatctctcatcaaactcttcatcacccccaacagaaataaccccaaagataaagctcccttttttatctttcctgatagtttcagtgcatttgcaaacaaatatattgactctttttttcacaaatagaattttagtgtaaatatttcacaaccttcttcattcctaaaacagtgtgagcagctttccacatcagcatatatagttactttgttctttttaatattttcacattccatgatttatttaaccattccccttttaatgtacatttgggttgttacagttttttgcaactatgaacaaatcagtgaacatcattgctgttgagtttgtgtgtctgtagaatatgtccttaacaatgggattgttgttcccttagaatatgtgtttagagttttgacagtcattgctaagttgctctcaatttggcaacagtaataaactcagtacctcatagttgtaaccacattcactccagacagagttctcagcactcttttagtaaaaataaaccatcagttgacagtgccaccttcagagtttctctacaaataccttgcttgcctccctttctttttttcttcttttaaatcagcttcctcaggttgatctgcctctcattccttaggcatctgtttcctatgtgttctttctcctttttttcattgatacttttgtatttccccagttctacctcccctcccctagactggttggctgtcctggaatttcccttccttctttcaattgcccaaacactaagtgggaggaggcaaactcatatcaaatagcagattgactacatctgtgctggatcatgcagacagttcaagagtcccaagtaacttagcagcttcatcttgccttccagctgcaatcaagaagagccctctcagaactggtcactcagcaaaagccagatggcattagtaaaagatgttgggcaagggtgggagtttgggccagtgatctcttaggttacttttgctgctgagttaataattgtcacattattaaacagcccttggccctgggaagcccaccttctgtgaatacaagtctcagagtagacaatagggcacaaccagccatgttacatgacagactgccaagtgcattcctcttacaactcactgggatggagcgctcctcagagaaaaacaagcccagcaacatttgtattctgaacaggcatctgtctatgtttgtgacctttatgttgtgatgtgtgtgagctgctgtctggaattggaaagaatgaggaaatatgtcacctatggcccctcttgtgaagtgttaaatgcctctgaggcacttcaaaaggcaacagagcggagaggatgagtgattagaagcacatttgggatacatttttagatctaattagaattgtccttttttttttcttttttgcttttgccctgtggttagcacacaccatatgaacgtttgtcgaatgctatgttagtgatgcataatggttaataataacttttggttatatatctttaacaacagttgcttattcacaggtctttgataagaagaaataacaatgtgctggacacacatttctatacaggcaaaagtgactttttatgatagagagggctgtttcttattttctgttttgaaaacagtagtagctatgcacttgaggccaactaatccctctaagaggtgaaccttccttcccccttgcccttgattcccatcaacacacacatacatatgcacacactaccgtgcttcagtcaccatcactggaagtgaactatgtgcaacttttgggtgctttatatatatcatatcatattgtgtctgctttaataaatcatagttattgactacatatcatacaggatgtgtgccttctgtgggtcagaaaataagttcactatttagtccttttcaaaaattccttcccgatctatcttatagacagaaactaagcttttatacacccaagatttggcagattaacatctgcatattaaaatgtcaagagctagttaactttatttgaggcttaaaagttaaaaaatctgattttctaaatgtctggccttcaaaatttgagtggactgtctttctcaagataactaacaattttatgcacttggcagtcaagacctttacaataactgctgcttgggagattgaggggaaaaaagcattaaagtttgtggcccttataatcaagtactttacagtctactgatgggagaaaaggaaaacaaaacaaaacaaaaaaccactgtgagatatagatatgtcttttctttctctagcagataagtacctgaggctcaaggaggttaagcaacttttgcaaattcactttccaatatagtgtcttttcccagggtgactaatgtatatacttgatgagtgaaccagaaaagtaggaaataatatgttacatatgggatgctctattgggtatagtaaaggatgcgttgctgttataaaattatagtcacttagaaaagagatgtttatttttatttttctctcatcagtcttaaggtaagtgaatggcctagggtagttaggtgactgtgttccatatggtcattcaggggcaaatgctgatgaagcaacacagctgtcttcatctaagactagaactctgcttgttgccatttcccagcaggaaggggttgaaagaaaatttatgtagatttttttttctacccagtagttgcatatatattgtattctcacatcctattgacccaaacttagacatatggccacatctgtcagccagaaagggtgggcaatgttatctatagctgtgttgctacgtgcctattgctaaaaaggctaaaaaggaagaaggggaacatggatgctggtgaacacttggccacctctgacacagataattgctaaagtaataagaagagatggaaattaaatgtgctaagctaggagactttctaaagaaagggtttgtcatgctacgctgtgccattcatgtgtttttttgctcatgctgttccttgtgcctggaaattctccccctaattcccctgagcagtggatgcagtggataccctccccagatcccccccaacttccctgagtgttggctaccaaaagctctgagtgcacccagggagctaagtcctcctgcccacaggcaataatggactgacacggggtagacttaaagaaataagaggcacatcaatcaattgaaatgtgtgggaccttacctggactctgaattaaacaaactgtaattttttaaagctacaccttttaaacatgattggctatttgaacactaactagatatttgatgatattgaggaattattgtgaatttttagtgtagtaatgatattgtggtttgtataaatatatttagggataatatgatgcctcagatttgctttaaaataacacaggatgaggataagtggtaggactgcaagggaaacaagactggccatgagctgataactgttgaaggtgggtactgggtatataagggctcaccacaccattctcttgatttgtgtctatttcccataataaaaagtttaaagagagagaaccgatgaaggggagggagagagtcaagcacacaataagagtgacaaacagtgccaaatcagcccacagtattaagttttcacatatttacataaatatcacctggaatgcaatattgaaattaatgtatatcactagaataaaaaaagtaaagatttaataaatttgttttgaaataaaataagttgaaatacgaaaaagacagaaaaggttttgaaagaggttttaaagaaaagtgcaggatattcattggtaaagatgttggtgagaggcttggaagcaaaacttcaggggaaaaagacaacatatggaattgaccacaattgaatttacaagtgaagtggctttacagaggaatcaggggatgtttctgagagaggaaattcattaaattctaacttgaatattttctgtttgcctttaagtcagagcaaaggctttgagtcccagcttcccagtttgtgaccttgagcaattgcttaacttttccaaagcctccaatagtcttcactctaaaataaaagataatcatatgagatattgtatgcagggtatttacaaggagcctggtacttggtgtacctaatgtatgttagttattattattaaattagaggagcaaaaatttctctagcattgactgctcctgacataatcacaccgaagaggggatacacgatgataaaaccttcctgcagtagtggctatagaaatgatgacggggagaagatctggaaaatattccaaagaaggctacagatagatacattttttccattggaattaggcaatggagttaaacagaagttacaatatggttgaaataaatgtatttttttaaaaaaagatttctctttccttaattattaaaaaatatacaattttgtagaaaattttaaacaaagtataaagaaaaaaataaaaatcattcataatcctatcaaagaagcattgttaattttttctatatatcttctttttccacgtgtatacttggaaattaaattttctaaaataattttcaggaaaaacaaattttaattaattgagcttctactaaataggactgaaaagcaaaacctggactagaattctctctcggtgtgtgtgtgtgtgtgtgtgtgtgtgtgtgtgtgtctgtgtgtacatgtgtatgtgctgtgtatacatgtgtatgtggtgtagcgttcccctgattcttaacttattaccagtggacaaccaccgtggaactagagtctagtcattcttaacctttttgggggaatcacagtctcttttttgaatctgatgaaaatcaaggaccgtttttacagaaacgttctcatctgtgcatacatgagacattttgcattgcatagaatttccgagggttcacagatactttgaagcccaaaagtgatccacagaccccagattgagaactcctccgctatgccatgcttaagcttatttctgtgtatcttctttctgaggagcaggcagatgggtcatctttacaatgtgaagttcttggcatttttattttgttttgtttttctgcactacgatggagcaagcaacactggaggcaactggctaaatgcaaactcatgaagcaagaccaaaatggctggatagatagatgctgtttggttttgacaacctagaaataaccttgaagaaatcctatggagaagtcttaaagaggaagattggattttgtagactcaaagaatgtgtcatggtttggcttaatctaagccatttttattcttcttttcttgtgtttgggtctattatctgtctgtagaatttatacagtgagactgctggggaaagtcttatgtctaattatttgctgtgctgtgtggagtgtactgcagacagtcaataaacaatcaatagtaattgtagcctgcctcagagacaggagttagaaacttcaactggcttaggtgcatggtatttttcattaattttcttctgctagtttttttctctaatttaaagcctaaatttaaagattaaatagaaaagctttctttgcttatgagcacaagtaggcactgtttttaaaagaaggaatatataatcccaggtgttttacctctgttaatgagaaagatgtctgtttgcttcagattgaatgagcaaagaagaggacaaggatatttgcatggttaaatgcctatgagcccttccttcagaaagtaatattcccctgatgtcaattacttttatacggacatctggatgtttatcatgagagtgtacagatgtcaactttttcagtattatagctggaaatgtggtgataacttgactttgatttgagtaaacataaaatatctaacatttaaagtcagaagttcacttcaggaaggggtttaaactgacatttattaaaaagaatggttccttggaaaaaacatcagaaccatccctaaagatacagtcactctgataaagtaaacagagtcccagttatgctctgtgtaacaaataacagaacttgaacatgacatttatctgttccttaaacttacagaagctggctctgaagatattgacatacttcccaatggtctggctttttttagtgtggtgagtgtcttcttccttccccaaattcagcagaggagatacaagggtatttgatgagggctgcagaacagtaagttgcttttaaaattcattttccaaaatgcattctgaagaaaagagaggtcaaacaagatcttggaaaacttcctccagcttttctaaatgtagagatgaagactctttgcccattgagatagtgttctttatttccccattgcattgcactaaaatattccaatgcaatctgtgttttgttttgttttttcttttttaattttttttattttttgagacggagtcttgttctggttgccccggctggagtgcagtggcatgatctcagcttactgcaacctccgcctcccg

SEQ ID NO: 13508 - DNA, 579 bp, Homo sapiens
ggctcccgcgccatggggcggctggtggctgtgggcttgctggggatcgcgctggcgctcctgggcgagaggcttctggcactcagaaatcgacttaaagcctccagagaagtagaatctgtagaccttccacactgccacctgattaaaggaattgaagctggctctgaagatattgacatacttcccaatggtctggctttttttagtgtggtgagtgtcttcttccttccccaaattcagcagaggagatacaagggtatttgatgagggctgcagaacagtaagttgcttttaaaattcattttccaaaatgcattctgaagaaaagagaggtcaaacaagatcttggaaaacttcctccagcttttctaaatgtagagatgaagactctttgcccattgagatagtgttctttatttccccattgcattgcactaaaatattccaatgcaatctgtgttttgttttgttttttcttttttaattttttttattttttgagacggagtcttgttctggttgccccggctggagtgcagtggcatgatctcagcttactgcaacctccgcctcccg

SEQ ID NO: 13509 - DNA, 23305 bp, Homo sapiens
ccgcccacggagctgctggccaggccggagcgaggcagcgcgcccggctcccgcgccatggggcggctggtggctgtgggcttgctggggatcgcgctggcgctcctgggcgagaggcttctggcactcaggtaggtgggactcccgcgcgcccctcctcggcggtccccaggctcggggtggccgcgtggtgcggggagggcgcaggctgggggagggattcctgcgggacctggccctgcggccgggggtggagaatttttgaatgctgtccctcccccagctagttgaacccccatcaccccgactctccgcttctagtgaaaaaactagcaaagtttggagtgaatcgcgacactttcttgaaagtttataagcccttgctgctaacaaagttctcttctgcttaggctgacaagagaatgctttgcaattacccaagggccaaactagtggtttaaattgaaaacaaaatgactactcatgcattgaaaccttaactatgaagatttatttcaggtcattggtgctgtttctccttgttgcccaaaccagacccgtctttaataaagttgttctccacccatttctgcatagtttgagaaactcttcagctgtagatcaaagacacttgaaatattcagctactgttcttacttcctatttattcaccagggaagcctgaagccagaatgccagacagcgcagacactattccatctcgcattttagttttaatgaaaatctctggtaggtagacatcatcgtttataaattaccaactcaacgtttgttttttgtttattttattttttgtagagatggggtcttgctgtattgcccaggctgttccctaactcttgcactcaagcaatcctccagcctaggcctccccacagtgctgggattacaggtgtgagctgttctgccctgcctcaaccaaaattttataggcctcatgcaaaagagttccagaaagactgagcacctgctatgtgtaatgttctctcttaggcttctatagtagagtacgacccttatggagtttgatacaggggaagagagaattaaaatacagtaaatgtataaattaggatgttctaaggacagacacaaatgaaccgcataggcttaaagaggaaagattccatcccctgagggtggagttctagagggaggaagagacattcgacctgaccttgaagggtgggtgcaacacatatgagcatgaaggggcccatgccaaatgtatagtgcagcaggagcaaaggggctaaggtgggaagttggaagactagcaaatgggccaatttgaagggagcataaagtcaggagatgagaatagtagggtggtgggaaggataggttttgaggccattaaatataagttgaaaaatggggccccactttcataggcccaatagtgcttcaaaagggaaatattggtgggttttgcttttcaacaagaacttaatataactagttgtgttttatagagataagcctggaaggggggattggaggagagcaatggttctctgtacattagaatctcctggagggctggtgtctgagtggcaccaccaaagattctgattcagctgttctggatcagaatctacagctcacacctgtaatcccagcactgttggaggcctaagccagaagattgcttgagcccaggagttagtgacaggcctgggcaacatagcaagatcccacctctacaaaatgaataaataaataaataaataaataaaaaacaaaatttgagttggtaatttataaactatggtgtctacctaccagagatttttcgttataattaaaatgtgatatggaataatgtattgtttggcaagctggcttcagggttcccaggtaaatagataaataaggaagtgcataatgtaagaacagtggctgacagtagcagtggcattttttatttttaaaaacattcctgataattctaatgagcagtcaaggtcgagaactactagaatagagagcagacatggggtaactggttaaggtattgcagtaggtcagagaggataacagggacccaaactctggaaccccagggatgagggagaagtcaaaggtgctaccagagtttgtgccacagctccactgtcccatggttgtagtttcatctactgataaagcagtgcaaagaggaagcgtgtggtggctgagatgggagtgagatttgaggaaagaacgcttatgggtaggaaatggacatgttgaccttaattttcatgttaggtaatgcccattgtgctctacagaacattcatgagttggatgactttgtatatgatctgtcctgctctccatttcaaaggcaagaccaccaaaattcacaagcttattatgttgtcactaatgtgtaagccaccagtttttctgcaagttggaagttttctcaacagtcaaatattcccccttctcactaatcttaaggttttaaagttatagctgcaaatctaaaaaaaaaagaaaaagtaaataaaacttattgacagaatgcctgatagtttatttacaggtttttgtttgtttgttttttgtttttctttgttttttattttgacacaaggtcttgctctgccgcccaagccagagtacagtggtacatcaaagctcactgcaatctcaaacacctaggcacaagcagtcctccctcctcagcctcctgagtagctgggactacagatgcatgctaccatgcccagctagtatttttatttcttgcagagacagggtctcactttgttgcccaggctaatctcaaactcccagcctcaagtgatgctcctgcctcagcctcccaaagtggtaggattatacacatgagccaccaccctcggcctactttacaatttgatgcaccttttctttacgtgactgtgatgcactttaatgggcagtgactttataaaatggtaactttattggatatgtggagccccaaatgggctgacgtgagaatgttggggtaggtggtgggtggctggatttagcaaagaaaaatgtaggctacccagttaactttgaatttcacatggatttttttttttttttttagtataagcatgaaatacttataccatacttttagcattaagcgtggaatttgggacataattatactaaaatatcattcattgtttatctcaaattaaaatatcactgggtaccctgtattttatcatatgttcgagtgccttctgtcagaatttggtgaccctttgagtctgttttaaaaaggagcatgtttggccggacacagtggctcacgtctgtaatcccagcactttgggaggctgaggcgggcagatcactagaggtcaggggttcaagaccagcctggccaacatggtgaaaccccgtctctaataaaaatacaaaaattagccaggtgtggtggtgcatccctgtaatcccagctacttgggaggctgagtcaggagaattgcttgaaccccagaggtagaggttgcagtgagccaagattgagccactggactccagcctggacaacagagaaagactccctcaaaaaaaaaagaaaaaaagcatgttcccacctccccataaggaaaggctcttcagaggaagttgaaggaacagaggctttatgtttgatttttgctttaatctgatgcctactgtttgattattcaatatttagagatggtactttggcaatcaagttatttctctccccaggttgcccacttcaatttttagtataaggatgtcccagagggataaatgccatcaaagttgtctttcttcttctgaactgtaactgggattccacaccctccttttccacccctccctagttgagcaataaaggggaaaataacagtatacaaatattcccaggccagttcctggtgtcaaggtacacagccatggatgaatcatgaggcttgagtgcatcagagacctaagcgtgggcaggaacccccagagtacccatgtgaatgttctgcttgctgcctcgcaccttttatgacaattcccacaagaagctatgtggtctgtttctacttctgaaagagcagcctttttcccttttttttttttttaaaccaccatcctttaaatcatttattatgtaactcttgtgtgctggtcagtcagtgtgtcaaaagtgtaaaaacttctttatttatttttttaatctatcttttaaaaaatattttctttctttttttcttttttcttcaaggcaggttcttgctctgtcacccaggctggagtgcagcagcacaatcatagctcattgtaacccagaacacctgggctcaagcaatcctcccacctcagcctcctaagcagtgaggactataggcatgcaccactacacctggctaattaaaaaaacatggccgggcacggtggctcattactataatcccagcactttgggaggctgaggcgggtggatacctgaggtcgggagttcaagaccagcctgaccaacatggtgaaaccccatctctactaaaaatacaaaattagccaggcacggtggcacatgcctgtaatcccagctactcaggaggctgaggcaggagaatcacttgaacccgggaggcggaggttgcagtgagccattgcactccagcctggcaacagagcgagactctgtctcaaaaaaaaaaaaacaaaaaaatttttttgtagagatgggggtcttgctgtgttgcccaggctgatctcaaacttctagccataagtgatcctaccgcatcaacttcccaaagcactgggattatgggtatgagctactgagccctgccaaatttctttatattaaaccaaaacgtacatttactgatatttggaaagaaagctcttttacttttatgccttcatccagtcttcatagatatcttcccttttacattataactgtaaatactgaggttagagaggttaactagttagttcaacagaataatataaatattgaataatataattaatgaataattagtgctgaacctgtcgcctcagccaggtctcctgattccaaatacagtttgccccagctccccacagtcttctagcttctctgccagtggagcaaattttccctaggtttacaggcctaagcacagattcttagttacttagtgcaagtattgccagagcccaaggggtgaattccaaagggtttttacaaggctatacataaaagataaagccctggcttgtatatcacttgcacataggagataaagccccagcagttgtatgtaaatttcaaaagcagagaagtatggcacaaagaaactcctgatagtaacactgtgttcccactttgcttaggggcatattggcaccgtagcatggtacacccttactgctacctgccatgaggccagataatagctagcagcccctggtctcattctactctggatgggtactgctgtttcctgaatgaaagacactgagattgatttcatgctaatgactgttggttaagagttcatgctttctattcacaatagcaaagacttggaaccaacccaaatgtccgtcaatgatagactggattaagaaaacgtggcacatatacaccatggaatactatgcagccataaaaaaggatgagttcatgtcctttgtagggacatggatgaagctggaaaccgtcattcttagcaaactattggaaggacagaaaaccaaacaccacatgttctcacttataggtgggaattgaacaatgagaacacttggatacaggaaggggaacatcacacaccggggcctcttgtggggtagggggaggggggagggatagcattaggagatatacctaatgtaaatgacgagttaatgggtgcagcagaccaacatggcacatgtatacatatgtaacaaacctgcacgttgtgcacatgtaccctagaacttaaagtataaaaaaaaaaaaaagttcatgctttgtggacaggtagcctgagttcattcatagctctactatttacctgaaaccttggactaattatttcacttttctgtgccccagtgttgtaatctgtaggatggggtactgcctgctccacagtgggactatgagaatgcttaaaataatgccaagcgcacagtcagctcaataaatgtcatctatgtagacaatgaaattcaagcataattccttaaacctttgtgccatacatccctttggcagtctggtaaagccttcattccttctcagcatcatgtttttaaatgagtaaaataaaatatataggattacacaggaaaccaattaaatactgctaccaagctatttaaaaatctatgatataatatgctttttaaattaaacccttaaatggatctagaggtaggtaaatgtctaacagcagatattttgaagttgcaatgaatgtaaatggcactttgagctatctacaactgaaatgcgatagaaaagtatctataatttctattagtgacagtcacaaatactactaatagtattgtggtttgttgcttatactcatcatcaaaggaaatactcaatttgagttaaaggtttaaataaagatgtatttttcccccatccaagttcatggatccctgaattctacccatggattccttggtcactggactccataggggtcacttggggaatgattgtgacaccaatgaaggaagccagcggatactgtttgctgtattatacctaccataggctcgtgatgaggaaataataaaataaataactgtaatgaaaaagaaaagaaaggaaaacaaaaggaacctaaaacagagaaggcaaatagctttccttttgagtgtcaattttaacagactccctgtggttgcgaaacaatgtgtctgaggctggctctgggttagagggagagtgctgttattgattagcaattcctgcatgacagcagagtggcaacagccatgcatctctgacctggcacagtcataagcatgttatagacataaagtgttagggaacaaataggctctagcaaaagtaaagagtgttcctcctctcatatcatcacttatatgtgtttataccatttatgttgtattttttacatgaatacttttagatttattaatctaatccaaaaaggtttgtatagctttctctatattaagagaaatatatgtatttcttaaatacacaaagttcttaaatctgatgccagcgaggattgcttccagccacaagtaacatatatcagattaatagtagttcattcaaagagggatttattttcctcacatgaaaaacagctctgtgggtgacccaatatagagcttgttcattgagccagtgattatatcaaggaactgggttcttcatatattttcattctttgatctccccctattgactttatagctgtatctttctcaaggatgcagaatggctgccgcagtctcaaacactgcgtgtgtgttcaaatcatgaagaaaggagattgagtgatgccagctagctctcttctcgtgactctcctttgtatctagaacacagtgtctttccccaaaacctgggtcatatgactacacctcaatacagcggagtctgggaaagcaaatatttgctttgcccaccactacaatagaaacgacaagggagaaagaaagggggttgggcatggcgttaattttgtcagccgctagggtctgccacccagaaaacagaagtccactaacaagcagggaactgattgttctgccagggaaaaagtctggcagtttcctactgaagaaatttggaagtcttgatggtccaggaaggataaaggcaaaaccttcattttcttttatcaaaaaggaaagccaagaaaaaaattagttaagtagaagttatgcacaaccctcatgtaactcttccatgttaatagcaggtaggctgcatatgaaaacatgatattatacaagaaaactagttgatgaagattgccctatttagcaccaattacttacgcaaacctaagttgactctgaaacaggaaccccatattaaacttttcaaacacatcagaatatgttactttgaacagattttatttaatccaaagagattatctttgaaaaaggtagatggtaaacatcgttatccctatttttgtatagtcaaataggcatagtagtaagttgtgtaaaattgacatccaaaccaatgcatgatactaaaacttggtgtacaaacagcagttacatcctattgctttgtatctacatctgtttctggagtcatataacatttgtagaatcttggaggtgttttaggctcatccttattttatccataaagaagactgacacctatagagattaactgacctgccaagggtcatggcagtttcactgctgagacaagaacacagatccctttacttctttctgagaaaagtacaaagtagtttaaagcaaaagcttccctgcttccagcacttctggctaagttgcgccgtgggaaaattgttttgtctgattcagttttctcatcttttaaactggaataatgctacctaatttacagggttgtttgaagaattaaatgaatgcatggaggtaaatcacttagaacagcggtaaattatacttttttattatttatttcctttgaccacccacaattatcatcagtgtcatcctcatcatcacaattaagattactaccacattaggctacataaactttttttttctctctctgttttataatttcaattttattttagattcaaggggtacatgtgcaggttttacatgggtatattgtctgatgctgaggtttggggaacaactgatgccatcacccaggtagtgagtatagtaccctatagtttttcagcccttgtctactcccttcccttccccttctagtagtccccagtgtctaccatcgtcatctttatgtccatgtgcaccattgtttagctcccagttaaagtgagaacatgcagtatttggttttctagcttatttttcctctcttaaatcacttctgtgacacgtaggccatgagatttattgtattttttaatgccttatttaaaaatttgtattatttaatacatttaatgcattattttttattatatttaaatattgatttatttgtactttttgccttattgctatattgtttcaaaaaatttaacattatttgagttacatgatttcaaatacatactgattaacattttaattagaaactttatgtctgatatgaattgccaaaatgtgtagttggtacaacctatgagtcattctgggttatctagaagaaactggtagcctgccccatactccagaagccttccccagtgtctagacctcagaagctgtcaggaatatgcacaggagaaggacacatggcaaatagctatttcgtctcttaaatgtatggtatgtgggaaccactgaaaaatgtaaagtttctacaaggtgctatttttattatttatggctctagagaacagagaaggtgaaaaatgtgagagagaagggaaagccaatagtatgtggccttcaaaacaaaagatcccacagatattgtcccaaactgcttcctggccctctagagtggagagggagggggaagacatcctattagagttcaacattctcttattatttccttcttttaattttctgggtatacaacagcaaatagttttgctgaagtagttacagaactagttggtgttctccaaccttcctattccaatacatactgtcatggatgggtacactaaaatctcagaattcactgctatatcactcatccatgtaaccaaaaaccacatgtacccccaaaagctattgaaataagataaatacattcttatttaaaaaaatactgtcatagggatgctaccttcttttcttttttgttagtaactatttgtgggatgtctttggtgtgtcaggctctgagcaatgccattttctcttggcttctttgcagtctctgtgtgaggcttacagtcatttttcacgtttgactcttcagaaggaagacagggctactggttctacatctggaactcttttcccacaacaccaacactgagaaatgtgacatggtgctgtgtttacatttgcataggaacttgcattataagttttatttgttgagttattggctttttttttttaataacccacatcagtatatagaactttgcaataggcatttttgttttaacttcatttctggtgcagttttattttcctacccttgtctttctattttctctttcatctgctttagacttaaactgtgttttatgtattgctgtaagcctctttaaaccctttctaaaacaaagcagggaatacataaacaaatagttttttgttttttgtttttttttctttgtaacagaaatcgacttaaagcctccagagaagtagaatctgtagaccttccacactgccacctgattaaaggaattggtatgtatatgaaaatgcttgttgggcacattgcattttttggccattaacattaaaacactcattaatggcattttagcatgaaattactgcttttcagtggataaatcacattagatcaacaaaaacctctttggtcaacctcttgatctgatgaaccctgtatttattcttctttcctaccctcactgtaaattattcttttttgtgtgtaattctatgtttagcatttgatttcttgcttgttttgtgacttctctgaactatttttgttgcgtctgtattgtttgtcaggtatggccgctgcagtctgtgttctgtgagccttgtggtcagctagtgaaggaagctttatgtaggcagtgacagcatttaccctgctcactactctataactaggatctgatcttatggctaacacgtaactgaccaatatggtttggttgtgtccccacccgaatctcatcttgaattgtagttcccataatccccacgtgttgtgggagggacccagtgagaggtcattgaatcatgaggtggttaccctgtgctgctgttctcgtgatagtgagtgagttctcatgagatctgatggttttataagggcttttcccccttttgctcggcacttctccttgctgccgccatgtgaagaagggtgtgttttcttccccttccaccaagattgtaagtttcctgaagcctccccaaccacacggaacagtgagtcaattaaacctctttcctttataaattacccggtctcaggtatgtctttattagcagcctgagaacggactgatgtaccggcacttcacaatatgtattgtaaaaacttgtttttattttatcttctaagctatgactgcagagggggagtctccctcttcccttgactttatgtaggatgtattgtggagtctgagtctttgagtaggggttcctaagagcaagccccaattttgctatagataaggagggatctgtccagattcttctccagcactgagggtctctctggtgtgtttgcagtttttctccaaggtagagtctgtgtcttgctgtcttttaccctttatcatctactaagtacatgtccctagtacataatagactagtagttagattatcaatgaacaataaatattggctttccttttttttaaattttaattttttttttttttttttttgagaggtggcctcactttgtcacccaggccagaatgcagtagcgcaatcttggctcactgcagccctgatatcctgggctcaagcgatcctcccgcctcgtcctcccaggtagctgagactacaggcacatgcccccactcatggctagttttttatttttgtagagacagggtcttgttatgttgtccaggctggtcttgaactcctggcctcaagcaatcctcccagcttggtctcccaaagtgctgggattgcaggcatgaggcactgagcccagccaatattggctttccttagatatggttcatggtatgattagaaacaaaaagaattagcagtcaaaacacctagtttctagttctattctgccacaatgtaaccttaggcaaagttggtttttgtatttgtcacctataatgatgagtttgtgattagactaatggtttttagactttaaaaagcctgggaccatttatttataatcttactctgagagccacagtgtggaaataactagactgtcattgagtcacttctagtcctttacaacaacatccttctctagaggtaggagagacaatttaatattttgttttactctttagaaattaaaactcgggttacatggaaatgttctcttctctgaataggtaacattgttaaacaagttttgagtgtccttccatctttttctttttatgaatactcctgtacataatttttaaaaacataagtgaggtcaaattatgcataatatttcaaaactagctttttgtacttaatactaggttttggaaacttatgtttgtacataatgttaccttttcttcacaactgcacagtattttttgtgcaaagttcatataaacagtgtatgtgcaaacaatatagaaagatataaaatggaaagtaaataaaaataaaaatctctcatcaaactcttcatcacccccaacagaaataaccccaaagataaagctcccttttttatctttcctgatagtttcagtgcatttgcaaacaaatatattgactctttttttcacaaatagaattttagtgtaaatatttcacaaccttcttcattcctaaaacagtgtgagcagctttccacatcagcatatatagttactttgttctttttaatattttcacattccatgatttatttaaccattccccttttaatgtacatttgggttgttacagttttttgcaactatgaacaaatcagtgaacatcattgctgttgagtttgtgtgtctgtagaatatgtccttaacaatgggattgttgttcccttagaatatgtgtttagagttttgacagtcattgctaagttgctctcaatttggcaacagtaataaactcagtacctcatagttgtaaccacattcactccagacagagttctcagcactcttttagtaaaaataaaccatcagttgacagtgccaccttcagagtttctctacaaataccttgcttgcctccctttctttttttcttcttttaaatcagcttcctcaggttgatctgcctctcattccttaggcatctgtttcctatgtgttctttctcctttttttcattgatacttttgtatttccccagttctacctcccctcccctagactggttggctgtcctggaatttcccttccttctttcaattgcccaaacactaagtgggaggaggcaaactcatatcaaatagcagattgactacatctgtgctggatcatgcagacagttcaagagtcccaagtaacttagcagcttcatcttgccttccagctgcaatcaagaagagccctctcagaactggtcactcagcaaaagccagatggcattagtaaaagatgttgggcaagggtgggagtttgggccagtgatctcttaggttacttttgctgctgagttaataattgtcacattattaaacagcccttggccctgggaagcccaccttctgtgaatacaagtctcagagtagacaatagggcacaaccagccatgttacatgacagactgccaagtgcattcctcttacaactcactgggatggagcgctcctcagagaaaaacaagcccagcaacatttgtattctgaacaggcatctgtctatgtttgtgacctttatgttgtgatgtgtgtgagctgctgtctggaattggaaagaatgaggaaatatgtcacctatggcccctcttgtgaagtgttaaatgcctctgaggcacttcaaaaggcaacagagcggagaggatgagtgattagaagcacatttgggatacatttttagatctaattagaattgtccttttttttttcttttttgcttttgccctgtggttagcacacaccatatgaacgtttgtcgaatgctatgttagtgatgcataatggttaataataacttttggttatatatctttaacaacagttgcttattcacaggtctttgataagaagaaataacaatgtgctggacacacatttctatacaggcaaaagtgactttttatgatagagagggctgtttcttattttctgttttgaaaacagtagtagctatgcacttgaggccaactaatccctctaagaggtgaaccttccttcccccttgcccttgattcccatcaacacacacatacatatgcacacactaccgtgcttcagtcaccatcactggaagtgaactatgtgcaacttttgggtgctttatatatatcatatcatattgtgtctgctttaataaatcatagttattgactacatatcatacaggatgtgtgccttctgtgggtcagaaaataagttcactatttagtccttttcaaaaattccttcccgatctatcttatagacagaaactaagcttttatacacccaagatttggcagattaacatctgcatattaaaatgtcaagagctagttaactttatttgaggcttaaaagttaaaaaatctgattttctaaatgtctggccttcaaaatttgagtggactgtctttctcaagataactaacaattttatgcacttggcagtcaagacctttacaataactgctgcttgggagattgaggggaaaaaagcattaaagtttgtggcccttataatcaagtactttacagtctactgatgggagaaaaggaaaacaaaacaaaacaaaaaaccactgtgagatatagatatgtcttttctttctctagcagataagtacctgaggctcaaggaggttaagcaacttttgcaaattcactttccaatatagtgtcttttcccagggtgactaatgtatatacttgatgagtgaaccagaaaagtaggaaataatatgttacatatgggatgctctattgggtatagtaaaggatgcgttgctgttataaaattatagtcacttagaaaagagatgtttatttttatttttctctcatcagtcttaaggtaagtgaatggcctagggtagttaggtgactgtgttccatatggtcattcaggggcaaatgctgatgaagcaacacagctgtcttcatctaagactagaactctgcttgttgccatttcccagcaggaaggggttgaaagaaaatttatgtagatttttttttctacccagtagttgcatatatattgtattctcacatcctattgacccaaacttagacatatggccacatctgtcagccagaaagggtgggcaatgttatctatagctgtgttgctacgtgcctattgctaaaaaggctaaaaaggaagaaggggaacatggatgctggtgaacacttggccacctctgacacagataattgctaaagtaataagaagagatggaaattaaatgtgctaagctaggagactttctaaagaaagggtttgtcatgctacgctgtgccattcatgtgtttttttgctcatgctgttccttgtgcctggaaattctccccctaattcccctgagcagtggatgcagtggataccctccccagatcccccccaacttccctgagtgttggctaccaaaagctctgagtgcacccagggagctaagtcctcctgcccacaggcaataatggactgacacggggtagacttaaagaaataagaggcacatcaatcaattgaaatgtgtgggaccttacctggactctgaattaaacaaactgtaattttttaaagctacaccttttaaacatgattggctatttgaacactaactagatatttgatgatattgaggaattattgtgaatttttagtgtagtaatgatattgtggtttgtataaatatatttagggataatatgatgcctcagatttgctttaaaataacacaggatgaggataagtggtaggactgcaagggaaacaagactggccatgagctgataactgttgaaggtgggtactgggtatataagggctcaccacaccattctcttgatttgtgtctatttcccataataaaaagtttaaagagagagaaccgatgaaggggagggagagagtcaagcacacaataagagtgacaaacagtgccaaatcagcccacagtattaagttttcacatatttacataaatatcacctggaatgcaatattgaaattaatgtatatcactagaataaaaaaagtaaagatttaataaatttgttttgaaataaaataagttgaaatacgaaaaagacagaaaaggttttgaaagaggttttaaagaaaagtgcaggatattcattggtaaagatgttggtgagaggcttggaagcaaaacttcaggggaaaaagacaacatatggaattgaccacaattgaatttacaagtgaagtggctttacagaggaatcaggggatgtttctgagagaggaaattcattaaattctaacttgaatattttctgtttgcctttaagtcagagcaaaggctttgagtcccagcttcccagtttgtgaccttgagcaattgcttaacttttccaaagcctccaatagtcttcactctaaaataaaagataatcatatgagatattgtatgcagggtatttacaaggagcctggtacttggtgtacctaatgtatgttagttattattattaaattagaggagcaaaaatttctctagcattgactgctcctgacataatcacaccgaagaggggatacacgatgataaaaccttcctgcagtagtggctatagaaatgatgacggggagaagatctggaaaatattccaaagaaggctacagatagatacattttttccattggaattaggcaatggagttaaacagaagttacaatatggttgaaataaatgtatttttttaaaaaaagatttctctttccttaattattaaaaaatatacaattttgtagaaaattttaaacaaagtataaagaaaaaaataaaaatcattcataatcctatcaaagaagcattgttaattttttctatatatcttctttttccacgtgtatacttggaaattaaattttctaaaataattttcaggaaaaacaaattttaattaattgagcttctactaaataggactgaaaagcaaaacctggactagaattctctctcggtgtgtgtgtgtgtgtgtgtgtgtgtgtgtgtgtgtctgtgtgtacatgtgtatgtgctgtgtatacatgtgtatgtggtgtagcgttcccctgattcttaacttattaccagtggacaaccaccgtggaactagagtctagtcattcttaacctttttgggggaatcacagtctcttttttgaatctgatgaaaatcaaggaccgtttttacagaaacgttctcatctgtgcatacatgagacattttgcattgcatagaatttccgagggttcacagatactttgaagcccaaaagtgatccacagaccccagattgagaactcctccgctatgccatgcttaagcttatttctgtgtatcttctttctgaggagcaggcagatgggtcatctttacaatgtgaagttcttggcatttttattttgttttgtttttctgcactacgatggagcaagcaacactggaggcaactggctaaatgcaaactcatgaagcaagaccaaaatggctggatagatagatgctgtttggttttgacaacctagaaataaccttgaagaaatcctatggagaagtcttaaagaggaagattggattttgtagactcaaagaatgtgtcatggtttggcttaatctaagccatttttattcttcttttcttgtgtttgggtctattatctgtctgtagaatttatacagtgagactgctggggaaagtcttatgtctaattatttgctgtgctgtgtggagtgtactgcagacagtcaataaacaatcaatagtaattgtagcctgcctcagagacaggagttagaaacttcaactggcttaggtgcatggtatttttcattaattttcttctgctagtttttttctctaatttaaagcctaaatttaaagattaaatagaaaagctttctttgcttatgagcacaagtaggcactgtttttaaaagaaggaatatataatcccaggtgttttacctctgttaatgagaaagatgtctgtttgcttcagattgaatgagcaaagaagaggacaaggatatttgcatggttaaatgcctatgagcccttccttcagaaagtaatattcccctgatgtcaattacttttatacggacatctggatgtttatcatgagagtgtacagatgtcaactttttcagtattatagctggaaatgtggtgataacttgactttgatttgagtaaacataaaatatctaacatttaaagtcagaagttcacttcaggaaggggtttaaactgacatttattaaaaagaatggttccttggaaaaaacatcagaaccatccctaaagatacagtcactctgataaagtaaacagagtcccagttatgctctgtgtaacaaataacagaacttgaacatgacatttatctgttccttaaacttacagaagctggctctgaagatattgacatacttcccaatggtctggctttttttagtgtggtgagtgtcttcttccttccccaaattcagcagaggagatacaagggtatttgatgagggctgcagaacagtaagttgcttttaaaattcattttccaaaatgcattctgaagaaaagagaggtcaaacaagatcttggaaaacttcctccagcttttctaaatgtagagatgaagactctttgcccattgagatagtgttctttatttccccattgcattgcactaaaatattccaatgcaatctgtgttttgttttgttttttcttttttaattttttttattttttgagacggagtcttgttctggttgccccggctggagtgcagtggcatgatctcagcttactgcaacctccgcctcccgggttcaagcaattcttttgcctcagcctcccgagtagctgggattacaggcgcccgccaccatgcccggctaatttttgtatttttagtagagatggggtttcgccgtgttggccaggctggtctcaaacacctgacctcaggtgatcgcctgcctcagcctcccaaagtgctggcattacgggagtgagccaccacgcccagcgcaatctgtgttttaaatgtgcactattaagagggatatttgaggtcttactgtggatactcaatactaacattatactattttaaatacagcatctactcatctttctattactattcaacttgaagcaaatattcttgccattattatttattttcaaatattataccaaccttgcccttttgctttctttcttttttcccctgaatagccaatcataagtggaaagtcattgagtttatttacacccttcattttgccttgattcttgtaagctgaaaaacaatatcctttctgggtatacaatagaaagactttaaaaacaattggcttgtgaatattgttgtgaatattgttgaaactagcttgtaacaatgtccattctaattggaaatccagataaggggacagatgaggaggttctgaccacctacctccctggcttgggcagacataggagttcttggcatcttcataggtccagtttttctggaggaagaagtaaccaactctgacacctgactgtaattattccatttcctctcaacatccattattttcaggctctgagactcaagagggatgtgaaatactgggagatacttagaagggagtcaccacactaataaaatagttgttagacttatgagaaaggtgagagaactcaggttggagtagaatgagaattagaacactcttcaggttcctgatggtttttatgtgaaagacagtgagcagctggttattaccactgaggcaataaagagatactgtgggctttagcagaaacaccagtatatgtatttagtttttaaaataaggttttaaaaggaatgttttatttaattgcctacacagaatgaataaagtgatatttatagtaggactctgggtttgtttaggagcacatgcttgcacatgtgtggcttaggaaaaaccactgggaccactagtctaaaatattcataagtaaagatgcaaacattctgaataaagtagaaggcagttgcattgatttttttatttgtttatttgtgttttttgttgttgttttgcaaggatgtgttcttggagatttttataatctagaattcacctatttcaagatttctctccagcccccatagtaataaatctgaagtaggagggatgaggtctccaaacacataaatctacagccattttagcttgggggcatgttatagttacaaagatcttatagccatatcaatagaactttttctgctttttttctgttaccctcctttgctcatttgactttttttaaaatttagaaacattcccagtttgctgctgtttttcatttacttggcattgtctctaataaaacctagagtgtactctcttctaaataaagaggtcctacattgtggaggttgttcattcttcttcctagcattttagctcatctaacccaacctattttacagttatgggttgagggtcacctcaaaactaatgtcacacttcatgaagaattggatgacatagaataaaatataaaaaatgtaaacaatgtgagtgtgcttaacaccactgaactgtacacttaaaaatggtgaaagtgatgaatgttgtatgtattttatcataattaaaaataaatttttaaaaagagaaaaaatacttaaataaataaggagtgcgaacataaccatgactagttatcaccatctgatagtgcttcctttgcatgtaaatcatgcttttgttttggggacattcataaagaatagggattaactgaagtggcactgccatgtaacaatagcataattccagtttgttctacttaccaggcttgccctccatgaaaatatacaattgtagataatcttttttaattggagagatttcctcttatgtccaattttatacataaagtaagacttttttattgtgtgcctaaatttgtgtaaatatgactgcatcgtattagtaaactgaattaggtagtgcattcacataaaatttaacatcaccaagaaggctttaccttaagaatgtaatgatgaatcaccattttagatagactgataggtaatttattaactgatttaaaagagaaaagacctatatcatctcagtgagtaccaaaaagcatttaataaaattcaatactcattcctaaagttccaagcaaactagaaagataaggaaaattcccacaaaactacagcaaacatcattcttgatggtgaagcattggctgcatttgcattaatgctcagaacaggaagaaaatacccaacaccacaaccatcagtaatctactagagttcttagtaattcagtaaaacgagaaaaagaaatgtgagatagaaaagaaaaagacaaaactgtcattagagaagcagggactggctcaattgcccaggctgatgtgcagtagtgcaatcatagctcactgcagcctgaactcctaaactcctgcgctcaagaggtccttccacctcagccttccgagcagctaggactacaagtgctcaccataacactcagctaatttttttttttttttttttttttttttttgtagagacagagtcttgctatgttgcccaggctggtctcaaactgctggcctcaagcagtcctcccacgtcagcctcccaaagtgctggaattataggcatgagccaccaggcctgacctaaagctgtagtaatttaaaaagtgttatattggcacaggaatagacatgagacattaaaataacaaaacagagagtccctaaatagaccaatatgtaaatgtcagagatctagcacatgataaaggtgatattttgaatcagtgggagaaggatggactgtatgccaggcactgttccaggcactgggatctagcagtgaacaaatttccacagtcagtatgtagatgtcacttttctccaccctcagctctccctggaatcacctagtccaccaaccttctgattactctctgaagagaataaatccctgatcttcttttcagttattttcaggctttcagtattccacctccccgttattattttttctgttatcttttctctgttttttgagtttttgtggctttatgccactactttaaccacaatctctatttatccttcatgtacagttcccatgttagtccataaaaatacttaagcttttgtatttaacatttttcaccgttttggaaagggtctaaaattcccaggactccacagctttgcaccagataagcctggaggaatactaatgatggatctaaaagaagaaaaaccaagggcacgggaattaagaatcagtcgtgggtttgatttggcctcattcaatccacatggcatcagcactttcatagacaacggtaagagccaatgggctaccaacatttagtaacgtgtgatggttcacaaatgactgtgaaaaatagatttggatcatatttctaggaagagaagaacaattaactcatgagtgatttctgtattcttcattacaaagaacttgttcatttgcctcttcagctggcagtaagttatgctacattttgaaattcctaacaggtaacacctgaaagaatgtttagatttcataatcttttcatatacctacgatcatcacatttaaaaaagaactgtatttttgaattaaagtagaaacagattatgcatgaattctgtatatggagtaggaaacactttcttaaaggtcagggagccaatgatcagaaataacaccagacggacagcaataggaaagacagagaatgatctgttaggtcgtctaacagcttatacattcaacctttccttgcctgtggtatttaaatgtcagtgcctgcccagaggtcccgtagttatgtcttgtaaattaactctgttctttcaattctttagatgacacagtttatctctttgttgtaaaccacccagaattcaagaatacagtggaaatttttaaatttgaagaagc

SEQ ID NO: 13510 - DNA, 570 bp, Homo sapiens
ccgcccacggagctgctggccaggccggagcgaggcagcgcgcccggctcccgcgccatggggcggctggtggctgtgggcttgctggggatcgcgctggcgctcctgggcgagaggcttctggcactcagaaatcgacttaaagcctccagagaagtagaatctgtagaccttccacactgccacctgattaaaggaattgaagctggctctgaagatattgacatacttcccaatggtctggctttttttagtgtggtgagtgtcttcttccttccccaaattcagcagaggagatacaagggtatttgatgagggctgcagaacaggtctaaaattcccaggactccacagctttgcaccagataagcctggaggaatactaatgatggatctaaaagaagaaaaaccaagggcacgggaattaagaatcagtcgtgggtttgatttggcctcattcaatccacatggcatcagcactttcatagacaacgatgacacagtttatctctttgttgtaaaccacccagaattcaagaatacagtggaaatttttaaatttgaagaagc

SEQ ID NO: 13511 - DNA, 1876 bp, Homo sapiens
tgctttctatgtaagtttctcactggaatagcgagtgagaaatgtgtttgaagactagggaaacgagaaaggtatgcgggctgctagagggtttcgggtgggttgtttgaaaaaggaagtgaaggaattcaaagtttcacatcatgagcctaatgtaaggcgtgtccgggccgtcccgaaggtatctggggaaataggtttgtgaggacaaagaccagggccaggcccagggcggagcctccgcggccccgacgcagggactcggcctaggcggaggacggggcggagcgcggccggcaccatcgagccgggaagatggcaccgcccacggagctgctggccaggccggagcgaggcagcgcgcccggctcccgcgccatggggcggctggtggctgtgggcttgctggggatcgcgctggcgctcctgggcgagaggcttctggcactcagaaatcgacttaaagcctccagagaagtagaatctgtagaccttccacactgccacctgattaaaggaattgaagctggctctgaagatattgacatacttcccaatggtctggctttttttagtgtgggtctaaaattcccaggactccacagctttgcaccagataagcctggaggaatactaatgatggatctaaaagaagaaaaaccaagggcacgggaattaagaatcagtcgtgggtttgatttggcctcattcaatccacatggcatcagcactttcatagacaacgatgacacagtttatctctttgttgtaaaccacccagaattcaagaatacagtggaaatttttaaatttgaagaagcagaaaattctctgttgcatctgaaaacagtcaaacatgagcttcttccaagtgtgaatgacatcacagctgttggaccggcacatttctatgccacaaatgaccactacttctctgatcctttcttaaagtatttagaaacatacttgaacttacactgggcaaatgttgtttactacagtccaaatgaagttaaagtggtagcagaaggatttgattcagcaaatgggatcaatatttcacctgatgataagtatatctatgttgctgacatattggctcatgaaattcatgttttggaaaaacacactaatatgaatttaactcagttgaaggtacttgagctggatacactggtggataatttatctattgatccttcctcgggggacatctgggtaggctgtcatcctaatggccagaagctcttcgtgtatgacccgaacaatcctccctcgtcagaggttctccgcatccagaacattctatctgagaagcctacagtgactacagtttatgccaacaatgggtctgttctccaaggaagttctgtagcctcagtgtatgatgggaagctgctcataggcactttataccacagagccttgtattgtgaactctaaattgtacttttggcatgaaagtgcgataacttaacaattaattttctatgaattgctaattctgagggaatttaaccagcaacattgacccagaaatgtatggcatgtgtagttaattttattccagtaaggaacggcccttttagttcttagagcacttttaacaaaaaaggaaaatgaacaggttctttaaaatgccaagcaagggacagaaaagaaagctgctttcgaataaagtgaatacattttgcacaaagtaagcctcacctttgccttccaactgccagaacatggattccactgaaatagagtgaattatatttccttaaaatgtgagtgacctcacttctggcactgtgactactatggctgtttagaactactgataacgtattttgatgttttgtacttacatctttgtttaccattaaaa

SEQ ID NO: 13512 - DNA, 1653 bp, Homo sapiens
ggactcggcctaggcggaggacggggcggagcgcggccggcaccatcgagccgggaagatggcaccgcccacggagctgctggccaggccggagcgaggcagcgcgcccggctcccgcgccatggggcggctggtggctgtgggcttgctggggatcgcgctggcgctcctgggcgagaggcttctggcactcagaaatcgacttaaagcctccagagaagtagaatctgtagaccttccacactgccacctgattaaaggaattgaagctggctctgaagatattgacatacttcccaatggtctggctttttttagtgtgggtctaaaattcccaggactccacagctttgcaccagataagcctggaggaatactaatgatggatctaaaagaagaaaaaccaagggcacgggaattaagaatcagtcgtgggtttgatttggcctcattcaatccacatggcatcagcactttcatagacaacgatgacacagtttatctctttgttgtaaaccacccagaattcaagaatacagtggaaatttttaaatttgaagaagcagaaaattctctgttgcatctgaaaacagtcaaacatgagcttcttccaagtgtgaatgacatcacagctgttggaccggcacatttctatgccacaaatgaccactacttctctgatcctttcttaaagtatttagaaacatacttgaacttacactgggcaaatgttgtttactacagtccaaatgaagttaaagtggtagcagaaggatttgattcagcaaatgggatcaatatttcacctgatgataagtatatctatgttgctgacatattggctcatgaaattcatgttttggaaaaacacactaatatgaatttaactcagttgaaggtacttgagctggatacactggtggataatttatctattgatccttcctcgggggacatctgggtaggctgtcatcctaatggccagaagctcttcgtgtatgacccgaacaatcctccctcgtcagaggttctccgcatccagaacattctatctgagaagcctacagtgactacagtttatgccaacaatgggtctgttctccaaggaagttctgtagcctcagtgtatgatgggaagctgctcataggcactttataccacagagccttgtattgtgaactctaaattgtacttttggcatgaaagtgcgataacttaacaattaattttctatgaattgctaattctgagggaatttaaccagcaacattgacccagaaatgtatggcatgtgtagttaattttattccagtaaggaacggcccttttagttcttagagcacttttaacaaaaaaggaaaatgaacaggttctttaaaatgccaagcaagggacagaaaagaaagctgctttcgaataaagtgaatacattttgcacaaagtaagcctcacctttgccttccaactgccagaacatggattccactgaaatagagtgaattatatttccttaaaatgtgagtgacctcacttctggcactgtgactactatggctgtttagaactactgataacgtattttgatgttttgtacttacatctttgtttaccattaaaaagttggagttatattaaagactaactaaaatccc

SEQ ID NO: 13513 - DNA, 4238 bp, Homo sapiens
ctttggggttctgtgtgcagcgagcatggtgtccttggcaccagggtttcggcagaggagcctagcgtgggcctacttggactcctccgcgtggggcagctcgggacacccgggcctgcaggagagcggggttctaggctggccccggctctgcagtgcagccgggtgcctgccactcgcggggctctgtcgcagtactcgtgcctggcgcctcccctcagccacagagaccgcagtagctccaaccatcgcacccctaactgggccacgagttctctgattgccagacctgttgtctttgccactcactgttctgagtaattggagagtcgtgtattcactacacgccaaccagagtggtcctgtaaaagcgtaagcctagtgtagatacgcttctgcttaaaactcttgagtggctcccagtgcttttagaacaaaatccaaacgcctttccgaagtcgacaaggcccagcttgattgagcagaagatgtgataggagatgaggagcggggggcttctgcaaaagtgcttcggtcgctcaggcttttggcacattttgcttatgcaacctagttctttctaccttagggccttttcttgggaaagttgggagtctcactctgctgcctaggctgagtgcagtggtgtgatcgaggcgcactgcagccttgacctcctgggctcaagcgatcctcacctcggcctaccgagtagctgggactacaggcacgcgccactacactcggatttctgacagtcagacttgtccacaagaactcaactggcaaggctgcttttctgtgctaaaactggggagctagtgggcaccatgaagatcttctgcagtcgggccaatccgaccacggggtctgtggagtggctggaggaggatgaacactatgattaccaccaggagattgcaaggtcatcttatgcagatatgctacatgacaaagacagaaatgtaaaatactaccaaggtatccgggctgccgtgagcagggtgaaggacagaggacagaaggccttggttctcgacattggcactggcacgggactcttgtcaatgatggcggtcacagcaggtgccgacttctgctatgccatcgaggttttcaagcctatggctgatgctgctgtgaagattgtggagaaaaatggctttagtgataagattaaggttatcaacaagcattccaccgaggtgactgtaggtccagagggtgacatgccatgccgtgccaacatcctggtcacagagttgtttgacacagagctgatcggggagggggcgctgccctcctatgagcacgcacacaggcatctcgtggaggaaaattgtgaggccgtgccccacagagccaccgtctatgcacagctggtggagtccgggaggatgtggtcgtggaacaagctatttcccatccacgtgcagaccagcctcggagagcaggtcatcgtccctcccgttgacgtggagagctgccctggcgcaccctctgtctgtgacattcagctgaaccaggtgtcaccagccgactttacagtcctcagcgatgtgctgcccatgttcagcatagacttcagcaagcaagtcagtagctcagcagcctgccatagcaggcggtttgaacctctgacatctggccgagctcaggtggttctctcgtggtgggacattgaaatggaccctgaggggaagatcaagtgcaccatggcccccttctgggcacactcagacccagaggagatgcagtggcgggaccactggatgcagtgtgtgtacttcctgccacaagaggagcctgtggtgcagggctcagcgctctatctggtagcccaccacgatgactactgcgtatggtacagcctgcagaggaccagccctgaaaagaatgagagagtccgccagatgcgccccgtgtgtgactgccaggctcacctgctctggaaccggcctcggtttggagagatcaatgaccaggacagaactgatcgatacgtccaggctctgaggaccgtgctgaagccagacagcgtgtgcctgtgtgtcagcgatggcagcctgctctccgtgctggcccatcacctgggggtggagcaggtgtttacagtcgagagttcagcagcttctcacaaactgttgagaaaaatcttcaaggctaaccacttggaagataaaattaacatcatagagaaacggccggaattattaacaaatgaggacctacagggcagaaaggtctctctcctcctgggcgagccgttcttcactaccagcctgctgccgtggcacaacctctacttctggtacgtgcggaccgctgtggaccagcacctggggccaggtgccatggtgatgccccaggcagcctcgctgcacgctgtggttgtggagttcagggacctgtggcggatccggagcccctgtggtgactgcgaaggcttcgacgtgcacatcatggacgacatgattaagcgtgccctggacttcagggagagcagggaagctgagccccacccgctgtgggagtacccatgccgcagcctctccgagccctggcagatcctgacctttgacttccagcagccggtgcccctgcagcccctgtgtgccgagggcaccgtggagctcagaaggcccgggcagagccacgcagcggtgctatggatggagtaccacctgaccccggagtgcacgctcagcactggcctcctggagcctgcagaccccgaggggggctgctgctggaacccccactgcaagcaggccgtctacttcttcagccctgccccagatcccagagcactgctgggtggcccacggactgtcagctatgcagtggagtttcaccccgacacaggcgacatcatcatggagttcaggcatgcagataccccagactgaccactcttgagcaataaagtggcctgagggctggggttctgagtggctcatggctttctagcggggaaggctgaaggccctcctctcctctctgggagctgctcggcctcagggatgggaaagactgcgccgtgttgcatcttgttgcatctttgcactgctggcctctggctccagctgtggcaggaagcatgagagggtgactgaatttggagccctggaggggctgggaagacccccctgcttgtgcttctgaggtgctgagaatgctccaacacagagacatctctccccagctgggaagggagtggaagcacagggagcttgtggggctggccggtggggttgtccacgccgcccttggcgagcagtccccgtggcgggagcctgtcctgtctgtctcactctcgaggatctccgggtccctgctcttctggcttctgctaggagggtggagatgctgagttgtggctgggtctctggggcttgaagaccctggctgggcccgggctgagaggcctgggttctggccctttcacctgacaggtaacttcaagccacatccataggtgtctggcctcagtgctgcaccagctggtggcctgccaggacctgagactggacacaaggcagctgtcccagagcagttcctgagatgcaggcccaggaaagtggctgtcaggggagctgggaggcagccctgttccctgcacctccctcagattggaaagcccctcctgcaggtggggtatggcagggagcagcccctgcccagcgccgcttcaccaggaaggtcagtaggtgccgtggccttgcttctctcacacactaacccccctttggttatgtcccagctctcagaggtaacagcagacaccacgtgagagaacccagtggcctctggctcgcagcttagaaggtgaggcttgtgccaggccagccgagccgcctgtatgagcagagttccggtgtcctcggattcagggcagacttgggcagtgcctgtcctgcagttgggggcaggaactccctcccctgcccccaggcgtgcccctgaggcctggccccagcttgtcgctgaaataagtggagaacaccagccttgagcctcacagttttattttctcctcgttatccatccttcctttcagcaccagtaaggaaaaagaacacctctcttcgcaaaatattttatcaggtgtaaagacttgtttttcttctagggaagaaccgtctggatatatatttgataatgtttttaccaaaaccataggtgtgcttaccatagaaaacccctaatgtcccatgaagatacaatacagaaaaaaa

SEQ ID NO: 13514 - DNA, 2204 bp, Homo sapiens
gatttctgacagtcagacttgtccacaagaactcaactggcaaggctgcttttctgtgctaaaactggggagctagtgggcaccatgaagatcttctgcagtcgggccaatccgaccacggggtctgtggagtggctggaggaggatgaacactatgattaccaccaggagattgcaaggtcatcttatgcagatatgctacatgacaaagacagaaatgtaaaatactaccaaggtatccgggctgccgtgagcagggtgaaggacagaggacagaaggccttggttctcgacattggcactggcacgggactcttgtcaatgatggcggtcacagcaggtgccgacttctgctatgccatcgaggttttcaagcctatggctgatgctgctgtgaagattgtggagaaaaatggctttagtgataagattaaggttatcaacaagcattccaccgaggtgactgtaggtccagagggtgacatgccatgccgtgccaacatcctggtcacagagttgtttgacacagagctgatcggggagggggcgctgccctcctatgagcacgcacacaggcatctcgtggaggaaaattgtgaggccgtgccccacagagccaccgtctatgcacagctggtggagtccgggaggatgtggtcgtggaacaagctatttcccatccacgtgcagaccagcctcggagagcaggtcatcgtccctcccgttgacgtggagagctgccctggcgcaccctctgtctgtgacattcagctgaaccaggtgtcaccagccgactttacagtcctcagcgatgtgctgcccatgttcagcatagacttcagcaagcaagtcagtagctcagcagcctgccatagcaggcggtttgaacctctgacatctggccgagctcaggtggttctctcgtggtgggacattgaaatggaccctgaggggaagatcaagtgcaccatggcccccttctgggcacactcagacccagaggagatgcagtggcgggaccactggatgcagtgtgtgtacttcctgccacaagaggagcctgtggtgcagggctcagcgctctatctggtagcccaccacgatgactactgcgtatggtacagcctgcagaggaccagccctgaaaagaatgagagagtccgccagatgcgccccgtgtgtgactgccaggctcacctgctctggaaccggcctcggtttggagagatcaatgaccaggacagaactgatcgatacgtccaggctctgaggaccgtgctgaagccagacagcgtgtgcctgtgtgtcagcgatggcagcctgctctccgtgctggcccatcacctgggggtggagcaggtgtttacagtcgagagttcagcagcttctcacaaactgttgagaaaaatcttcaaggctaaccacttggaagataaaattaacatcatagagaaacggccggaattattaacaaatgaggacctacagggcagaaaggtctctctcctcctgggcgagccgttcttcactaccagcctgctgccgtggcacaacctctacttctggtacgtgcggaccgctgtggaccagcacctggggccaggtgccatggtgatgccccaggcagcctcgctgcacgctgtggttgtggagttcagggacctgtggcggatccggagcccctgtggtgactgcgaaggcttcgacgtgcacatcatggacgacatgattaagcgtgccctggacttcagggagagcagggaagctgagccccacccgctgtgggagtacccatgccgcagcctctccgagccctggcagatcctgacctttgacttccagcagccggtgcccctgcagcccctgtgtgccgagggcaccgtggagctcagaaggcccgggcagagccacgcagcggtgctatggatggagtaccacctgaccccggagtgcacgctcagcactggcctcctggagcctgcagaccccgaggggggctgctgctggaacccccactgcaagcaggccgtctacttcttcagccctgccccagatcccagagcactgctgggtggcccacggactgtcagctatgcagtggagtttcaccccgacacaggcgacatcatcatggagttcaggcatgcagataccccagactgaccactcttgagcaataaagtggcctgagggctggggttctg

SEQ ID NO: 13515 - DNA, 2091 bp, Homo sapiens
aaaagtggtagcagcggaggcgagcggagggtttcccgcggcggatttctgacagtcagacttgtccacaagaactcaactggcaaggctgcttttctgtgctaaaactggggagctagtgggcaccatgaagatcttctgcagtcgggccaatccgaccacggggtctgtggagtggctggaggaggatgaacactatgattaccaccaggagattgcaaggtcatcttatgcagatatgctacatgacaaagacagagttttcaagcctatggctgatgctgctgtgaagattgtggagaaaaatggctttagtgataagattaaggttatcaacaagcattccaccgaggtgactgtaggtccagagggtgacatgccatgccgtgccaacatcctggtcacagagttgtttgacacagagctgatcggggagggggcgctgccctcctatgagcacgcacacaggcatctcgtggaggaaaattgtgaggccgtgccccacagagccaccgtctatgcacagctggtggagtccgggaggatgtggtcgtggaacaagctatttcccatccacgtgcagaccagcctcggagagcaggtcatcgtccctcccgttgacgtggagagctgccctggcgcaccctctgtctgtgacattcagctgaaccaggtgtcaccagccgactttacagtcctcagcgatgtgctgcccatgttcagcatagacttcagcaagcaagtcagtagctcagcagcctgccatagcaggcggtttgaacctctgacatctggccgagctcaggtggttctctcgtggtgggacattgaaatggaccctgaggggaagatcaagtgcaccatggcccccttctgggcacactcagacccagaggagatgcagtggcgggaccactggatgcagtgtgtgtacttcctgccacaagaggagcctgtggtgcagggctcagcgctctatctggtagcccaccacgatgactactgcgtatggtacagcctgcagaggaccagccctgaaaagaatgagagagtccgccagatgcgccccgtgtgtgactgccaggctcacctgctctggaaccggcctcggtttggagagatcaatgaccaggacagaactgatcgatacgtccaggctctgaggaccgtgctgaagccagacagcgtgtgcctgtgtgtcagcgatggcagcctgctctccgtgctggcccatcacctgggggtggagcaggtgtttacagtcgagagttcagcagcttctcacaaactgttgagaaaaatcttcaaggctaaccacttggaagataaaattaacatcatagagaaacggccggaattattaacaaatgaggacctacagggcagaaaggtctctctcctcctgggcgagccgttcttcactaccagcctgctgccgtggcacaacctctacttctggtacgtgcggaccgctgtggaccagcacctggggccaggtgccatggtgatgccccaggcagcctcgctgcacgctgtggttgtggagttcagggacctgtggcggatccggagcccctgtggtgactgcgaaggcttcgacgtgcacatcatggacgacatgattaagcgtgccctggacttcagggagagcagggaagctgagccccacccgctgtgggagtacccatgccgcagcctctccgagccctggcagatcctgacctttgacttccagcagccggtgcccctgcagcccctgtgtgccgagggcaccgtggagctcagaaggcccgggcagagccacgcagcggtgctatggatggagtaccacctgaccccggagtgcacgctcagcactggcctcctggagcctgcagaccccgaggggggctgctgctggaacccccactgcaagcaggccgtctacttcttcagccctgccccagatcccagagcactgctgggtggcccacggactgtcagctatgcagtggagtttcaccccgacacaggcgacatcatcatggagttcaggcatgcagataccccagactgaccactcttgagcaataaagtggcctgagggctggg

SEQ ID NO: 13516 - DNA, 13347 bp, Homo sapiens
ccttctgatgttaatagatttctgacagtcagacttgtccacaagaactcaactggcaaggctgcttttctgtgctaaaactggggagctagtgggcaccatgaagatcttctgcagtcgggccaatccgaccacggggtctgtggagtggctggaggaggatgaacactatgattaccaccaggagattgcaaggtactgggttggtttacagcaggctgcagctgggtggggcacttgatctcaaagcagatgccttgggctccagtctgagcgtgggctaggctgtcacccagtgcttatgatgagggctggtgttggtcctgagcaggtctgctcagccaggtaggtatatgtagcagttaggcaaaatcatgcctgtttggagagtcagacattatgtagcagccttagcagagcctcagcatctgtttaacggagcaaagaaaacccaagcctcagtagtgttgatgaagttgaatcatttacttgccttactgaaatggtgacatgttcatcatatggttaaattcttttgaatgaaaaaaatgaaaatggttttttttttcccttagaagaaatatttaaaagtatgtgagttgttggccaggcgcagtggctcacgcctctaatcctagcactttgggaggccgaggtggccagatcacctgaggtcaggagttcgagaccagcctgaccaacatggagaaaccccgtttctactaaaaatacaaaattagctgggcatggtggctcatgcctgtaatcccagcttacttgagaggctgaggcaggagaatcacttgagcctgggaggcagaggttgtgttgagccgagatcgagccattgcactccagcctgggcaacaagagcgaaactctgtctcaaaaaaaaagtatgtgagttgttatgtagcaatcattaagtgcattcagtgtgccagcattgtgctaaggctgtggataccagatgaagaagatcctgttctcatcttcaaggaccatgcagttttgtggaagagacaggcacatacaaaattacagcacaaaagccaggcacggtggctcatgcccgtaatcccagcactttgggaggcaaagggcgggcgggcgggcggtggagggggtggtggcggctgatcacttgagggtcaggagttcgagaccagcctggccaacacggtgaaaccccgtctctataaaaaaaaattagctgggagtggtggtgggcgcctgtaatcccaggtactcgggaggctgaggcaggaaaatcacttgaactcgggaggtggaggttgcagtgagccaaggttgtgccactgcactccagcctgggtaacagagtgagactctgtctcaaaaaaaaaaaaaaaaaaattacagcacagtgagataaaggcacaagaggtcatggaagcagcaagaaccagctgaacttggggtgggaggtaatgtttgaataatttctcagttctaaaggaagagaaggtgaagtttgagcagcagggattacaggtaagctttcagatgagccagattgtggctgggtgcagtggcctacacctgtagtcccagctacttgggaggccaaggcaggaggattgcttatgcccacgagttcaacatagtaaaacactgtctcacaaacaaacaaagaccaaaaacaggctgggcacagtggctcatgcctgtaatcccagcactttgggagaccaaggcgggcggatcacctgaggtcgggagttcgagaccagcctgaccaacatggagaaaccctgtctctactaaaaatacaaaattagccaggtgtggtggcgcatgcatgcctgtaatcccagctgctcgggaggctgaggcaggagaatcacttgaacctgggaggcggaggttgccatgagccgagatcgtgccattgcattccagcctgggcaacaagagctaaactctgtctcaaaaaaaaaaaaagaaaaaaaaccacacacacacagatgggctattctggggagcagctagcagtttagtgcagctggagtgtggtacaaaagtactatggtaagagaggctgccgaaagcatacgcggggtcattttgtaaagggtggtagcaaaatgcaggaagaggaacatgagtttaagtccaagctttgccacttctttactctcttggccaagttacttctctgagccttaatataaaataatatatacttcaatatagtaatacattatctcacagtataatacaattatcttagaattgtttgatgattaaatgtaatacagtatctggtgcagaattagggcttaaaatatttacttttttttctttttttttttttgagacagagtctcgctctgtttcccaggctaaagtgcagtggcacgatctctgctcactgcaagctccgcctcctgggttcacgccattctcccgcctcagcctcttgagtagctgggactacaggtgcccgctgccacgcccggctaattttttgtatttttaatagagacggggtttcaccgtgttagccaggatgatcttgatctcctgaccttgtgatccgcccgcctcggcctcccaaagagctgggattacaggcgtgagccactgcacctgcccaggtcttaaaatatttctaaacattttggacattattttcttgttttattgttcagatggagtcttactctgttgccttggctggagtgcagtggcgcagtctcggctcactgcaatctctgcctcccaggttcaagggattctcttgcctcagcctcttaggtaactgggattacaggcatctgccaccacacctggctaatatttgtgtttttagtagagacttggtttcacctgttggccaggctggtcttgaacttctgacctcaggtgatccacctgcctctgcctcccaaagtgctgggattacaggtgtgagccacagtgtcaggcctggacgttattttctgagtgatatattaaacaggagagaaagaggattggattgcattttggaacactcactgagagcggtgtggagaggagagcatttggggatattgtagtcccagagctgcatagtcccagaggagacagctcgggggaacttgagtttggtaactcactggatatgatggagggagagagaagattcaagaagcaccaagacttctggttagaatgacaaagtggatggggcctgcaagggaggaatgggtggtgtggggaggggaacacgatggagattaggcgtttaggtttggacatccacatagagatgccaatggcagatagaattttgggtctggagacagaatttgtagttgttggaactgaaactgggagaggttgcagtctctcaagggggtgtggaatgtgaaaggtagagggctgaagaaggaatcccggaatagctgaggaggcaaagaagggcaagggagatagccagcatggaaaggaagaaagagggagtgtgtctagcaaggtcagaggcactgggaagtcccagatactgatgactgacatcagctgcaggagtgagctggtggtggttaccgagagtgatgtcagtggagtggtgggcagtaagtgtgaagaggccaggaaggtggtgagtgagatgccttttaaatagtgagcagaggtagaaaggactacatttcagctaagcatccatagctggcttcagatataaaaccttgatgtgccattaaaaaaaaaaaaaaaagaacccccttctttcagtgcaccgctcttcaaagtgtggaatgtggaccacctgtggcacaattgcctggagcacattagcccagccttctcaataagagtgagagtgtgtgtgtgtgtgtgtgtgtgtgtgtgttctgggactctgcatttcaggtaagctttctagtgattctagtgttgacccaaggctggagggcctctgttttaatgtgagctccttagctgtccccttgaattcccagaaagcgtggcagggcctgcctagttctgggtgctcatcccgaccccgcctgagggttttcagtgtgtgaattactgcagtaggaaatatggagaagtgattctcctccctttactacggtattggtgaactctttagttttccctgatgatgttaagtgaacgtgcccagtggggtacctgtcacatatacagtgggtgtatgtgagtgcttctctttccccggctgctctccctaataccgcatcagtggttatctccaggcagagatgtaggccaggttaggtcaagtattaggcagattgagtctgagtttttcctgaggaggaaaatgtgtagtgtatagcaagatcaagatgctagtggctgtggaattactgtgacagggctaactgccgagaccagctcggtcgtggagaccctaacccagtggcgctagaggaattaaagacacacacacagaaatatagagtgcagagtgggaattggggggctgacagccttcagagctgacagccacgaacagaactttacctacatatttattgacagcaagccagtgataagcattgttcctatagattatagattaaaacgggaaacaaagggatgggctctggctagttatttgcagcaggaacatgtccttaaggcacagatcactcatgctattgtttgtggttcaggaacgccttaagcgaaagccgccctgggtgggccaggtattccttgccctcattccagtaaacccacgaccttcagtgtgggcatcatagccatcaacgagcatgtcacagtgctgcagagatttgtttatgaccagttttggggcctgtttttggccagatttgggggcctgttcccagcagctaactactggagcatttttaggtctgagaacatctttctctgagacttttttctgcagcactagagaataacagcttgaaactctattaaaataaagtggccaggtgcagcgacggatgcttgtattgtagttctgctgaggcaagaggatctcttgagctaaggagttcaaggctgcagtgcccaatgattgaggctgttcatagccactgcactacagcctgggtgacataacgagaccctgtttctaaaaataaacaaaaaaataggccaggcgcagtagctcacacctgtaatcccagcactttaggaggccaaggtgggcggatcagttgaggtcaggagttcgagaacagcctggccaacatagtgaaaccccatctctaatgtaaatacaaaaattagccaggcgtggtggtgagcacctgtaatcccagctacctgggaggctgaggcatgagaatcacttgaacttgggaggcagaggttgcagtgagctgagattgcaccactgtactccagcctgggtgatggggtgagaccctgtctcaaaaaaaaaaaaataaataaagataaaagacaaccaaaaaatagtttaaaatagatgacacgtttgttctatctgtttagcaatgtgtttatatatgtgaatactcttgtgtgttgatgtgtatcatgcaaaggttactgacttttttgttttttaggtcatcttatgcagatatgctacatgacaaagacagagtaagtgtaaaaggaaactattatcttgatgtggggtgttttgaagtcttggattacaagaaggttaagaatccctgggggtcatgatgttaaatgatactgagaggcgtatggtgtagaagtcaggaaatcagttgggagactgggtcctacttctggctctatttttgttgtttaatctcccagctttatcaagatagaactgacaaataaaaatggtctatgtttatggtaatacaatgtgatgaatatatgtgtatggtgtaaaatgattgaatcaagctaattaacaaatctaccgcctcatacttttttgtgtgtggtgagaacatttaagatctactcgcttagtaatttttaagtgtacattattaactatagctcacaatgccgtacagcagatctccacaacttattcatcctatctgactgaaacatcagatcctctcccttagcaggtaccattctctgggcttctgagttcaacatttttttttttttttgagacagaatctcgctctgtcactcaggctagagtacaggggcgagatctcggctcactgcagcctcagtctcccgagttcaagcgattctcctgcctcaacctgcctaagtgttgggattgtacctagtattgggataatactattattatactattatacctagtattgggattataacttgggattacaggtgcgtgccatgacacctggccttcactgtagttttaatttccatttttaattttaattttatttttttgagactgggtctctgttgcccagtgcagtggtgtgatctcggctgcactgcagcctagacttcttgggcttaagcgatcccccaacctcagccttcccagtagctgggactacaggcatgccaccatgcctggctaatttttgtatgttttgtagaggcagagtttcgctgtattgcccaggctggtcttgatcccctgaggtcaagtgatccacccgccttggtctcccaaagtgctgggattatgggcatgagctactgcgcccggccatcgtgtgcttgtttaccatgtgtatatctttgttctagtctagggttatgaacataggtgtgattcttgatagacactgccacattgccttcaaaaagggttccagattcactgtaatatcttcaaaactgggtcattaaaaagtgacagctaatttaatggcatcgttaaagtgaaggctgtgccatccctggtttacaattgaggacgctgttcatcaattttttttaacttaaaaaataaataaaacaaggccaggcacggtggctcatgcctgtaatcccagcactttgggaagccgaggcaggcagatcacggggtcaggagatcgagaccatcctggctaacatggtgaaaccccgtccctactaaaaatacaaaaaaaagccgagcgtggtggcgggcagggcctgtaatcccagctactcaggaggctgatgcgggagaatggcgtgaatctgggaggcggagcttgcagtgagccgagattgcaccactgcactccagcctgggcgacagggagactccgtctcaaaaaaaaaaattgtggtaaaaacacataacataaacggtcatactgattgtatctaagacataaatgcacttactttgacaatgaaatagttctatatttctgtgaaaaattatttcacccagactaaacatttttgtgctttacctcagaggcaacgtcatttcttttttttcttttttctttctttctttttttttttttaacaagaatgagtctccctctgttgccaggctttagtgcagtggtgtgatcttagctcactgcaacctccacctcccgagttcaagtgattctcctgccttagcctcccaagtagctggggttacaggcatgcgccaccatgcctggctaattttttgtatctttagtagagatggggtttcaccatgttggccaggttggtctccaactcctgacctcaagtgatccacccgcctcagcctcccaaagtgctgggattacagatgtgagtcactgcacccggcctggtaattctaaagaatattcagttctagatattttctaattccagtctgatttagtcttttgcctatcagtttagaagtgtgtttcttaatgtatgaaaaattttttttcttcagttgtgtttctgatattaagatttttgacttgttttgcattgtggtcagaggatatcacccttttgatgccagttctgtattagctgtctaatgttatttaacaaattaccttaaattttaatagcctcttaatatttcttactaacttggcaggtcatcagtctatttaaaagatttgcacatattttttccatcatctttagttattttcaacagaagggtcactgtgcctattgagtcagaccgttatagatgaaagatgtatgtgtttactaaagacagaagtaaaaatcttcaagatgcaaagaagttattttctgatggggaaaatactttttagtgaagctctctgagttagagtcggtaaaggaaaacaagccatacatattgcagcagagcggctttaacacaaggagctggctacccagctgtgggagggctagaaagcaaatgggaacgctgagtaacctaacagtagagattgcagggagcagttaccttgcctagggctgagaaactaaacgagaagattaggatttccagaagccacaagcattgaggagagatcctgtggaccactgtccaagtacggctgcagctctgaggggcccaaggagctggttatgggatcattgggaaaagttggagtctgcaatcaactgcccctaccgagaggaccctgatgagaacagcagcatgcagaaaggagcaagcctgctctgtcctcctaccttccagtcgccctcttggtcccccttttggctgtacctaacagttggaaaaaggagaacatggtttgcagggctctggcatcacttagtagaggatagaagagtgagtgtggagcagggacagtcgcttaataaagggcaaggggctgactcacaagacctgcccaactcagccagagctgttctgccaggggccagaaaggccatagggccctgacttgcactgccactgccagctgtgactctagaactttgcaaagcacctttccacttacttataataactggtagtaagtgacggccatgtcttccttagaatgtaaaatactaccaaggtatccgggctgccgtgagcagggtgaaggacagaggacagaaggccttggttctcgacattggcactggcacgggactcttgtcaatgatggcggtcacagcaggtgccgacttctgctatgccatcgaggtaagccattcccttcaggtgtgtgtcctgcatcttgcatgggaaatcccctatgctcttgcactttccccgtctgttccttcacaaacattcatggagtgctcactctgtgccaagcacagagccaggctctgagcgtatagagatgagtcagacacagttccttcctccaggagctaattttctcctctgtcagcctaggctgcacatcagaatcactaggagctttagaaaatacttacaggctgggcacagtggctcacgcctgtaatcccagcacttcgggagggtgaggcaagacaattgcttgagcccaggagtttgagaccagcctgggcaacatagtgagatcccatctctacagaaaaacttttaaatattagctgggcatggtggcatgtgcctgtgttccagctattcttgaggctgagatgggaagatctcttgagcccggaaagtcaaggctgcagtgagccatgatttggacttcatgtaagaaagcaaaaaattacttctaccttgtttaagccagttattgtgggactttgttgtttccaactaatcagtatatgaactcagttttgtaggggaaagtatttaaatacatgcccccacaccaccacactccagcctgggtgacagagtgagactttatctcaaaaaaatcaaaacgaaacaaaggctgggcacagtgtctcacccctgtaatcccagcactttgggaggccgaggcttggatcatgaggtcaggagttcaagaccagcctgaccaacatggtgaaactccatctttactaaaaatacaaaaattagccgggtgtggtgatgcgcgcctgtaatcccagctactcaggaggctgaggcgagagaatcgcttgaacccaggaggcagaggttacagtgagccgagattgcgccactgcactccagcctgggcgacagagtgagactccatctcaaaacaaaacaaaacaaaaaaaccttatgcctagtccccagccctaacagattttgatttaacttttctggggtgaggcctgagccttgggacttgggaatgtgcggcaaggttgagaaccactaccttaaatgtccctatggagtcagctctcttatgtttaccaatttgtcatttctttaataaaacattaaacagcttgagcccacagagcaagaaaaattaaaaaccaaacaaaattaaaaattaaacatgttatttttctcataaaacaaataatgcatattattataggaaatttggtaaataccaaataaaaatagtatgttgacccaaagttaagtactgttaacattttggtgtatattcttccaagttttgggggcaggcagggagcatgtatataaatactttccctacaaaattgggttcatgtagtgattgagttggaaataacaaagcctcaaaatcactgtggtttaaggtagagtagttttttgctatctttttcgtggcgtgatctctattcaccgcaacctccgcctcctgggttcaagcaattctcttttctcagcctcccaaatagctgggattacaggtatgtaccactgcacctggctaatttttatatttttagtagagatagggtttcgccatgttggccaggctggtcttgaattcctgatctcaggggatccccccacctcagcctcccaaagtgttgggattacaggtgtgaatcactgcgccctgccttgttcctcttttttaaaagtaagaataactttcccaggaatttctattatagcaaacctctccttgggtaccatcggctagaatgaggttaaatctcatttcttatctctggcaagagggattcagttactcttagctcagacaagtgcaccactgcaaaggtcagttccccacgctgcaccctcacctgatttcaggggagaggaggacacagaatggatgtcgggaggtcatcttcagtgtccactcctggtagtgttttgggtgagatcttgagcttcttgatgggctgaggagaaggaggtgtgaaggtaccagcttgcaggttcagggagaggtgactgatgagtcagaaggcagcaggggtgagggacgacactggctttggatattgtcagggtggaggcaaagtgattggtgagaactagggtttaaggccctcaaaccacatctaaaaacatcaaggcaaatcctagaaataatttgaaatagatgatgaagatttttctaggagaacatgtgtgtgtattccatgtaaatactgcgcgctaatcaattgcacaactggagctgctcacgtaagtactctttacgaaaggatacagcatttgtcccttgattatagtaaaaaatatagtattcatggtagaaaatgtgggaaatacagaaaaggatttagaaaaaaggaaaatcttatcaggaacagtctcggtatcattttgtggtttccacttcgtgtgtagggccacacgtgagtctgtttgttttacatgctagagctcttggggctgtggaatctagactggataagttgaaaacaaagagttggaggtgcttatttatgttcagggaaactcgaagagttcagggaagacttctggatgggggattcatgctgccctgggaagtggggtttgatttggcaggtggggccaggatagggaaggctcagtgatcatgagatcattgtggctggagtgttggttgttgggggaatgggggaggaagactgggaaggtaagggagggcctccaaagcagtagtttccccttatctatggtttcacttttcgtgatttcagttacctgtggtcaactgaggtccaaaaatactaaatggagccaggtgcggtggctcacgcctgtaatcccagcactttgggtggctgagacaggtggaaaccttgagtcccagagttggagaccagcctgggcaacatggcaaaaccccgcctctacaaaaagtagctgggcatggtgatctacgcctgtagtcccagctacttgggagattgaggtgggaaattgcttgagcctgggaggtggaagctgcagtgatcatgccactggactccagcctggacaatagagtgagacccttctcaaaaaaaaaaaaaagaaaaattaaatggaaaattccagaaattatttataagttgtaagttgtgtaccattctgagtattattacataattgttctatttttagttattgttaatttataaattattatttatatttattattgtgcctaatttataaattaaacctggtcataggtaagcttggaggctgaagcagctccactgtgaatgctaatcctccacgctgacttctgaccaaccccagcttcaggaatgcctctaaaatttccgctctcatgcactttgatgtaaatcctgccctcaggtcagaacaactttgatgttatcataaatacatacttaccgtaaatcctgcccttcgtcaaattccctgtggtatgtaagccctgcgtctgagccataacagtgtgggggcccagtttctcactgcccgagacaaggcttctgtttgtatgtctctataaagtgtgtctttctgagaagctggatttgccagtctttcctcagcctctcagctcccgtggcctgttggggtaggtttgcatagagctgcccaccatggaacagtatgtatgtatagcaaaaaaaaaaaaaaaaaaaaaatggtatacataagggtcagtactgtctgaggtttcaagcatccaccaagggtcttaaaatgtatcccccatggacaagaggcactgctgcaccataagaaaatagaggctgtgttctgccaacagtggggatttgggacaattttgagcccagaggatgacctacttactcacacctacagtctgctctcctctggagggcacagcacgcctcccaggttcgtgaggcaagtccctttcctggctttttggcgtcctcttgtgcggtactgacacctactgctcttactaagtagtgcagcctcctcaggatccccggcatccccgctgtgcctggcacggaatgagagtccctaatcacaagttaaagccagctgaatctcagccctttttcatgatgcacatttggagaataaagtatttaagttacatatcttaggaccagaatcaaggaatagcttgctcaccttaaaggtcagactactgtttaatttattgctcatttttccttgggtttcggctctattttctaggttttcaagcctatggctgatgctgctgtgaagattgtggagaaaaatggctttagtgataagattaaggttatcaacaagcattccaccgaggtgactgtaggtccaggtgagatttacacaccctgtgttgaaagctttgcttgctcttgtgtgagaga

SEQ ID NO: 13517 - DNA, 543 bp, Homo sapiens
ccttctgatgttaatagatttctgacagtcagacttgtccacaagaactcaactggcaaggctgcttttctgtgctaaaactggggagctagtgggcaccatgaagatcttctgcagtcgggccaatccgaccacggggtctgtggagtggctggaggaggatgaacactatgattaccaccaggagattgcaaggtcatcttatgcagatatgctacatgacaaagacagaaatgtaaaatactaccaaggtatccgggctgccgtgagcagggtgaaggacagaggacagaaggccttggttctcgacattggcactggcacgggactcttgtcaatgatggcggtcacagcaggtgccgacttctgctatgccatcgaggttttcaagcctatggctgatgctgctgtgaagattgtggagaaaaatggctttagtgataagattaaggttatcaacaagcattccaccgaggtgactgtaggtccaggtgagatttacacaccctgtgttgaaagctttgcttgctcttgtgtgagaga

SEQ ID NO: 13518 - DNA, 28901 bp, Homo sapiens
agcggaggcgagcggagggtttcccgcggcgggtgaggcgctgggtatgctgggaaggtggggtcgctttggggttctgtgtgcagcgagcatggtgtccttggcaccagggtttcggcagaggagcctagcgtgggcctacttggactcctccgcgtggggcagctcgggacacccgggcctgcaggagagcggggttctaggctggccccggctctgcagtgcagccgggtgcctgccactcgcggggctctgtcgcagtactcgtgcctggcgcctcccctcagccacagagaccgcagtagctccaaccatcgcacccctaactgggccacgagttctctgattgccagacctgttgtctttgccactcactgttctgagtaattggagagtcgtgtattcactacacgccaaccagagtggtcctgtaaaagcgtaagcctagtgtagatacgcttctgcttaaaactcttgagtggctcccagtgcttttagaacaaaatccaaacgcctttccgaagtcgacaaggcccagcttgattgagcagaagatgtgataggagatgaggagcggggggcttctgcaaaagtgcttcggtcgctcaggcttttggcacattttgcttatgcaacctagttctttctaccttagggccttttcttgggaaagttggggtaaggattcctgacctgtaaaaactcttccccaacttttatcccggtctgtcttgtagatctcaaatgctagtttcctcagagtccttctgtaaccttggttttctctttctacaacgctctgtgtatttcttgcattcatgtagtctgtaatttgtattactctctcattagagtctaagctcttggagggcaagggtcttctctagcttgtggtggtggctccagtccctaatatagtgcctggcacatagaaggtatttaataaattttgttattttattttttcgagacagagtctcactctgctgcctaggctgagtgcagtggtgtgatcgaggcgcactgcagccttgacctcctgggctcaagcgatcctcacctcggcctaccgagtagctgggactacaggcacgcgccactacactcgggtaatttttaattttaatatatgtatatttatatatatatatatatatatatatttttttttttaagacagggtctcactctgtcacccaggctggagttcagtggcgccatctctgctcactgcaacctctgcctcccgggctcaagtgattcccctacctcagcctcccgagtagctgggagtaactgggactacaggcacaggccaccgcgcccggctaatttttttaaaaattttttgtagagaacggggtctcactatgttgcgcaggctggtctggaactcccagactcgatatccttgcgtctcggcccctcacagtgctgggatcacaggtgtgagccaccaccgcctagcaaatacattttgaatgaatgtagtggaccatctgctctgcagtctgacggctaatacaattagggcttggcatggtggtttctatttcctccttgtaaatggccatgcaagtttacaactcttggagaatgaggaggggttcagagaatatctcctgaatctgtagtgtagactgcttctgggagagaacaaataataatggatgagggcattcagccagagaaggtgtgtagtgcccaccagaagaggttcatgccttcataaaattgttaacacaagacatagttccaggtttgtttgtttgtttgagatacagtcttgctctgttgcccaggctggagtgcagtggcgcgatcttggctcactgcaacctctgcctcccaggttcaagcaattctcctgcctcagcctcccaagtagcagggattacaggcacctgccaccatgctggctaattttttgtatttttagtagagacggggtttcgccatgttggccaggctggtctcgaactcctgacctcaggtgatccacctgctttggtctcccaaagtgctgggattataggcgtgagtcaccgtgcctgggctgttccaggttttgaaaagacactgtggtcctggttttagactcagcaacatcacagacaagaaaggaatcctatggattaaagttcttcactataagttttttttttcctccagttcaaatgggtaacgtgccaatgtagtaaaggtttgagggaggcacgtctgacacaggcacatgaacacccagtcatcacgcttatgaactacaaaacgatgactcttaaccttgaagtgacttcagaattgattccacatggaccacaggattagtatttcaggactctaccatatggatcctattgatatgtttgacacctggtccagttttacttcactaaactgattgatataatgtgcatgattgtctaagcctttctaattggatgaaatgccttctccgtccacaaccccctccttctcctcctgcctcagctgaatccaccttttaagccttccttgaacattcagtcagatatggccatttctttctctactccaacatttgttggacacagttttctaatgcacattacagattctgacagttctagatattctgtctgtaaaataaatgttagtacatgagataaagtggattatagcaatgttgttaaactgctggttgcaacccattgatgggtcctgaccagcaagtaaaagtgcagctgggtgccgtggtgcatgccggtagtctagctacttgggaggctgacgtaggaggatcgcttgagtccaggagtttaaggctgtagagtgtaatgatcatgcctgtgaatagccactgtgatccaacctggacagcagggagatcccatctcttaaaaacaataaaaatgaaatagagcatatcagagggccttgttcgtaggaagtcagtattgttttgtggaacatttagttgtatgcgtacatgcaggtatgtgtattgagtctcattttaaagtatatttcttactggggttatcagaaagtttgaaaatcattagactaggggataggtatgctgagattttagtagtagagttttacctggacaaattgtctactttgaacctgactgccggcctgagtttgttcagggaagattgtttctaatctatttgctttttgtttgtttgttttggtgacggagtcttactctgttgcccaggctggagtgcagtggtgcggtctcagctcactgcaacctccgcctcctggattcaagtgattctcctgcctcagcctcctgagtagctgggaatacagacgtgcgccaccatgtctggctaatttttgtatttttagtagagacgagggtttcgccatgttggcaaggctggtcttgaactcctgacctcaggtgatccgcctgccttggcctcccaaagtgctgggattacaggtgtgagccaccgtgcccagcctgtttctcatctatttgtgtaagaattccatgtttacttactctagataacttcaaaagaaaaaaaactctggccaataaaatgccataggaatgtttagggatatgtggagtaggcattctttctaagttttcctgaagatgcaccaatgtttaacaagaaaggaagggcagtgtagaacacctattgctttctgcatggtaagagggatgggtattgggagagcccacacctgctgaggagtgcctttagactttgagcggtggtgtttctctccctcccagaaatagatctctttggggagacaggccatacaagacgtgaatctggtgacattttacttgtttgaagcaaaatttttttagatgatggagggtttttaaaaattgcttttaaaattaaaatttgaatagataagaagtaatcactataaaaaataatgaagcataaggaatgctagtattagctgggtgtggggcactcacttgtagtcccaactactggagaggctgaggcaggaagaatgcttgagcccaggagtttgagtccagcctgggcaacataacgagaccccatcttttaaaaaaaaaaaaaaagaaaaagaatgctaatatcgtgaacatttatgttcccaccacccaatttaagaaaaagaacaatacttttgaagtccactgcgtacccctccttgatcccatctctttcccttctcttttaggagttaactatcctgattccttgctatgctttttagtgtgatccctgaagaacgtatcactccattttgcatagctataaatttcatagaaatggaatcgtattgcatgtgttgtgtgatttgctgtttttgctcatcattatattcctgggattatccatttttaggtttatgtgtgactgtaatttattgtttagatgaaagttttcctggtttgacttgctctatcttcatatttttccttaagctaagggttcagcatacgaaggcagtattggtggcacttctttaacagtaccccatctcttctcctagccttgagggctgcacctagatgaacttgtgaggctcatttgaaccttttggaagcaccgaagcctgctgaagtttccagacatctgtatgaatctgttgtagttttttaatgttatatgctgaatataaaaccaagtaactcctgctggaaacatttacaatatcgattaacaaatactatcagtggctttgacatttttgtcagtttcttgatttttttccccgcttttgtctccccttcccccctccacattttggggcattgtgctgttaatagattttttttctgttcgtttgtttatatacctcctgtttccttctgatgttaatagatttctgacagtcagacttgtccacaagaactcaactggcaaggctgcttttctgtgctaaaactggggagctagtgggcaccatgaagatcttctgcagtcgggccaatccgaccacggggtctgtggagtggctggaggaggatgaacactatgattaccaccaggagattgcaaggtactgggttggtttacagcaggctgcagctgggtggggcacttgatctcaaagcagatgccttgggctccagtctgagcgtgggctaggctgtcacccagtgcttatgatgagggctggtgttggtcctgagcaggtctgctcagccaggtaggtatatgtagcagttaggcaaaatcatgcctgtttggagagtcagacattatgtagcagccttagcagagcctcagcatctgtttaacggagcaaagaaaacccaagcctcagtagtgttgatgaagttgaatcatttacttgccttactgaaatggtgacatgttcatcatatggttaaattcttttgaatgaaaaaaatgaaaatggttttttttttcccttagaagaaatatttaaaagtatgtgagttgttggccaggcgcagtggctcacgcctctaatcctagcactttgggaggccgaggtggccagatcacctgaggtcaggagttcgagaccagcctgaccaacatggagaaaccccgtttctactaaaaatacaaaattagctgggcatggtggctcatgcctgtaatcccagcttacttgagaggctgaggcaggagaatcacttgagcctgggaggcagaggttgtgttgagccgagatcgagccattgcactccagcctgggcaacaagagcgaaactctgtctcaaaaaaaaagtatgtgagttgttatgtagcaatcattaagtgcattcagtgtgccagcattgtgctaaggctgtggataccagatgaagaagatcctgttctcatcttcaaggaccatgcagttttgtggaagagacaggcacatacaaaattacagcacaaaagccaggcacggtggctcatgcccgtaatcccagcactttgggaggcaaagggcgggcgggcgggcggtggagggggtggtggcggctgatcacttgagggtcaggagttcgagaccagcctggccaacacggtgaaaccccgtctctataaaaaaaaattagctgggagtggtggtgggcgcctgtaatcccaggtactcgggaggctgaggcaggaaaatcacttgaactcgggaggtggaggttgcagtgagccaaggttgtgccactgcactccagcctgggtaacagagtgagactctgtctcaaaaaaaaaaaaaaaaaaattacagcacagtgagataaaggcacaagaggtcatggaagcagcaagaaccagctgaacttggggtgggaggtaatgtttgaataatttctcagttctaaaggaagagaaggtgaagtttgagcagcagggattacaggtaagctttcagatgagccagattgtggctgggtgcagtggcctacacctgtagtcccagctacttgggaggccaaggcaggaggattgcttatgcccacgagttcaacatagtaaaacactgtctcacaaacaaacaaagaccaaaaacaggctgggcacagtggctcatgcctgtaatcccagcactttgggagaccaaggcgggcggatcacctgaggtcgggagttcgagaccagcctgaccaacatggagaaaccctgtctctactaaaaatacaaaattagccaggtgtggtggcgcatgcatgcctgtaatcccagctgctcgggaggctgaggcaggagaatcacttgaacctgggaggcggaggttgccatgagccgagatcgtgccattgcattccagcctgggcaacaagagctaaactctgtctcaaaaaaaaaaaaagaaaaaaaaccacacacacacagatgggctattctggggagcagctagcagtttagtgcagctggagtgtggtacaaaagtactatggtaagagaggctgccgaaagcatacgcggggtcattttgtaaagggtggtagcaaaatgcaggaagaggaacatgagtttaagtccaagctttgccacttctttactctcttggccaagttacttctctgagccttaatataaaataatatatacttcaatatagtaatacattatctcacagtataatacaattatcttagaattgtttgatgattaaatgtaatacagtatctggtgcagaattagggcttaaaatatttacttttttttctttttttttttttgagacagagtctcgctctgtttcccaggctaaagtgcagtggcacgatctctgctcactgcaagctccgcctcctgggttcacgccattctcccgcctcagcctcttgagtagctgggactacaggtgcccgctgccacgcccggctaattttttgtatttttaatagagacggggtttcaccgtgttagccaggatgatcttgatctcctgaccttgtgatccgcccgcctcggcctcccaaagagctgggattacaggcgtgagccactgcacctgcccaggtcttaaaatatttctaaacattttggacattattttcttgttttattgttcagatggagtcttactctgttgccttggctggagtgcagtggcgcagtctcggctcactgcaatctctgcctcccaggttcaagggattctcttgcctcagcctcttaggtaactgggattacaggcatctgccaccacacctggctaatatttgtgtttttagtagagacttggtttcacctgttggccaggctggtcttgaacttctgacctcaggtgatccacctgcctctgcctcccaaagtgctgggattacaggtgtgagccacagtgtcaggcctggacgttattttctgagtgatatattaaacaggagagaaagaggattggattgcattttggaacactcactgagagcggtgtggagaggagagcatttggggatattgtagtcccagagctgcatagtcccagaggagacagctcgggggaacttgagtttggtaactcactggatatgatggagggagagagaagattcaagaagcaccaagacttctggttagaatgacaaagtggatggggcctgcaagggaggaatgggtggtgtggggaggggaacacgatggagattaggcgtttaggtttggacatccacatagagatgccaatggcagatagaattttgggtctggagacagaatttgtagttgttggaactgaaactgggagaggttgcagtctctcaagggggtgtggaatgtgaaaggtagagggctgaagaaggaatcccggaatagctgaggaggcaaagaagggcaagggagatagccagcatggaaaggaagaaagagggagtgtgtctagcaaggtcagaggcactgggaagtcccagatactgatgactgacatcagctgcaggagtgagctggtggtggttaccgagagtgatgtcagtggagtggtgggcagtaagtgtgaagaggccaggaaggtggtgagtgagatgccttttaaatagtgagcagaggtagaaaggactacatttcagctaagcatccatagctggcttcagatataaaaccttgatgtgccattaaaaaaaaaaaaaaaagaacccccttctttcagtgcaccgctcttcaaagtgtggaatgtggaccacctgtggcacaattgcctggagcacattagcccagccttctcaataagagtgagagtgtgtgtgtgtgtgtgtgtgtgtgtgtgttctgggactctgcatttcaggtaagctttctagtgattctagtgttgacccaaggctggagggcctctgttttaatgtgagctccttagctgtccccttgaattcccagaaagcgtggcagggcctgcctagttctgggtgctcatcccgaccccgcctgagggttttcagtgtgtgaattactgcagtaggaaatatggagaagtgattctcctccctttactacggtattggtgaactctttagttttccctgatgatgttaagtgaacgtgcccagtggggtacctgtcacatatacagtgggtgtatgtgagtgcttctctttccccggctgctctccctaataccgcatcagtggttatctccaggcagagatgtaggccaggttaggtcaagtattaggcagattgagtctgagtttttcctgaggaggaaaatgtgtagtgtatagcaagatcaagatgctagtggctgtggaattactgtgacagggctaactgccgagaccagctcggtcgtggagaccctaacccagtggcgctagaggaattaaagacacacacacagaaatatagagtgcagagtgggaattggggggctgacagccttcagagctgacagccacgaacagaactttacctacatatttattgacagcaagccagtgataagcattgttcctatagattatagattaaaacgggaaacaaagggatgggctctggctagttatttgcagcaggaacatgtccttaaggcacagatcactcatgctattgtttgtggttcaggaacgccttaagcgaaagccgccctgggtgggccaggtattccttgccctcattccagtaaacccacgaccttcagtgtgggcatcatagccatcaacgagcatgtcacagtgctgcagagatttgtttatgaccagttttggggcctgtttttggccagatttgggggcctgttcccagcagctaactactggagcatttttaggtctgagaacatctttctctgagacttttttctgcagcactagagaataacagcttgaaactctattaaaataaagtggccaggtgcagcgacggatgcttgtattgtagttctgctgaggcaagaggatctcttgagctaaggagttcaaggctgcagtgcccaatgattgaggctgttcatagccactgcactacagcctgggtgacataacgagaccctgtttctaaaaataaacaaaaaaataggccaggcgcagtagctcacacctgtaatcccagcactttaggaggccaaggtgggcggatcagttgaggtcaggagttcgagaacagcctggccaacatagtgaaaccccatctctaatgtaaatacaaaaattagccaggcgtggtggtgagcacctgtaatcccagctacctgggaggctgaggcatgagaatcacttgaacttgggaggcagaggttgcagtgagctgagattgcaccactgtactccagcctgggtgatggggtgagaccctgtctcaaaaaaaaaaaaataaataaagataaaagacaaccaaaaaatagtttaaaatagatgacacgtttgttctatctgtttagcaatgtgtttatatatgtgaatactcttgtgtgttgatgtgtatcatgcaaaggttactgacttttttgttttttaggtcatcttatgcagatatgctacatgacaaagacagagtaagtgtaaaaggaaactattatcttgatgtggggtgttttgaagtcttggattacaagaaggttaagaatccctgggggtcatgatgttaaatgatactgagaggcgtatggtgtagaagtcaggaaatcagttgggagactgggtcctacttctggctctatttttgttgtttaatctcccagctttatcaagatagaactgacaaataaaaatggtctatgtttatggtaatacaatgtgatgaatatatgtgtatggtgtaaaatgattgaatcaagctaattaacaaatctaccgcctcatacttttttgtgtgtggtgagaacatttaagatctactcgcttagtaatttttaagtgtacattattaactatagctcacaatgccgtacagcagatctccacaacttattcatcctatctgactgaaacatcagatcctctcccttagcaggtaccattctctgggcttctgagttcaacatttttttttttttttgagacagaatctcgctctgtcactcaggctagagtacaggggcgagatctcggctcactgcagcctcagtctcccgagttcaagcgattctcctgcctcaacctgcctaagtgttgggattgtacctagtattgggataatactattattatactattatacctagtattgggattataacttgggattacaggtgcgtgccatgacacctggccttcactgtagttttaatttccatttttaattttaattttatttttttgagactgggtctctgttgcccagtgcagtggtgtgatctcggctgcactgcagcctagacttcttgggcttaagcgatcccccaacctcagccttcccagtagctgggactacaggcatgccaccatgcctggctaatttttgtatgttttgtagaggcagagtttcgctgtattgcccaggctggtcttgatcccctgaggtcaagtgatccacccgccttggtctcccaaagtgctgggattatgggcatgagctactgcgcccggccatcgtgtgcttgtttaccatgtgtatatctttgttctagtctagggttatgaacataggtgtgattcttgatagacactgccacattgccttcaaaaagggttccagattcactgtaatatcttcaaaactgggtcattaaaaagtgacagctaatttaatggcatcgttaaagtgaaggctgtgccatccctggtttacaattgaggacgctgttcatcaattttttttaacttaaaaaataaataaaacaaggccaggcacggtggctcatgcctgtaatcccagcactttgggaagccgaggcaggcagatcacggggtcaggagatcgagaccatcctggctaacatggtgaaaccccgtccctactaaaaatacaaaaaaaagccgagcgtggtggcgggcagggcctgtaatcccagctactcaggaggctgatgcgggagaatggcgtgaatctgggaggcggagcttgcagtgagccgagattgcaccactgcactccagcctgggcgacagggagactccgtctcaaaaaaaaaaattgtggtaaaaacacataacataaacggtcatactgattgtatctaagacataaatgcacttactttgacaatgaaatagttctatatttctgtgaaaaattatttcacccagactaaacatttttgtgctttacctcagaggcaacgtcatttcttttttttcttttttctttctttctttttttttttttaacaagaatgagtctccctctgttgccaggctttagtgcagtggtgtgatcttagctcactgcaacctccacctcccgagttcaagtgattctcctgccttagcctcccaagtagctggggttacaggcatgcgccaccatgcctggctaattttttgtatctttagtagagatggggtttcaccatgttggccaggttggtctccaactcctgacctcaagtgatccacccgcctcagcctcccaaagtgctgggattacagatgtgagtcactgcacccggcctggtaattctaaagaatattcagttctagatattttctaattccagtctgatttagtcttttgcctatcagtttagaagtgtgtttcttaatgtatgaaaaattttttttcttcagttgtgtttctgatattaagatttttgacttgttttgcattgtggtcagaggatatcacccttttgatgccagttctgtattagctgtctaatgttatttaacaaattaccttaaattttaatagcctcttaatatttcttactaacttggcaggtcatcagtctatttaaaagatttgcacatattttttccatcatctttagttattttcaacagaagggtcactgtgcctattgagtcagaccgttatagatgaaagatgtatgtgtttactaaagacagaagtaaaaatcttcaagatgcaaagaagttattttctgatggggaaaatactttttagtgaagctctctgagttagagtcggtaaaggaaaacaagccatacatattgcagcagagcggctttaacacaaggagctggctacccagctgtgggagggctagaaagcaaatgggaacgctgagtaacctaacagtagagattgcagggagcagttaccttgcctagggctgagaaactaaacgagaagattaggatttccagaagccacaagcattgaggagagatcctgtggaccactgtccaagtacggctgcagctctgaggggcccaaggagctggttatgggatcattgggaaaagttggagtctgcaatcaactgcccctaccgagaggaccctgatgagaacagcagcatgcagaaaggagcaagcctgctctgtcctcctaccttccagtcgccctcttggtcccccttttggctgtacctaacagttggaaaaaggagaacatggtttgcagggctctggcatcacttagtagaggatagaagagtgagtgtggagcagggacagtcgcttaataaagggcaaggggctgactcacaagacctgcccaactcagccagagctgttctgccaggggccagaaaggccatagggccctgacttgcactgccactgccagctgtgactctagaactttgcaaagcacctttccacttacttataataactggtagtaagtgacggccatgtcttccttagaatgtaaaatactaccaaggtatccgggctgccgtgagcagggtgaaggacagaggacagaaggccttggttctcgacattggcactggcacgggactcttgtcaatgatggcggtcacagcaggtgccgacttctgctatgccatcgaggtaagccattcccttcaggtgtgtgtcctgcatcttgcatgggaaatcccctatgctcttgcactttccccgtctgttccttcacaaacattcatggagtgctcactctgtgccaagcacagagccaggctctgagcgtatagagatgagtcagacacagttccttcctccaggagctaattttctcctctgtcagcctaggctgcacatcagaatcactaggagctttagaaaatacttacaggctgggcacagtggctcacgcctgtaatcccagcacttcgggagggtgaggcaagacaattgcttgagcccaggagtttgagaccagcctgggcaacatagtgagatcccatctctacagaaaaacttttaaatattagctgggcatggtggcatgtgcctgtgttccagctattcttgaggctgagatgggaagatctcttgagcccggaaagtcaaggctgcagtgagccatgatttggacttcatgtaagaaagcaaaaaattacttctaccttgtttaagccagttattgtgggactttgttgtttccaactaatcagtatatgaactcagttttgtaggggaaagtatttaaatacatgcccccacaccaccacactccagcctgggtgacagagtgagactttatctcaaaaaaatcaaaacgaaacaaaggctgggcacagtgtctcacccctgtaatcccagcactttgggaggccgaggcttggatcatgaggtcaggagttcaagaccagcctgaccaacatggtgaaactccatctttactaaaaatacaaaaattagccgggtgtggtgatgcgcgcctgtaatcccagctactcaggaggctgaggcgagagaatcgcttgaacccaggaggcagaggttacagtgagccgagattgcgccactgcactccagcctgggcgacagagtgagactccatctcaaaacaaaacaaaacaaaaaaaccttatgcctagtccccagccctaacagattttgatttaacttttctggggtgaggcctgagccttgggacttgggaatgtgcggcaaggttgagaaccactaccttaaatgtccctatggagtcagctctcttatgtttaccaatttgtcatttctttaataaaacattaaacagcttgagcccacagagcaagaaaaattaaaaaccaaacaaaattaaaaattaaacatgttatttttctcataaaacaaataatgcatattattataggaaatttggtaaataccaaataaaaatagtatgttgacccaaagttaagtactgttaacattttggtgtatattcttccaagttttgggggcaggcagggagcatgtatataaatactttccctacaaaattgggttcatgtagtgattgagttggaaataacaaagcctcaaaatcactgtggtttaaggtagagtagttttttgctatctttttcgtggcgtgatctctattcaccgcaacctccgcctcctgggttcaagcaattctcttttctcagcctcccaaatagctgggattacaggtatgtaccactgcacctggctaatttttatatttttagtagagatagggtttcgccatgttggccaggctggtcttgaattcctgatctcaggggatccccccacctcagcctcccaaagtgttgggattacaggtgtgaatcactgcgccctgccttgttcctcttttttaaaagtaagaataactttcccaggaatttctattatagcaaacctctccttgggtaccatcggctagaatgaggttaaatctcatttcttatctctggcaagagggattcagttactcttagctcagacaagtgcaccactgcaaaggtcagttccccacgctgcaccctcacctgatttcaggggagaggaggacacagaatggatgtcgggaggtcatcttcagtgtccactcctggtagtgttttgggtgagatcttgagcttcttgatgggctgaggagaaggaggtgtgaaggtaccagcttgcaggttcagggagaggtgactgatgagtcagaaggcagcaggggtgagggacgacactggctttggatattgtcagggtggaggcaaagtgattggtgagaactagggtttaaggccctcaaaccacatctaaaaacatcaaggcaaatcctagaaataatttgaaatagatgatgaagatttttctaggagaacatgtgtgtgtattccatgtaaatactgcgcgctaatcaattgcacaactggagctgctcacgtaagtactctttacgaaaggatacagcatttgtcccttgattatagtaaaaaatatagtattcatggtagaaaatgtgggaaatacagaaaaggatttagaaaaaaggaaaatcttatcaggaacagtctcggtatcattttgtggtttccacttcgtgtgtagggccacacgtgagtctgtttgttttacatgctagagctcttggggctgtggaatctagactggataagttgaaaacaaagagttggaggtgcttatttatgttcagggaaactcgaagagttcagggaagacttctggatgggggattcatgctgccctgggaagtggggtttgatttggcaggtggggccaggatagggaaggctcagtgatcatgagatcattgtggctggagtgttggttgttgggggaatgggggaggaagactgggaaggtaagggagggcctccaaagcagtagtttccccttatctatggtttcacttttcgtgatttcagttacctgtggtcaactgaggtccaaaaatactaaatggagccaggtgcggtggctcacgcctgtaatcccagcactttgggtggctgagacaggtggaaaccttgagtcccagagttggagaccagcctgggcaacatggcaaaaccccgcctctacaaaaagtagctgggcatggtgatctacgcctgtagtcccagctacttgggagattgaggtgggaaattgcttgagcctgggaggtggaagctgcagtgatcatgccactggactccagcctggacaatagagtgagacccttctcaaaaaaaaaaaaaagaaaaattaaatggaaaattccagaaattatttataagttgtaagttgtgtaccattctgagtattattacataattgttctatttttagttattgttaatttataaattattatttatatttattattgtgcctaatttataaattaaacctggtcataggtaagcttggaggctgaagcagctccactgtgaatgctaatcctccacgctgacttctgaccaaccccagcttcaggaatgcctctaaaatttccgctctcatgcactttgatgtaaatcctgccctcaggtcagaacaactttgatgttatcataaatacatacttaccgtaaatcctgcccttcgtcaaattccctgtggtatgtaagccctgcgtctgagccataacagtgtgggggcccagtttctcactgcccgagacaaggcttctgtttgtatgtctctataaagtgtgtctttctgagaagctggatttgccagtctttcctcagcctctcagctcccgtggcctgttggggtaggtttgcatagagctgcccaccatggaacagtatgtatgtatagcaaaaaaaaaaaaaaaaaaaaaatggtatacataagggtcagtactgtctgaggtttcaagcatccaccaagggtcttaaaatgtatcccccatggacaagaggcactgctgcaccataagaaaatagaggctgtgttctgccaacagtggggatttgggacaattttgagcccagaggatgacctacttactcacacctacagtctgctctcctctggagggcacagcacgcctcccaggttcgtgaggcaagtccctttcctggctttttggcgtcctcttgtgcggtactgacacctactgctcttactaagtagtgcagcctcctcaggatccccggcatccccgctgtgcctggcacggaatgagagtccctaatcacaagttaaagccagctgaatctcagccctttttcatgatgcacatttggagaataaagtatttaagttacatatcttaggaccagaatcaaggaatagcttgctcaccttaaaggtcagactactgtttaatttattgctcatttttccttgggtttcggctctattttctaggttttcaagcctatggctgatgctgctgtgaagattgtggagaaaaatggctttagtgataagattaaggttatcaacaagcattccaccgaggtgactgtaggtccaggtgagatttacacaccctgtgttgaaagctttgcttgctcttgtgtgagagaggaaaagggttattccagttacctggaacaaatccaggtcatagcatagaagtgggacctctctgtgtggagctctgacagtaaggacttggtttctcttgatgtttattttcctgctagttaaaactagtcaacaaggagtagactagagctagtcaggtccagcaatggagacgcaaacaaaacctacatttgctttaagcaaattggaattcttatggggctcaactcttgagtttcaactaccaataattacgccttggataaacctcattggctacgatactgccactgctcaaagctcaactctgagtttcatcaggcagaaagtacttagttcttttatttatttatttttttgagagagagtctcactctgtcgcccaggctggagtgcagtggcgctatcttgcctcactgcaagctctgcctcctgggttcacccatcctggctaacacggtgaaactctatctctactaaaaatacaaaaaattagccaggcatggtggtgggcacctgtagtcccagctactggagaggctgaggcaggagaatggcgagagtagttctgacattctgcttctgcatacaacatgaacaattttcctgtatagcattgtctcttaaggtttccagaatatgtatatgtacacacacacacacacacacacatattttttttttgagacggaatctcactgtgtcacccaggctgcattgcagtggtgcaatcttggctcactgcatcctccacctcctgggtacaagtgattctcctgcctcagcctcccaagtagcggtgattacaggtgcctgccaccacacctggctgctttttgtatttttagcagagacggggtttcaccatgttggccaggctggtcttgaacccctgacctcaggtgatccgcctgcctcagcctcccaaagtgctaggattataagcgtgagccaccatgcctggcctccagaatattttttatagtctagaactttgtttcagtctttgaaaatttcacatgccactgacacttagagaacatagttgaaagatttgcaaaggaaaaactgtggtgaagttatggataacaccatgggttttttctaattttttgtggagatagggtcttactatgttgcccaggctggactcaaactcttatgctaaagtgatcctcccatctcagcgacccaagtacctgggactacaggtgtgcactactgcacctggctttttcaccacggttttggagaatgcagtatcattctgaattgaagcttctacctaaggtcaacattattctcccatttaacaatttttttttaatggagaatctgaaacatgtacaaaagaagtgggtactatcttatttatttatttatttgagacagagtctcactctgttgcccaggctggagtgcaatggcaggatctcagctcactgcaacctctgcctcccatgttcaagcgattctcctgcttcagcctcatgagtagctgggattacaggcgtgcaccaccatgcctggctaatttttgtatttttagtggagacggggtttcaccgtgttggccaggctagtcccgaactcctgacctcaggtgaccagcctgcctcggcctccgaaagtgctgggattacaggtgtgagccaccgcgcccggcctatcttttttatttttaaaatatacaatagagtgctcaaatcattccatttacaatcaacgttattgaagtatgatttacattaaatgaatatccattttcattatggatatttgacaaatataaacacacttgtaaccaccatcaccataatgaagataatagaacatctccatcatgcccaaagagattcctcataaccctttctatcagtccccccatatcctggtcctaggcacccactcatagacttcattatagattagatttgcctgtctaggatttcaaggaagtggaatcaaagaagtgtggactcttctgtgtgtgtgctctcttttttatagcgtgatgctggtaagattcttccacactgttcatgtcttgggggtccgttcttttgtgttactgagcagcactctattagatagatgtaccataacttgtttatctctctacctgttgatggacagggatttcttggataggtctttagattcactgatcttttcttttgcagcatctaatatgctgttaagtatatttagtaaacttttcatttctctttctttgttgttcttttttttttttttttgagacaggatcttgacctgtcccccaggctggagtgcaggggtgtgagcatggcttattgcagctttgacctcctgggctcaagcagtcctcctgcttcagcctcctgtgtagctgggaccacaggctcatgccaccatgcctggctaacttaaaaaaaatttttttttgtagagatgggatctcagtttgttgcttaggctggtctcaaactcctgggctcaagcgattctcccacctcagcatcccaaagtcctaggattacaggcgtgggccgctgtgcctggcctcatttttgatattgtattttttaatctctgaaagttccacttgattctttttcataacttccatttttctcatgttcatagttttctataagcacatttattttagctttttgaacatccttatcttctgttcccaccatctttgttttttctgggtttgttctcttgactcatttttatccttattctgggtcacattttccttcttcacatgtctaaccatttttgtttggatgctgtggctatttggaattccccattgttgagtgctagacttcgttggttttgctttttaaactttggcatgcagttgggttacttgcagttcagattgatcctttcagggcttgtttaagctttctttggagtggggttagagtagctttaagtcaggccttctcaacagtagtgctgtgacgttttggcattctccaactatgtgacattttgataattctttgttgtggaccctgtcctttgcattgtaggatgtttagcagtgtccctggcctcttcccagtggatgtcagtagcactcccctcctcccaccattcttgccaactaaaaatgtctccagactgccacgtcttccttggtctcgagtgtgtaaaattgccacctgttgagaaccactgctctaaggctgtttagccagacagttactgtaacctttctggagtgtctgctgagagctctaggtgctcagcagggtttcccttgtctggctgatcagaacttgaatgtttcccaggcctctgagagctccggagattgttatcactcatgcaacctttgctcggcttcacagagtattaccctgtgtgtgtgtgaatgtattaacacagaccctagaggaaccctgtgcagcattctgaaggctttttttctgtgtaatttcctctctgattctctgcctggcaagttccagctgcttccacttccctgaactcgtttcctgtctgtttaactcagcaagactgccgtgctctgtgtcacctcttaccctatactgtggtctggaaagggtctcctggctgatagccagagcagggtaagggttacttggtttgtttcccttcttagggagcaaactgtgttgcctcttgctcaacatctgaaaacacttgtttcatatattttgcccagttttctagttgataacagccggagggtaagcctgatcccacttattccactatggccagagtggagattgattcatttatttatttttttttgagacagtctcactctgttgcctaggctggagtacagtgatgcgaacacagctcactgcagcctcgacttctgggctcaagtgatcctcctgcctcagcctcctgagtagctgggaccacaggcaggcgccaccatacccaactaatttttttgtttttttaaatttttattagaaactaagtcttgcggctgggtgcagtggcttatgcctgtaatcctagcactttgggaggccgaggctggcggatcacctgaggttgggagtagcaaccagcctgaccaacttggagaaacctgtctctactaaaaatacaaaattagtcaggtgtggtggtgcatgcctgtaatcccagctactgaggagattgaggcaggagaattgcttgaacctgggaggcaaaggttgcggtgagccgagattgcgctattgcacttcagcctgggcaacaagagcaaaattctggctcaaaaaaaaaaaaaaagaaaagaaaagaaactaggtctcgctttgtttcacaggctggtcttgaacgccaggcctcacacagtccttctgcctcagcctcccaaagtgctgggatcacagatgggagccactgtacctggcgagatcatttattcttgaaaatttatccattttgacggcagggagactgatctgcagggcagccttggccatgaagtatgctgactctgcctccaggcagcattgttcacacacacctcagcttaggccaggcccctcatatgatttcttattaaaaaaaaaaattttttttagatagagtggctctgtcgcccaggctggagtgcagtggcatgacctcggctcactgcaacctccacctcccggattcaagtgatccttccacgtcagcctcctaagtagctgatattacaggcatgcaccaccacctggctaatttttgtatttttagtagagatggggtttcactatgttggccaagctggtcttgaactcatgacctcaagcgatctgcctgccttggcctcccaaaatgctgggattacaggcatgaaccaccacgcctggccaatttcgtaatacttttcttcatagcgcttaccactgcaatcattaaatcattatgtagttatgtatttaatgtctgtatccccacccagctgaggcatcctgaggtcatgcactgcgtgggttgtattaactattccattccgttatttgctccgggcctgtcatgtaaaggagttaggtaatttttgtaaagtgagtagattgtcagttgtgcttcatccataatcccttgtaaatgtgactttgtttccgatcctcagcctgacaagtggcttcctcattgccaagttgggtggtctttcctctgcttttcctctctaaccactgccgctttggtacttctgccattccttccttcttgaaactctccctggaccttagtgacatctcttcatcttggttctcctgtgttgctttctttctgctccagatgtatactttccaaggttctgctctcagccctttttaaaagtggcatctgaagttgcctgttccccagagctgggttacatgctgaggcttgtggagagccaacccagggagcagcgtgtgttcatccgtccattttgttcatttggaaagggcttaggaagctcctggggtggctacctgcttcagactcccccaccccgtgcccttatacattagcagtcacactcaaaataccaggccctcaagaagtacttgttaaaatgcactggaccataaagcttgaattttttttttttaatttttattattttttgagacagtctcactgtatcacccaagatggagtatggtggggcaatttcagctcactacaacatctgcctcccgggttcaggcaattctcatgcctcagcctcctgagtagctgggactacaggcgcgtgctactacacccggctaatttttgtatttttagtagagacaaggtttcaccacattggccaggctggtatcgaactcctggcctcaagtgatcagcccagcttggcctctcaaagtgctggaattacaggtgtgagtcactgtgcctggctcttgatttttattttaatgaagcaatttggactataaagcattttaagttatataattggtttaaacattcaggagatagaattggcagagtgggtgatcagtgggttgtagggtgacagaaatcaataatttatctaatgtgtgttgactgttacggggcactagaccttgtgggtgctggggtacagtagtggacaggcagtcagcggtcctgctgtcctggaactagtaaatgatgcccagattcctggactatgtgactcattgattgattgaggcagaaaccctggagggaggagcaggcgtgttagctggggtgggtgggatgagttttggacagtgtattccagttggagtttgatgtgacatcagagaggatgggcagggcttctcgggagggtggtctctgtggcagaagacagaagtttcttcttaagctcctccacgtgatactgtcatggagcacaggtgagcttcataggaagtgtgcttttttttttttatcttcatcatcccgaccaccaccacatgagacagagcccattcacccgttttactgatgaggcaactgatggtcagaacggagggctcagggataggaagtgagatccaggccaggctccagcctcgagctcgaggttcacgctgtctctgttgtgctcttctatcagctgctctctttcttttttttttttttttgaaatggagtctcactctggcccagattagagtgcagtggcgtgatctcggctcactgcaacctctgcctcccaggtttaagtgattctcctgcctcagcctctcaagtagctgggattacaggcacccatcaccacgcctggctaatttttgtattcttagtagagacagggtttcaccacgttggccaggttggtttcaaacttctgacctcaggtgatctgcccatctcagcctcccaaagtgctgggattacaggcgggagccaccgcgcccggcccctgtcagctgctttcatgcttctcttttccttgtgtcatctgtgagacttgtgctctgtgtaggggaaatgagtgggctttgtcagattataattcatgaggcattaaaagtgtttacagttaattctccctgatgaatagccccttccaaagtctattttggctcttggctcattaaaaattataattgtagaagtagcagtacattactgaggtttagaaaacagttaacagaagatccctcccaaatcctactcttctctaaaatcctactgtcctaaaacaactgttatttaagagattgtttggtgacaaggcgctttcattaagggaatttgccatagtgatctggggattctaagtcatggatctcaattttggctgccagagcctaactcacagtagctggaagatcatcagagaaccttgttgtcttgctttggctttccctccctctccctgcaacctagaagtatttgacataccagcattctgtttttgcttttcaaataatttttctaatttagtggttaatagtttaattgttaatttatatctctctaattgctaatagggatgaaaaagttttcataagtttgatttctgttttgaattttctgtttatatttttacctggtttctttttgggtgtgtgttttttttgtttgtttgagacagagtctcactctgtcgcgcaggctggatcactctgtcgcgcaggctggagtacagtggcacaatttcggctcactgcaacctctgcctcccaggttcaagtgattctcatgcctcagcctcctgggtagctggggttacaggcgtgtgccatcacacctggctaatttttgtatttttagtagagatggggtttcgccatgatggccaggctggtcttgaactcctggcttcaagtgatcctcctgccttggcctcccaaagtgctaggattacaggcgtgagccaccatgcctggctaatttttgtattttttgtggaaatggggttttgtcatgtttcccaggctgatctcaaactcctgaactcaatccattgggtatttatagttttcttatcattttttgcagtctccctcccaatattaagcatacagaatagctgtaagagcagtacagtaaacacttatgatcccttaccctagatttatcaattagcgttttgtcatacatttacatatggattttttttttttcctgaaccattggcaagtcagttgcagacatcctgacacttctgaatacctcagcatgtatatgtgcttttagcgtgatggccccttaaccacttatctttcccatatttgctgtaaatatttttcctagtctgttgcttatgtccaactctgttttcttgtgtttttcagagggtgacatgccatgccgtgccaacatcctggtcacagagttgtttgacacagagctgatcggggagggggcgctgccctcctatgagcacgcacacaggcatctcgtggaggtagtagacggagggctccctcagacgtgtctgtggtctcagccagctcacatagcactcactcatgcaccgtgtcccacacagcccaagccctcagcacctctgatacacctgggacacccctccattcctgggggggctctggttctcctcacttaaaactttcatgtcccttgaatgccaaatcttaataggttagagttgaaaagcaagaaactatattcaaattcagttaagttcagcaaatattctcaggaaggcgatgcttgagctgtcagtcttgagaagtgatcaggtgttggcctggcagatggaatatttctggtagaggagagcagcacgtgctagacgtgagactgaatcggtgcggtggctccggagcctgctttggattttgtgctgtgtgggaggcaggagagatgggcttagcaactgaggctagagagctgggcaggggctagatggagtggggtttgggggccatgcccagagggtagctgtcattagaaggtggggtggcatcacaggagggtttgaagcagaggattgacagcagacttatgcaggcagatgtgtggagggcagttggggtatagggctggaggttgcgggtgggttaaaaggctgtggaatcgtccagacgctgtggtacagtgggcctcagctaaggctgtagacagaggcctgataggtggtcccaggagttggtggtcccttaggtgtagagatatcgatgctagggtttgggcacctggattggatggtggtgcttcctgttgacggggagtgcaggaagaggggtagccttgggaaggttgggaagtggtgagggcgattcttctggtttacacagagtttgagctctctaaaggtcagccaagcaaagaggcccagagatgcatggatttactcagtgaagagggcatggttgaggtcactgtggagagtgtggagggagacagtccggaccagggagtccccttgtgaggtggggcggaggaagcacagcctggggaaggcagcgggagtgagtccagttagagcagcatttgtctaccagagcaaggttgggagatgcttcgcagggaggccagttattctgctagccttttaccatgcccagagcaacccctacagcagagaatcatttggcccaagaggccagtggtgtcctggtggtgaaagccatgtgggtagcagctgtgagtgtgctcttgccgggtccctattgcctggtgcatggaggacgtggagtggatgcaagaggtaggaggagagccggacaaggagccggagccggagccacagccctaggggctgagtgtgcagcagtgcccagcggcgctagagggctgggcagctgagggggcaccgtggtccacagggctttgccacaaggaggctcttgttttggtgctgggcaggagcggcactgaagggacactgagcccagagccaggatcaccacccagcagcaggacgtgaagcatttaagagtgccaggtagccaggaacttagctgacagaagtcattttaggcacagtgtgtgttctttttgaaatgtagtaccctttttttcccttttccaagggcatagggctgaaaacagttcactattctaatagtataaggtgttgggcattactgaaccaacctaatgttaaggaataaacctcttttgatcaatgggaattactgtgggtctaagcatctgatttttgtttggttttgtttttaatataaacttaggaaaattgtgaggccgtgccccacagagccaccgtctatgcacagctggtggagtccgggaggatgtggtcgtggaacaagctatttcccatccacgtgcagaccagcctcggagagcaggtcatcgtccctcccgttgacgtggagagctgccctggcgcaccctctgtctgtgacattcagctgaaccaggtgtcaccagccgactttacagtcctcagcgatgtgctgcccatgttcaggtaccaaggagccaccataggtgatggcgctttgagacatttgatggaagttgggtattaggaggttctttttgagtgggaaggaaatctagctgctgtcacctgcctcgaaggcaagagtcctttgcagccaaatgtcattgccagtgaagtcactgtaaaagcttaaaaaatggagtgtgtgaggttaaactctgcttacattcttgaatattattcctcagcatagacttcagcaagcaagtcagtagctcagcagcctgccatagcaggcggtttgaacctctgacatctggccgagctcaggtggttctctcgtggtgggacattgaaatggaccctgaggggaagatcaagtgcaccatggcccccttctgggcacactcagacccagaggagatgcag

SEQ ID NO: 13519 - DNA, 1005 bp, Homo sapiens
agcggaggcgagcggagggtttcccgcggcggatttctgacagtcagacttgtccacaagaactcaactggcaaggctgcttttctgtgctaaaactggggagctagtgggcaccatgaagatcttctgcagtcgggccaatccgaccacggggtctgtggagtggctggaggaggatgaacactatgattaccaccaggagattgcaagaatgtaaaatactaccaaggtatccgggctgccgtgagcagggtgaaggacagaggacagaaggccttggttctcgacattggcactggcacgggactcttgtcaatgatggcggtcacagcaggtgccgacttctgctatgccatcgaggttttcaagcctatggctgatgctgctgtgaagattgtggagaaaaatggctttagtgataagattaaggttatcaacaagcattccaccgaggtgactgtaggtccagagggtgacatgccatgccgtgccaacatcctggtcacagagttgtttgacacagagctgatcggggagggggcgctgccctcctatgagcacgcacacaggcatctcgtggaggaaaattgtgaggccgtgccccacagagccaccgtctatgcacagctggtggagtccgggaggatgtggtcgtggaacaagctatttcccatccacgtgcagaccagcctcggagagcaggtcatcgtccctcccgttgacgtggagagctgccctggcgcaccctctgtctgtgacattcagctgaaccaggtgtcaccagccgactttacagtcctcagcgatgtgctgcccatgttcagcatagacttcagcaagcaagtcagtagctcagcagcctgccatagcaggcggtttgaacctctgacatctggccgagctcaggtggttctctcgtggtgggacattgaaatggaccctgaggggaagatcaagtgcaccatggcccccttctgggcacactcagacccagaggagatgcag

SEQ ID NO: 13520 - DNA, 26598 bp, Homo sapiens
agctttccagttctgctttaggacccgccccccagcacgctcctcgacgctgcgaggtcccgccccgcgtgctggccgcggtaaaagtggtagcagcggaggcgagcggagggtttcccgcggcgggtgaggcgctgggtatgctgggaaggtggggtcgctttggggttctgtgtgcagcgagcatggtgtccttggcaccagggtttcggcagaggagcctagcgtgggcctacttggactcctccgcgtggggcagctcgggacacccgggcctgcaggagagcggggttctaggctggccccggctctgcagtgcagccgggtgcctgccactcgcggggctctgtcgcagtactcgtgcctggcgcctcccctcagccacagagaccgcagtagctccaaccatcgcacccctaactgggccacgagttctctgattgccagacctgttgtctttgccactcactgttctgagtaattggagagtcgtgtattcactacacgccaaccagagtggtcctgtaaaagcgtaagcctagtgtagatacgcttctgcttaaaactcttgagtggctcccagtgcttttagaacaaaatccaaacgcctttccgaagtcgacaaggcccagcttgattgagcagaagatgtgataggagatgaggagcggggggcttctgcaaaagtgcttcggtcgctcaggcttttggcacattttgcttatgcaacctagttctttctaccttagggccttttcttgggaaagttggggtaaggattcctgacctgtaaaaactcttccccaacttttatcccggtctgtcttgtagatctcaaatgctagtttcctcagagtccttctgtaaccttggttttctctttctacaacgctctgtgtatttcttgcattcatgtagtctgtaatttgtattactctctcattagagtctaagctcttggagggcaagggtcttctctagcttgtggtggtggctccagtccctaatatagtgcctggcacatagaaggtatttaataaattttgttattttattttttcgagacagagtctcactctgctgcctaggctgagtgcagtggtgtgatcgaggcgcactgcagccttgacctcctgggctcaagcgatcctcacctcggcctaccgagtagctgggactacaggcacgcgccactacactcgggtaatttttaattttaatatatgtatatttatatatatatatatatatatatatttttttttttaagacagggtctcactctgtcacccaggctggagttcagtggcgccatctctgctcactgcaacctctgcctcccgggctcaagtgattcccctacctcagcctcccgagtagctgggagtaactgggactacaggcacaggccaccgcgcccggctaatttttttaaaaattttttgtagagaacggggtctcactatgttgcgcaggctggtctggaactcccagactcgatatccttgcgtctcggcccctcacagtgctgggatcacaggtgtgagccaccaccgcctagcaaatacattttgaatgaatgtagtggaccatctgctctgcagtctgacggctaatacaattagggcttggcatggtggtttctatttcctccttgtaaatggccatgcaagtttacaactcttggagaatgaggaggggttcagagaatatctcctgaatctgtagtgtagactgcttctgggagagaacaaataataatggatgagggcattcagccagagaaggtgtgtagtgcccaccagaagaggttcatgccttcataaaattgttaacacaagacatagttccaggtttgtttgtttgtttgagatacagtcttgctctgttgcccaggctggagtgcagtggcgcgatcttggctcactgcaacctctgcctcccaggttcaagcaattctcctgcctcagcctcccaagtagcagggattacaggcacctgccaccatgctggctaattttttgtatttttagtagagacggggtttcgccatgttggccaggctggtctcgaactcctgacctcaggtgatccacctgctttggtctcccaaagtgctgggattataggcgtgagtcaccgtgcctgggctgttccaggttttgaaaagacactgtggtcctggttttagactcagcaacatcacagacaagaaaggaatcctatggattaaagttcttcactataagttttttttttcctccagttcaaatgggtaacgtgccaatgtagtaaaggtttgagggaggcacgtctgacacaggcacatgaacacccagtcatcacgcttatgaactacaaaacgatgactcttaaccttgaagtgacttcagaattgattccacatggaccacaggattagtatttcaggactctaccatatggatcctattgatatgtttgacacctggtccagttttacttcactaaactgattgatataatgtgcatgattgtctaagcctttctaattggatgaaatgccttctccgtccacaaccccctccttctcctcctgcctcagctgaatccaccttttaagccttccttgaacattcagtcagatatggccatttctttctctactccaacatttgttggacacagttttctaatgcacattacagattctgacagttctagatattctgtctgtaaaataaatgttagtacatgagataaagtggattatagcaatgttgttaaactgctggttgcaacccattgatgggtcctgaccagcaagtaaaagtgcagctgggtgccgtggtgcatgccggtagtctagctacttgggaggctgacgtaggaggatcgcttgagtccaggagtttaaggctgtagagtgtaatgatcatgcctgtgaatagccactgtgatccaacctggacagcagggagatcccatctcttaaaaacaataaaaatgaaatagagcatatcagagggccttgttcgtaggaagtcagtattgttttgtggaacatttagttgtatgcgtacatgcaggtatgtgtattgagtctcattttaaagtatatttcttactggggttatcagaaagtttgaaaatcattagactaggggataggtatgctgagattttagtagtagagttttacctggacaaattgtctactttgaacctgactgccggcctgagtttgttcagggaagattgtttctaatctatttgctttttgtttgtttgttttggtgacggagtcttactctgttgcccaggctggagtgcagtggtgcggtctcagctcactgcaacctccgcctcctggattcaagtgattctcctgcctcagcctcctgagtagctgggaatacagacgtgcgccaccatgtctggctaatttttgtatttttagtagagacgagggtttcgccatgttggcaaggctggtcttgaactcctgacctcaggtgatccgcctgccttggcctcccaaagtgctgggattacaggtgtgagccaccgtgcccagcctgtttctcatctatttgtgtaagaattccatgtttacttactctagataacttcaaaagaaaaaaaactctggccaataaaatgccataggaatgtttagggatatgtggagtaggcattctttctaagttttcctgaagatgcaccaatgtttaacaagaaaggaagggcagtgtagaacacctattgctttctgcatggtaagagggatgggtattgggagagcccacacctgctgaggagtgcctttagactttgagcggtggtgtttctctccctcccagaaatagatctctttggggagacaggccatacaagacgtgaatctggtgacattttacttgtttgaagcaaaatttttttagatgatggagggtttttaaaaattgcttttaaaattaaaatttgaatagataagaagtaatcactataaaaaataatgaagcataaggaatgctagtattagctgggtgtggggcactcacttgtagtcccaactactggagaggctgaggcaggaagaatgcttgagcccaggagtttgagtccagcctgggcaacataacgagaccccatcttttaaaaaaaaaaaaaaagaaaaagaatgctaatatcgtgaacatttatgttcccaccacccaatttaagaaaaagaacaatacttttgaagtccactgcgtacccctccttgatcccatctctttcccttctcttttaggagttaactatcctgattccttgctatgctttttagtgtgatccctgaagaacgtatcactccattttgcatagctataaatttcatagaaatggaatcgtattgcatgtgttgtgtgatttgctgtttttgctcatcattatattcctgggattatccatttttaggtttatgtgtgactgtaatttattgtttagatgaaagttttcctggtttgacttgctctatcttcatatttttccttaagctaagggttcagcatacgaaggcagtattggtggcacttctttaacagtaccccatctcttctcctagccttgagggctgcacctagatgaacttgtgaggctcatttgaaccttttggaagcaccgaagcctgctgaagtttccagacatctgtatgaatctgttgtagttttttaatgttatatgctgaatataaaaccaagtaactcctgctggaaacatttacaatatcgattaacaaatactatcagtggctttgacatttttgtcagtttcttgatttttttccccgcttttgtctccccttcccccctccacattttggggcattgtgctgttaatagattttttttctgttcgtttgtttatatacctcctgtttccttctgatgttaatagatttctgacagtcagacttgtccacaagaactcaactggcaaggctgcttttctgtgctaaaactggggagctagtgggcaccatgaagatcttctgcagtcgggccaatccgaccacggggtctgtggagtggctggaggaggatgaacactatgattaccaccaggagattgcaaggtactgggttggtttacagcaggctgcagctgggtggggcacttgatctcaaagcagatgccttgggctccagtctgagcgtgggctaggctgtcacccagtgcttatgatgagggctggtgttggtcctgagcaggtctgctcagccaggtaggtatatgtagcagttaggcaaaatcatgcctgtttggagagtcagacattatgtagcagccttagcagagcctcagcatctgtttaacggagcaaagaaaacccaagcctcagtagtgttgatgaagttgaatcatttacttgccttactgaaatggtgacatgttcatcatatggttaaattcttttgaatgaaaaaaatgaaaatggttttttttttcccttagaagaaatatttaaaagtatgtgagttgttggccaggcgcagtggctcacgcctctaatcctagcactttgggaggccgaggtggccagatcacctgaggtcaggagttcgagaccagcctgaccaacatggagaaaccccgtttctactaaaaatacaaaattagctgggcatggtggctcatgcctgtaatcccagcttacttgagaggctgaggcaggagaatcacttgagcctgggaggcagaggttgtgttgagccgagatcgagccattgcactccagcctgggcaacaagagcgaaactctgtctcaaaaaaaaagtatgtgagttgttatgtagcaatcattaagtgcattcagtgtgccagcattgtgctaaggctgtggataccagatgaagaagatcctgttctcatcttcaaggaccatgcagttttgtggaagagacaggcacatacaaaattacagcacaaaagccaggcacggtggctcatgcccgtaatcccagcactttgggaggcaaagggcgggcgggcgggcggtggagggggtggtggcggctgatcacttgagggtcaggagttcgagaccagcctggccaacacggtgaaaccccgtctctataaaaaaaaattagctgggagtggtggtgggcgcctgtaatcccaggtactcgggaggctgaggcaggaaaatcacttgaactcgggaggtggaggttgcagtgagccaaggttgtgccactgcactccagcctgggtaacagagtgagactctgtctcaaaaaaaaaaaaaaaaaaattacagcacagtgagataaaggcacaagaggtcatggaagcagcaagaaccagctgaacttggggtgggaggtaatgtttgaataatttctcagttctaaaggaagagaaggtgaagtttgagcagcagggattacaggtaagctttcagatgagccagattgtggctgggtgcagtggcctacacctgtagtcccagctacttgggaggccaaggcaggaggattgcttatgcccacgagttcaacatagtaaaacactgtctcacaaacaaacaaagaccaaaaacaggctgggcacagtggctcatgcctgtaatcccagcactttgggagaccaaggcgggcggatcacctgaggtcgggagttcgagaccagcctgaccaacatggagaaaccctgtctctactaaaaatacaaaattagccaggtgtggtggcgcatgcatgcctgtaatcccagctgctcgggaggctgaggcaggagaatcacttgaacctgggaggcggaggttgccatgagccgagatcgtgccattgcattccagcctgggcaacaagagctaaactctgtctcaaaaaaaaaaaaagaaaaaaaaccacacacacacagatgggctattctggggagcagctagcagtttagtgcagctggagtgtggtacaaaagtactatggtaagagaggctgccgaaagcatacgcggggtcattttgtaaagggtggtagcaaaatgcaggaagaggaacatgagtttaagtccaagctttgccacttctttactctcttggccaagttacttctctgagccttaatataaaataatatatacttcaatatagtaatacattatctcacagtataatacaattatcttagaattgtttgatgattaaatgtaatacagtatctggtgcagaattagggcttaaaatatttacttttttttctttttttttttttgagacagagtctcgctctgtttcccaggctaaagtgcagtggcacgatctctgctcactgcaagctccgcctcctgggttcacgccattctcccgcctcagcctcttgagtagctgggactacaggtgcccgctgccacgcccggctaattttttgtatttttaatagagacggggtttcaccgtgttagccaggatgatcttgatctcctgaccttgtgatccgcccgcctcggcctcccaaagagctgggattacaggcgtgagccactgcacctgcccaggtcttaaaatatttctaaacattttggacattattttcttgttttattgttcagatggagtcttactctgttgccttggctggagtgcagtggcgcagtctcggctcactgcaatctctgcctcccaggttcaagggattctcttgcctcagcctcttaggtaactgggattacaggcatctgccaccacacctggctaatatttgtgtttttagtagagacttggtttcacctgttggccaggctggtcttgaacttctgacctcaggtgatccacctgcctctgcctcccaaagtgctgggattacaggtgtgagccacagtgtcaggcctggacgttattttctgagtgatatattaaacaggagagaaagaggattggattgcattttggaacactcactgagagcggtgtggagaggagagcatttggggatattgtagtcccagagctgcatagtcccagaggagacagctcgggggaacttgagtttggtaactcactggatatgatggagggagagagaagattcaagaagcaccaagacttctggttagaatgacaaagtggatggggcctgcaagggaggaatgggtggtgtggggaggggaacacgatggagattaggcgtttaggtttggacatccacatagagatgccaatggcagatagaattttgggtctggagacagaatttgtagttgttggaactgaaactgggagaggttgcagtctctcaagggggtgtggaatgtgaaaggtagagggctgaagaaggaatcccggaatagctgaggaggcaaagaagggcaagggagatagccagcatggaaaggaagaaagagggagtgtgtctagcaaggtcagaggcactgggaagtcccagatactgatgactgacatcagctgcaggagtgagctggtggtggttaccgagagtgatgtcagtggagtggtgggcagtaagtgtgaagaggccaggaaggtggtgagtgagatgccttttaaatagtgagcagaggtagaaaggactacatttcagctaagcatccatagctggcttcagatataaaaccttgatgtgccattaaaaaaaaaaaaaaaagaacccccttctttcagtgcaccgctcttcaaagtgtggaatgtggaccacctgtggcacaattgcctggagcacattagcccagccttctcaataagagtgagagtgtgtgtgtgtgtgtgtgtgtgtgtgtgttctgggactctgcatttcaggtaagctttctagtgattctagtgttgacccaaggctggagggcctctgttttaatgtgagctccttagctgtccccttgaattcccagaaagcgtggcagggcctgcctagttctgggtgctcatcccgaccccgcctgagggttttcagtgtgtgaattactgcagtaggaaatatggagaagtgattctcctccctttactacggtattggtgaactctttagttttccctgatgatgttaagtgaacgtgcccagtggggtacctgtcacatatacagtgggtgtatgtgagtgcttctctttccccggctgctctccctaataccgcatcagtggttatctccaggcagagatgtaggccaggttaggtcaagtattaggcagattgagtctgagtttttcctgaggaggaaaatgtgtagtgtatagcaagatcaagatgctagtggctgtggaattactgtgacagggctaactgccgagaccagctcggtcgtggagaccctaacccagtggcgctagaggaattaaagacacacacacagaaatatagagtgcagagtgggaattggggggctgacagccttcagagctgacagccacgaacagaactttacctacatatttattgacagcaagccagtgataagcattgttcctatagattatagattaaaacgggaaacaaagggatgggctctggctagttatttgcagcaggaacatgtccttaaggcacagatcactcatgctattgtttgtggttcaggaacgccttaagcgaaagccgccctgggtgggccaggtattccttgccctcattccagtaaacccacgaccttcagtgtgggcatcatagccatcaacgagcatgtcacagtgctgcagagatttgtttatgaccagttttggggcctgtttttggccagatttgggggcctgttcccagcagctaactactggagcatttttaggtctgagaacatctttctctgagacttttttctgcagcactagagaataacagcttgaaactctattaaaataaagtggccaggtgcagcgacggatgcttgtattgtagttctgctgaggcaagaggatctcttgagctaaggagttcaaggctgcagtgcccaatgattgaggctgttcatagccactgcactacagcctgggtgacataacgagaccctgtttctaaaaataaacaaaaaaataggccaggcgcagtagctcacacctgtaatcccagcactttaggaggccaaggtgggcggatcagttgaggtcaggagttcgagaacagcctggccaacatagtgaaaccccatctctaatgtaaatacaaaaattagccaggcgtggtggtgagcacctgtaatcccagctacctgggaggctgaggcatgagaatcacttgaacttgggaggcagaggttgcagtgagctgagattgcaccactgtactccagcctgggtgatggggtgagaccctgtctcaaaaaaaaaaaaataaataaagataaaagacaaccaaaaaatagtttaaaatagatgacacgtttgttctatctgtttagcaatgtgtttatatatgtgaatactcttgtgtgttgatgtgtatcatgcaaaggttactgacttttttgttttttaggtcatcttatgcagatatgctacatgacaaagacagagtaagtgtaaaaggaaactattatcttgatgtggggtgttttgaagtcttggattacaagaaggttaagaatccctgggggtcatgatgttaaatgatactgagaggcgtatggtgtagaagtcaggaaatcagttgggagactgggtcctacttctggctctatttttgttgtttaatctcccagctttatcaagatagaactgacaaataaaaatggtctatgtttatggtaatacaatgtgatgaatatatgtgtatggtgtaaaatgattgaatcaagctaattaacaaatctaccgcctcatacttttttgtgtgtggtgagaacatttaagatctactcgcttagtaatttttaagtgtacattattaactatagctcacaatgccgtacagcagatctccacaacttattcatcctatctgactgaaacatcagatcctctcccttagcaggtaccattctctgggcttctgagttcaacatttttttttttttttgagacagaatctcgctctgtcactcaggctagagtacaggggcgagatctcggctcactgcagcctcagtctcccgagttcaagcgattctcctgcctcaacctgcctaagtgttgggattgtacctagtattgggataatactattattatactattatacctagtattgggattataacttgggattacaggtgcgtgccatgacacctggccttcactgtagttttaatttccatttttaattttaattttatttttttgagactgggtctctgttgcccagtgcagtggtgtgatctcggctgcactgcagcctagacttcttgggcttaagcgatcccccaacctcagccttcccagtagctgggactacaggcatgccaccatgcctggctaatttttgtatgttttgtagaggcagagtttcgctgtattgcccaggctggtcttgatcccctgaggtcaagtgatccacccgccttggtctcccaaagtgctgggattatgggcatgagctactgcgcccggccatcgtgtgcttgtttaccatgtgtatatctttgttctagtctagggttatgaacataggtgtgattcttgatagacactgccacattgccttcaaaaagggttccagattcactgtaatatcttcaaaactgggtcattaaaaagtgacagctaatttaatggcatcgttaaagtgaaggctgtgccatccctggtttacaattgaggacgctgttcatcaattttttttaacttaaaaaataaataaaacaaggccaggcacggtggctcatgcctgtaatcccagcactttgggaagccgaggcaggcagatcacggggtcaggagatcgagaccatcctggctaacatggtgaaaccccgtccctactaaaaatacaaaaaaaagccgagcgtggtggcgggcagggcctgtaatcccagctactcaggaggctgatgcgggagaatggcgtgaatctgggaggcggagcttgcagtgagccgagattgcaccactgcactccagcctgggcgacagggagactccgtctcaaaaaaaaaaattgtggtaaaaacacataacataaacggtcatactgattgtatctaagacataaatgcacttactttgacaatgaaatagttctatatttctgtgaaaaattatttcacccagactaaacatttttgtgctttacctcagaggcaacgtcatttcttttttttcttttttctttctttctttttttttttttaacaagaatgagtctccctctgttgccaggctttagtgcagtggtgtgatcttagctcactgcaacctccacctcccgagttcaagtgattctcctgccttagcctcccaagtagctggggttacaggcatgcgccaccatgcctggctaattttttgtatctttagtagagatggggtttcaccatgttggccaggttggtctccaactcctgacctcaagtgatccacccgcctcagcctcccaaagtgctgggattacagatgtgagtcactgcacccggcctggtaattctaaagaatattcagttctagatattttctaattccagtctgatttagtcttttgcctatcagtttagaagtgtgtttcttaatgtatgaaaaattttttttcttcagttgtgtttctgatattaagatttttgacttgttttgcattgtggtcagaggatatcacccttttgatgccagttctgtattagctgtctaatgttatttaacaaattaccttaaattttaatagcctcttaatatttcttactaacttggcaggtcatcagtctatttaaaagatttgcacatattttttccatcatctttagttattttcaacagaagggtcactgtgcctattgagtcagaccgttatagatgaaagatgtatgtgtttactaaagacagaagtaaaaatcttcaagatgcaaagaagttattttctgatggggaaaatactttttagtgaagctctctgagttagagtcggtaaaggaaaacaagccatacatattgcagcagagcggctttaacacaaggagctggctacccagctgtgggagggctagaaagcaaatgggaacgctgagtaacctaacagtagagattgcagggagcagttaccttgcctagggctgagaaactaaacgagaagattaggatttccagaagccacaagcattgaggagagatcctgtggaccactgtccaagtacggctgcagctctgaggggcccaaggagctggttatgggatcattgggaaaagttggagtctgcaatcaactgcccctaccgagaggaccctgatgagaacagcagcatgcagaaaggagcaagcctgctctgtcctcctaccttccagtcgccctcttggtcccccttttggctgtacctaacagttggaaaaaggagaacatggtttgcagggctctggcatcacttagtagaggatagaagagtgagtgtggagcagggacagtcgcttaataaagggcaaggggctgactcacaagacctgcccaactcagccagagctgttctgccaggggccagaaaggccatagggccctgacttgcactgccactgccagctgtgactctagaactttgcaaagcacctttccacttacttataataactggtagtaagtgacggccatgtcttccttagaatgtaaaatactaccaaggtatccgggctgccgtgagcagggtgaaggacagaggacagaaggccttggttctcgacattggcactggcacgggactcttgtcaatgatggcggtcacagcaggtgccgacttctgctatgccatcgaggtaagccattcccttcaggtgtgtgtcctgcatcttgcatgggaaatcccctatgctcttgcactttccccgtctgttccttcacaaacattcatggagtgctcactctgtgccaagcacagagccaggctctgagcgtatagagatgagtcagacacagttccttcctccaggagctaattttctcctctgtcagcctaggctgcacatcagaatcactaggagctttagaaaatacttacaggctgggcacagtggctcacgcctgtaatcccagcacttcgggagggtgaggcaagacaattgcttgagcccaggagtttgagaccagcctgggcaacatagtgagatcccatctctacagaaaaacttttaaatattagctgggcatggtggcatgtgcctgtgttccagctattcttgaggctgagatgggaagatctcttgagcccggaaagtcaaggctgcagtgagccatgatttggacttcatgtaagaaagcaaaaaattacttctaccttgtttaagccagttattgtgggactttgttgtttccaactaatcagtatatgaactcagttttgtaggggaaagtatttaaatacatgcccccacaccaccacactccagcctgggtgacagagtgagactttatctcaaaaaaatcaaaacgaaacaaaggctgggcacagtgtctcacccctgtaatcccagcactttgggaggccgaggcttggatcatgaggtcaggagttcaagaccagcctgaccaacatggtgaaactccatctttactaaaaatacaaaaattagccgggtgtggtgatgcgcgcctgtaatcccagctactcaggaggctgaggcgagagaatcgcttgaacccaggaggcagaggttacagtgagccgagattgcgccactgcactccagcctgggcgacagagtgagactccatctcaaaacaaaacaaaacaaaaaaaccttatgcctagtccccagccctaacagattttgatttaacttttctggggtgaggcctgagccttgggacttgggaatgtgcggcaaggttgagaaccactaccttaaatgtccctatggagtcagctctcttatgtttaccaatttgtcatttctttaataaaacattaaacagcttgagcccacagagcaagaaaaattaaaaaccaaacaaaattaaaaattaaacatgttatttttctcataaaacaaataatgcatattattataggaaatttggtaaataccaaataaaaatagtatgttgacccaaagttaagtactgttaacattttggtgtatattcttccaagttttgggggcaggcagggagcatgtatataaatactttccctacaaaattgggttcatgtagtgattgagttggaaataacaaagcctcaaaatcactgtggtttaaggtagagtagttttttgctatctttttcgtggcgtgatctctattcaccgcaacctccgcctcctgggttcaagcaattctcttttctcagcctcccaaatagctgggattacaggtatgtaccactgcacctggctaatttttatatttttagtagagatagggtttcgccatgttggccaggctggtcttgaattcctgatctcaggggatccccccacctcagcctcccaaagtgttgggattacaggtgtgaatcactgcgccctgccttgttcctcttttttaaaagtaagaataactttcccaggaatttctattatagcaaacctctccttgggtaccatcggctagaatgaggttaaatctcatttcttatctctggcaagagggattcagttactcttagctcagacaagtgcaccactgcaaaggtcagttccccacgctgcaccctcacctgatttcaggggagaggaggacacagaatggatgtcgggaggtcatcttcagtgtccactcctggtagtgttttgggtgagatcttgagcttcttgatgggctgaggagaaggaggtgtgaaggtaccagcttgcaggttcagggagaggtgactgatgagtcagaaggcagcaggggtgagggacgacactggctttggatattgtcagggtggaggcaaagtgattggtgagaactagggtttaaggccctcaaaccacatctaaaaacatcaaggcaaatcctagaaataatttgaaatagatgatgaagatttttctaggagaacatgtgtgtgtattccatgtaaatactgcgcgctaatcaattgcacaactggagctgctcacgtaagtactctttacgaaaggatacagcatttgtcccttgattatagtaaaaaatatagtattcatggtagaaaatgtgggaaatacagaaaaggatttagaaaaaaggaaaatcttatcaggaacagtctcggtatcattttgtggtttccacttcgtgtgtagggccacacgtgagtctgtttgttttacatgctagagctcttggggctgtggaatctagactggataagttgaaaacaaagagttggaggtgcttatttatgttcagggaaactcgaagagttcagggaagacttctggatgggggattcatgctgccctgggaagtggggtttgatttggcaggtggggccaggatagggaaggctcagtgatcatgagatcattgtggctggagtgttggttgttgggggaatgggggaggaagactgggaaggtaagggagggcctccaaagcagtagtttccccttatctatggtttcacttttcgtgatttcagttacctgtggtcaactgaggtccaaaaatactaaatggagccaggtgcggtggctcacgcctgtaatcccagcactttgggtggctgagacaggtggaaaccttgagtcccagagttggagaccagcctgggcaacatggcaaaaccccgcctctacaaaaagtagctgggcatggtgatctacgcctgtagtcccagctacttgggagattgaggtgggaaattgcttgagcctgggaggtggaagctgcagtgatcatgccactggactccagcctggacaatagagtgagacccttctcaaaaaaaaaaaaaagaaaaattaaatggaaaattccagaaattatttataagttgtaagttgtgtaccattctgagtattattacataattgttctatttttagttattgttaatttataaattattatttatatttattattgtgcctaatttataaattaaacctggtcataggtaagcttggaggctgaagcagctccactgtgaatgctaatcctccacgctgacttctgaccaaccccagcttcaggaatgcctctaaaatttccgctctcatgcactttgatgtaaatcctgccctcaggtcagaacaactttgatgttatcataaatacatacttaccgtaaatcctgcccttcgtcaaattccctgtggtatgtaagccctgcgtctgagccataacagtgtgggggcccagtttctcactgcccgagacaaggcttctgtttgtatgtctctataaagtgtgtctttctgagaagctggatttgccagtctttcctcagcctctcagctcccgtggcctgttggggtaggtttgcatagagctgcccaccatggaacagtatgtatgtatagcaaaaaaaaaaaaaaaaaaaaaatggtatacataagggtcagtactgtctgaggtttcaagcatccaccaagggtcttaaaatgtatcccccatggacaagaggcactgctgcaccataagaaaatagaggctgtgttctgccaacagtggggatttgggacaattttgagcccagaggatgacctacttactcacacctacagtctgctctcctctggagggcacagcacgcctcccaggttcgtgaggcaagtccctttcctggctttttggcgtcctcttgtgcggtactgacacctactgctcttactaagtagtgcagcctcctcaggatccccggcatccccgctgtgcctggcacggaatgagagtccctaatcacaagttaaagccagctgaatctcagccctttttcatgatgcacatttggagaataaagtatttaagttacatatcttaggaccagaatcaaggaatagcttgctcaccttaaaggtcagactactgtttaatttattgctcatttttccttgggtttcggctctattttctaggttttcaagcctatggctgatgctgctgtgaagattgtggagaaaaatggctttagtgataagattaaggttatcaacaagcattccaccgaggtgactgtaggtccaggtgagatttacacaccctgtgttgaaagctttgcttgctcttgtgtgagagaggaaaagggttattccagttacctggaacaaatccaggtcatagcatagaagtgggacctctctgtgtggagctctgacagtaaggacttggtttctcttgatgtttattttcctgctagttaaaactagtcaacaaggagtagactagagctagtcaggtccagcaatggagacgcaaacaaaacctacatttgctttaagcaaattggaattcttatggggctcaactcttgagtttcaactaccaataattacgccttggataaacctcattggctacgatactgccactgctcaaagctcaactctgagtttcatcaggcagaaagtacttagttcttttatttatttatttttttgagagagagtctcactctgtcgcccaggctggagtgcagtggcgctatcttgcctcactgcaagctctgcctcctgggttcacccatcctggctaacacggtgaaactctatctctactaaaaatacaaaaaattagccaggcatggtggtgggcacctgtagtcccagctactggagaggctgaggcaggagaatggcgagagtagttctgacattctgcttctgcatacaacatgaacaattttcctgtatagcattgtctcttaaggtttccagaatatgtatatgtacacacacacacacacacacacatattttttttttgagacggaatctcactgtgtcacccaggctgcattgcagtggtgcaatcttggctcactgcatcctccacctcctgggtacaagtgattctcctgcctcagcctcccaagtagcggtgattacaggtgcctgccaccacacctggctgctttttgtatttttagcagagacggggtttcaccatgttggccaggctggtcttgaacccctgacctcaggtgatccgcctgcctcagcctcccaaagtgctaggattataagcgtgagccaccatgcctggcctccagaatattttttatagtctagaactttgtttcagtctttgaaaatttcacatgccactgacacttagagaacatagttgaaagatttgcaaaggaaaaactgtggtgaagttatggataacaccatgggttttttctaattttttgtggagatagggtcttactatgttgcccaggctggactcaaactcttatgctaaagtgatcctcccatctcagcgacccaagtacctgggactacaggtgtgcactactgcacctggctttttcaccacggttttggagaatgcagtatcattctgaattgaagcttctacctaaggtcaacattattctcccatttaacaatttttttttaatggagaatctgaaacatgtacaaaagaagtgggtactatcttatttatttatttatttgagacagagtctcactctgttgcccaggctggagtgcaatggcaggatctcagctcactgcaacctctgcctcccatgttcaagcgattctcctgcttcagcctcatgagtagctgggattacaggcgtgcaccaccatgcctggctaatttttgtatttttagtggagacggggtttcaccgtgttggccaggctagtcccgaactcctgacctcaggtgaccagcctgcctcggcctccgaaagtgctgggattacaggtgtgagccaccgcgcccggcctatcttttttatttttaaaatatacaatagagtgctcaaatcattccatttacaatcaacgttattgaagtatgatttacattaaatgaatatccattttcattatggatatttgacaaatataaacacacttgtaaccaccatcaccataatgaagataatagaacatctccatcatgcccaaagagattcctcataaccctttctatcagtccccccatatcctggtcctaggcacccactcatagacttcattatagattagatttgcctgtctaggatttcaaggaagtggaatcaaagaagtgtggactcttctgtgtgtgtgctctcttttttatagcgtgatgctggtaagattcttccacactgttcatgtcttgggggtccgttcttttgtgttactgagcagcactctattagatagatgtaccataacttgtttatctctctacctgttgatggacagggatttcttggataggtctttagattcactgatcttttcttttgcagcatctaatatgctgttaagtatatttagtaaacttttcatttctctttctttgttgttcttttttttttttttttgagacaggatcttgacctgtcccccaggctggagtgcaggggtgtgagcatggcttattgcagctttgacctcctgggctcaagcagtcctcctgcttcagcctcctgtgtagctgggaccacaggctcatgccaccatgcctggctaacttaaaaaaaatttttttttgtagagatgggatctcagtttgttgcttaggctggtctcaaactcctgggctcaagcgattctcccacctcagcatcccaaagtcctaggattacaggcgtgggccgctgtgcctggcctcatttttgatattgtattttttaatctctgaaagttccacttgattctttttcataacttccatttttctcatgttcatagttttctataagcacatttattttagctttttgaacatccttatcttctgttcccaccatctttgttttttctgggtttgttctcttgactcatttttatccttattctgggtcacattttccttcttcacatgtctaaccatttttgtttggatgctgtggctatttggaattccccattgttgagtgctagacttcgttggttttgctttttaaactttggcatgcagttgggttacttgcagttcagattgatcctttcagggcttgtttaagctttctttggagtggggttagagtagctttaagtcaggccttctcaacagtagtgctgtgacgttttggcattctccaactatgtgacattttgataattctttgttgtggaccctgtcctttgcattgtaggatgtttagcagtgtccctggcctcttcccagtggatgtcagtagcactcccctcctcccaccattcttgccaactaaaaatgtctccagactgccacgtcttccttggtctcgagtgtgtaaaattgccacctgttgagaaccactgctctaaggctgtttagccagacagttactgtaacctttctggagtgtctgctgagagctctaggtgctcagcagggtttcccttgtctggctgatcagaacttgaatgtttcccaggcctctgagagctccggagattgttatcactcatgcaacctttgctcggcttcacagagtattaccctgtgtgtgtgtgaatgtattaacacagaccctagaggaaccctgtgcagcattctgaaggctttttttctgtgtaatttcctctctgattctctgcctggcaagttccagctgcttccacttccctgaactcgtttcctgtctgtttaactcagcaagactgccgtgctctgtgtcacctcttaccctatactgtggtctggaaagggtctcctggctgatagccagagcagggtaagggttacttggtttgtttcccttcttagggagcaaactgtgttgcctcttgctcaacatctgaaaacacttgtttcatatattttgcccagttttctagttgataacagccggagggtaagcctgatcccacttattccactatggccagagtggagattgattcatttatttatttttttttgagacagtctcactctgttgcctaggctggagtacagtgatgcgaacacagctcactgcagcctcgacttctgggctcaagtgatcctcctgcctcagcctcctgagtagctgggaccacaggcaggcgccaccatacccaactaatttttttgtttttttaaatttttattagaaactaagtcttgcggctgggtgcagtggcttatgcctgtaatcctagcactttgggaggccgaggctggcggatcacctgaggttgggagtagcaaccagcctgaccaacttggagaaacctgtctctactaaaaatacaaaattagtcaggtgtggtggtgcatgcctgtaatcccagctactgaggagattgaggcaggagaattgcttgaacctgggaggcaaaggttgcggtgagccgagattgcgctattgcacttcagcctgggcaacaagagcaaaattctggctcaaaaaaaaaaaaaaagaaaagaaaagaaactaggtctcgctttgtttcacaggctggtcttgaacgccaggcctcacacagtccttctgcctcagcctcccaaagtgctgggatcacagatgggagccactgtacctggcgagatcatttattcttgaaaatttatccattttgacggcagggagactgatctgcagggcagccttggccatgaagtatgctgactctgcctccaggcagcattgttcacacacacctcagcttaggccaggcccctcatatgatttcttattaaaaaaaaaaattttttttagatagagtggctctgtcgcccaggctggagtgcagtggcatgacctcggctcactgcaacctccacctcccggattcaagtgatccttccacgtcagcctcctaagtagctgatattacaggcatgcaccaccacctggctaatttttgtatttttagtagagatggggtttcactatgttggccaagctggtcttgaactcatgacctcaagcgatctgcctgccttggcctcccaaaatgctgggattacaggcatgaaccaccacgcctggccaatttcgtaatacttttcttcatagcgcttaccactgcaatcattaaatcattatgtagttatgtatttaatgtctgtatccccacccagctgaggcatcctgaggtcatgcactgcgtgggttgtattaactattccattccgttatttgctccgggcctgtcatgtaaaggagttaggtaatttttgtaaagtgagtagattgtcagttgtgcttcatccataatcccttgtaaatgtgactttgtttccgatcctcagcctgacaagtggcttcctcattgccaagttgggtggtctttcctctgcttttcctctctaaccactgccgctttggtacttctgccattccttccttcttgaaactctccctggaccttagtgacatctcttcatcttggttctcctgtgttgctttctttctgctccagatgtatactttccaaggttctgctctcagccctttttaaaagtggcatctgaagttgcctgttccccagagctgggttacatgctgaggcttgtggagagccaacccagggagcagcgtgtgttcatccgtccattttgttcatttggaaagggcttaggaagctcctggggtggctacctgcttcagactcccccaccccgtgcccttatacattagcagtcacactcaaaataccaggccctcaagaagtacttgttaaaatgcactggaccataaagcttgaattttttttttttaatttttattattttttgagacagtctcactgtatcacccaagatggagtatggtggggcaatttcagctcactacaacatctgcctcccgggttcaggcaattctcatgcctcagcctcctgagtagctgggactacaggcgcgtgctactacacccggctaatttttgtatttttagtagagacaaggtttcaccacattggccaggctggtatcgaactcctggcctcaagtgatcagcccagcttggcctctcaaagtgctggaattacaggtgtgagtcactgtgcctggctcttgatttttattttaatgaagcaatttggactataaagcattttaagttatataattggtttaaacattcaggagatagaattggcagagtgggtgatcagtgggttgtagggtgacagaaatcaataatttatctaatgtgtgttgactgttacggggcactagaccttgtgggtgctggggtacagtagtggacaggcagtcagcggtcctgctgtcctggaactagtaaatgatgcccagattcctggactatgtgactcattgattgattgaggcagaaaccctggagggaggagcaggcgtgttagctggggtgggtgggatgagttttggacagtgtattccagttggagtttgatgtgacatcagagaggatgggcagggcttctcgggagggtggtctctgtggcagaagacagaagtttcttcttaagctcctccacgtgatactgtcatggagcacaggtgagcttcataggaagtgtgcttttttttttttatcttcatcatcccgaccaccaccacatgagacagagcccattcacccgttttactgatgaggcaactgatggtcagaacggagggctcagggataggaagtgagatccaggccaggctccagcctcgagctcgaggttcacgctgtctctgttgtgctcttctatcagctgctctctttcttttttttttttttttgaaatggagtctcactctggcccagattagagtgcagtggcgtgatctcggctcactgcaacctctgcctcccaggtttaagtgattctcctgcctcagcctctcaagtagctgggattacaggcacccatcaccacgcctggctaatttttgtattcttagtagagacagggtttcaccacgttggccaggttggtttcaaacttctgacctcaggtgatctgcccatctcagcctcccaaagtgctgggattacaggcgggagccaccgcgcccggcccctgtcagctgctttcatgcttctcttttccttgtgtcatctgtgagacttgtgctctgtgtaggggaaatgagtgggctttgtcagattataattcatgaggcattaaaagtgtttacagttaattctccctgatgaatagccccttccaaagtctattttggctcttggctcattaaaaattataattgtagaagtagcagtacattactgaggtttagaaaacagttaacagaagatccctcccaaatcctactcttctctaaaatcctactgtcctaaaacaactgttatttaagagattgtttggtgacaaggcgctttcattaagggaatttgccatagtgatctggggattctaagtcatggatctcaattttggctgccagagcctaactcacagtagctggaagatcatcagagaaccttgttgtcttgctttggctttccctccctctccctgcaacctagaagtatttgacataccagcattctgtttttgcttttcaaataatttttctaatttagtggttaatagtttaattgttaatttatatctctctaattgctaatagggatgaaaaagttttcataagtttgatttctgttttgaattttctgtttatatttttacctggtttctttttgggtgtgtgttttttttgtttgtttgagacagagtctcactctgtcgcgcaggctggatcactctgtcgcgcaggctggagtacagtggcacaatttcggctcactgcaacctctgcctcccaggttcaagtgattctcatgcctcagcctcctgggtagctggggttacaggcgtgtgccatcacacctggctaatttttgtatttttagtagagatggggtttcgccatgatggccaggctggtcttgaactcctggcttcaagtgatcctcctgccttggcctcccaaagtgctaggattacaggcgtgagccaccatgcctggctaatttttgtattttttgtggaaatggggttttgtcatgtttcccaggctgatctcaaactcctgaactcaatccattgggtatttatagttttcttatcattttttgcagtctccctcccaatattaagcatacagaatagctgtaagagcagtacagtaaacacttatgatcccttaccctagatttatcaattagcgttttgtcatacatttacatatggattttttttttttcctgaaccattggcaagtcagttgcagacatcctgacacttctgaatacctcagcatgtatatgtgcttttagcgtgatggccccttaaccacttatctttcccatatttgctgtaaatatttttcctagtctgttgcttatgtccaactctgttttcttgtgtttttcagagggtgacatgccatgccgtgccaacatcctggtcacagagttgtttgacacagagctgatcggggagggggcgctgccctcctatgagcacgcacacaggcatctcgtggag

SEQ ID NO: 13521 - DNA, 713 bp, Homo sapiens
agctttccagttctgctttaggacccgccccccagcacgctcctcgacgctgcgaggtcccgccccgcgtgctggccgcggtaaaagtggtagcagcggaggcgagcggagggtttcccgcggcggatttctgacagtcagacttgtccacaagaactcaactggcaaggctgcttttctgtgctaaaactggggagctagtgggcaccatgaagatcttctgcagtcgggccaatccgaccacggggtctgtggagtggctggaggaggatgaacactatgattaccaccaggagattgcaaggtcatcttatgcagatatgctacatgacaaagacagaaatgtaaaatactaccaaggtatccgggctgccgtgagcagggtgaaggacagaggacagaaggccttggttctcgacattggcactggcacgggactcttgtcaatgatggcggtcacagcaggtgccgacttctgctatgccatcgaggttttcaagcctatggctgatgctgctgtgaagattgtggagaaaaatggctttagtgataagattaaggttatcaacaagcattccaccgaggtgactgtaggtccagagggtgacatgccatgccgtgccaacatcctggtcacagagttgtttgacacagagctgatcggggagggggcgctgccctcctatgagcacgcacacaggcatctcgtggag

SEQ ID NO: 13522 - DNA, 8915 bp, Homo sapiens
gtgctaaaactggggagctagtgggcaccatgaagatcttctgcagtcgggccaatccgaccacggggtctgtggagtggctggaggaggatgaacactatgattaccaccaggagattgcaaggtactgggttggtttacagcaggctgcagctgggtggggcacttgatctcaaagcagatgccttgggctccagtctgagcgtgggctaggctgtcacccagtgcttatgatgagggctggtgttggtcctgagcaggtctgctcagccaggtaggtatatgtagcagttaggcaaaatcatgcctgtttggagagtcagacattatgtagcagccttagcagagcctcagcatctgtttaacggagcaaagaaaacccaagcctcagtagtgttgatgaagttgaatcatttacttgccttactgaaatggtgacatgttcatcatatggttaaattcttttgaatgaaaaaaatgaaaatggttttttttttcccttagaagaaatatttaaaagtatgtgagttgttggccaggcgcagtggctcacgcctctaatcctagcactttgggaggccgaggtggccagatcacctgaggtcaggagttcgagaccagcctgaccaacatggagaaaccccgtttctactaaaaatacaaaattagctgggcatggtggctcatgcctgtaatcccagcttacttgagaggctgaggcaggagaatcacttgagcctgggaggcagaggttgtgttgagccgagatcgagccattgcactccagcctgggcaacaagagcgaaactctgtctcaaaaaaaaagtatgtgagttgttatgtagcaatcattaagtgcattcagtgtgccagcattgtgctaaggctgtggataccagatgaagaagatcctgttctcatcttcaaggaccatgcagttttgtggaagagacaggcacatacaaaattacagcacaaaagccaggcacggtggctcatgcccgtaatcccagcactttgggaggcaaagggcgggcgggcgggcggtggagggggtggtggcggctgatcacttgagggtcaggagttcgagaccagcctggccaacacggtgaaaccccgtctctataaaaaaaaattagctgggagtggtggtgggcgcctgtaatcccaggtactcgggaggctgaggcaggaaaatcacttgaactcgggaggtggaggttgcagtgagccaaggttgtgccactgcactccagcctgggtaacagagtgagactctgtctcaaaaaaaaaaaaaaaaaaattacagcacagtgagataaaggcacaagaggtcatggaagcagcaagaaccagctgaacttggggtgggaggtaatgtttgaataatttctcagttctaaaggaagagaaggtgaagtttgagcagcagggattacaggtaagctttcagatgagccagattgtggctgggtgcagtggcctacacctgtagtcccagctacttgggaggccaaggcaggaggattgcttatgcccacgagttcaacatagtaaaacactgtctcacaaacaaacaaagaccaaaaacaggctgggcacagtggctcatgcctgtaatcccagcactttgggagaccaaggcgggcggatcacctgaggtcgggagttcgagaccagcctgaccaacatggagaaaccctgtctctactaaaaatacaaaattagccaggtgtggtggcgcatgcatgcctgtaatcccagctgctcgggaggctgaggcaggagaatcacttgaacctgggaggcggaggttgccatgagccgagatcgtgccattgcattccagcctgggcaacaagagctaaactctgtctcaaaaaaaaaaaaagaaaaaaaaccacacacacacagatgggctattctggggagcagctagcagtttagtgcagctggagtgtggtacaaaagtactatggtaagagaggctgccgaaagcatacgcggggtcattttgtaaagggtggtagcaaaatgcaggaagaggaacatgagtttaagtccaagctttgccacttctttactctcttggccaagttacttctctgagccttaatataaaataatatatacttcaatatagtaatacattatctcacagtataatacaattatcttagaattgtttgatgattaaatgtaatacagtatctggtgcagaattagggcttaaaatatttacttttttttctttttttttttttgagacagagtctcgctctgtttcccaggctaaagtgcagtggcacgatctctgctcactgcaagctccgcctcctgggttcacgccattctcccgcctcagcctcttgagtagctgggactacaggtgcccgctgccacgcccggctaattttttgtatttttaatagagacggggtttcaccgtgttagccaggatgatcttgatctcctgaccttgtgatccgcccgcctcggcctcccaaagagctgggattacaggcgtgagccactgcacctgcccaggtcttaaaatatttctaaacattttggacattattttcttgttttattgttcagatggagtcttactctgttgccttggctggagtgcagtggcgcagtctcggctcactgcaatctctgcctcccaggttcaagggattctcttgcctcagcctcttaggtaactgggattacaggcatctgccaccacacctggctaatatttgtgtttttagtagagacttggtttcacctgttggccaggctggtcttgaacttctgacctcaggtgatccacctgcctctgcctcccaaagtgctgggattacaggtgtgagccacagtgtcaggcctggacgttattttctgagtgatatattaaacaggagagaaagaggattggattgcattttggaacactcactgagagcggtgtggagaggagagcatttggggatattgtagtcccagagctgcatagtcccagaggagacagctcgggggaacttgagtttggtaactcactggatatgatggagggagagagaagattcaagaagcaccaagacttctggttagaatgacaaagtggatggggcctgcaagggaggaatgggtggtgtggggaggggaacacgatggagattaggcgtttaggtttggacatccacatagagatgccaatggcagatagaattttgggtctggagacagaatttgtagttgttggaactgaaactgggagaggttgcagtctctcaagggggtgtggaatgtgaaaggtagagggctgaagaaggaatcccggaatagctgaggaggcaaagaagggcaagggagatagccagcatggaaaggaagaaagagggagtgtgtctagcaaggtcagaggcactgggaagtcccagatactgatgactgacatcagctgcaggagtgagctggtggtggttaccgagagtgatgtcagtggagtggtgggcagtaagtgtgaagaggccaggaaggtggtgagtgagatgccttttaaatagtgagcagaggtagaaaggactacatttcagctaagcatccatagctggcttcagatataaaaccttgatgtgccattaaaaaaaaaaaaaaaagaacccccttctttcagtgcaccgctcttcaaagtgtggaatgtggaccacctgtggcacaattgcctggagcacattagcccagccttctcaataagagtgagagtgtgtgtgtgtgtgtgtgtgtgtgtgtgttctgggactctgcatttcaggtaagctttctagtgattctagtgttgacccaaggctggagggcctctgttttaatgtgagctccttagctgtccccttgaattcccagaaagcgtggcagggcctgcctagttctgggtgctcatcccgaccccgcctgagggttttcagtgtgtgaattactgcagtaggaaatatggagaagtgattctcctccctttactacggtattggtgaactctttagttttccctgatgatgttaagtgaacgtgcccagtggggtacctgtcacatatacagtgggtgtatgtgagtgcttctctttccccggctgctctccctaataccgcatcagtggttatctccaggcagagatgtaggccaggttaggtcaagtattaggcagattgagtctgagtttttcctgaggaggaaaatgtgtagtgtatagcaagatcaagatgctagtggctgtggaattactgtgacagggctaactgccgagaccagctcggtcgtggagaccctaacccagtggcgctagaggaattaaagacacacacacagaaatatagagtgcagagtgggaattggggggctgacagccttcagagctgacagccacgaacagaactttacctacatatttattgacagcaagccagtgataagcattgttcctatagattatagattaaaacgggaaacaaagggatgggctctggctagttatttgcagcaggaacatgtccttaaggcacagatcactcatgctattgtttgtggttcaggaacgccttaagcgaaagccgccctgggtgggccaggtattccttgccctcattccagtaaacccacgaccttcagtgtgggcatcatagccatcaacgagcatgtcacagtgctgcagagatttgtttatgaccagttttggggcctgtttttggccagatttgggggcctgttcccagcagctaactactggagcatttttaggtctgagaacatctttctctgagacttttttctgcagcactagagaataacagcttgaaactctattaaaataaagtggccaggtgcagcgacggatgcttgtattgtagttctgctgaggcaagaggatctcttgagctaaggagttcaaggctgcagtgcccaatgattgaggctgttcatagccactgcactacagcctgggtgacataacgagaccctgtttctaaaaataaacaaaaaaataggccaggcgcagtagctcacacctgtaatcccagcactttaggaggccaaggtgggcggatcagttgaggtcaggagttcgagaacagcctggccaacatagtgaaaccccatctctaatgtaaatacaaaaattagccaggcgtggtggtgagcacctgtaatcccagctacctgggaggctgaggcatgagaatcacttgaacttgggaggcagaggttgcagtgagctgagattgcaccactgtactccagcctgggtgatggggtgagaccctgtctcaaaaaaaaaaaaataaataaagataaaagacaaccaaaaaatagtttaaaatagatgacacgtttgttctatctgtttagcaatgtgtttatatatgtgaatactcttgtgtgttgatgtgtatcatgcaaaggttactgacttttttgttttttaggtcatcttatgcagatatgctacatgacaaagacagagtaagtgtaaaaggaaactattatcttgatgtggggtgttttgaagtcttggattacaagaaggttaagaatccctgggggtcatgatgttaaatgatactgagaggcgtatggtgtagaagtcaggaaatcagttgggagactgggtcctacttctggctctatttttgttgtttaatctcccagctttatcaagatagaactgacaaataaaaatggtctatgtttatggtaatacaatgtgatgaatatatgtgtatggtgtaaaatgattgaatcaagctaattaacaaatctaccgcctcatacttttttgtgtgtggtgagaacatttaagatctactcgcttagtaatttttaagtgtacattattaactatagctcacaatgccgtacagcagatctccacaacttattcatcctatctgactgaaacatcagatcctctcccttagcaggtaccattctctgggcttctgagttcaacatttttttttttttttgagacagaatctcgctctgtcactcaggctagagtacaggggcgagatctcggctcactgcagcctcagtctcccgagttcaagcgattctcctgcctcaacctgcctaagtgttgggattgtacctagtattgggataatactattattatactattatacctagtattgggattataacttgggattacaggtgcgtgccatgacacctggccttcactgtagttttaatttccatttttaattttaattttatttttttgagactgggtctctgttgcccagtgcagtggtgtgatctcggctgcactgcagcctagacttcttgggcttaagcgatcccccaacctcagccttcccagtagctgggactacaggcatgccaccatgcctggctaatttttgtatgttttgtagaggcagagtttcgctgtattgcccaggctggtcttgatcccctgaggtcaagtgatccacccgccttggtctcccaaagtgctgggattatgggcatgagctactgcgcccggccatcgtgtgcttgtttaccatgtgtatatctttgttctagtctagggttatgaacataggtgtgattcttgatagacactgccacattgccttcaaaaagggttccagattcactgtaatatcttcaaaactgggtcattaaaaagtgacagctaatttaatggcatcgttaaagtgaaggctgtgccatccctggtttacaattgaggacgctgttcatcaattttttttaacttaaaaaataaataaaacaaggccaggcacggtggctcatgcctgtaatcccagcactttgggaagccgaggcaggcagatcacggggtcaggagatcgagaccatcctggctaacatggtgaaaccccgtccctactaaaaatacaaaaaaaagccgagcgtggtggcgggcagggcctgtaatcccagctactcaggaggctgatgcgggagaatggcgtgaatctgggaggcggagcttgcagtgagccgagattgcaccactgcactccagcctgggcgacagggagactccgtctcaaaaaaaaaaattgtggtaaaaacacataacataaacggtcatactgattgtatctaagacataaatgcacttactttgacaatgaaatagttctatatttctgtgaaaaattatttcacccagactaaacatttttgtgctttacctcagaggcaacgtcatttcttttttttcttttttctttctttctttttttttttttaacaagaatgagtctccctctgttgccaggctttagtgcagtggtgtgatcttagctcactgcaacctccacctcccgagttcaagtgattctcctgccttagcctcccaagtagctggggttacaggcatgcgccaccatgcctggctaattttttgtatctttagtagagatggggtttcaccatgttggccaggttggtctccaactcctgacctcaagtgatccacccgcctcagcctcccaaagtgctgggattacagatgtgagtcactgcacccggcctggtaattctaaagaatattcagttctagatattttctaattccagtctgatttagtcttttgcctatcagtttagaagtgtgtttcttaatgtatgaaaaattttttttcttcagttgtgtttctgatattaagatttttgacttgttttgcattgtggtcagaggatatcacccttttgatgccagttctgtattagctgtctaatgttatttaacaaattaccttaaattttaatagcctcttaatatttcttactaacttggcaggtcatcagtctatttaaaagatttgcacatattttttccatcatctttagttattttcaacagaagggtcactgtgcctattgagtcagaccgttatagatgaaagatgtatgtgtttactaaagacagaagtaaaaatcttcaagatgcaaagaagttattttctgatggggaaaatactttttagtgaagctctctgagttagagtcggtaaaggaaaacaagccatacatattgcagcagagcggctttaacacaaggagctggctacccagctgtgggagggctagaaagcaaatgggaacgctgagtaacctaacagtagagattgcagggagcagttaccttgcctagggctgagaaactaaacgagaagattaggatttccagaagccacaagcattgaggagagatcctgtggaccactgtccaagtacggctgcagctctgaggggcccaaggagctggttatgggatcattgggaaaagttggagtctgcaatcaactgcccctaccgagaggaccctgatgagaacagcagcatgcagaaaggagcaagcctgctctgtcctcctaccttccagtcgccctcttggtcccccttttggctgtacctaacagttggaaaaaggagaacatggtttgcagggctctggcatcacttagtagaggatagaagagtgagtgtggagcagggacagtcgcttaataaagggcaaggggctgactcacaagacctgcccaactcagccagagctgttctgccaggggccagaaaggccatagggccctgacttgcactgccactgccagctgtgactctagaactttgcaaagcacctttccacttacttataataactggtagtaagtgacggccatgtcttccttagaatgtaaaatactaccaaggtatccgggctgccgtgagcagggtgaaggacagaggacagaaggccttggttctcgacattggcactggcacgggactcttgtcaatgatggcggtcacagcaggtgccgacttctgctatgccatcgaggtaagccattcccttcaggtgtgtgtcctgcat

SEQ ID NO: 13523 - DNA, 344 bp, Homo sapiens
gtgctaaaactggggagctagtgggcaccatgaagatcttctgcagtcgggccaatccgaccacggggtctgtggagtggctggaggaggatgaacactatgattaccaccaggagattgcaaggtcatcttatgcagatatgctacatgacaaagacagaaatgtaaaatactaccaaggtatccgggctgccgtgagcagggtgaaggacagaggacagaaggccttggttctcgacattggcactggcacgggactcttgtcaatgatggcggtcacagcaggtgccgacttctgctatgccatcgaggtaagccattcccttcaggtgtgtgtcctgcat

SEQ ID NO: 13524 - DNA, 3812 bp, Homo sapiens
aaggtatccgggctgccgtgagcagggtgaaggacagaggacagaaggccttggttctcgacattggcactggcacgggactcttgtcaatgatggcggtcacagcaggtgccgacttctgctatgccatcgaggtaagccattcccttcaggtgtgtgtcctgcatcttgcatgggaaatcccctatgctcttgcactttccccgtctgttccttcacaaacattcatggagtgctcactctgtgccaagcacagagccaggctctgagcgtatagagatgagtcagacacagttccttcctccaggagctaattttctcctctgtcagcctaggctgcacatcagaatcactaggagctttagaaaatacttacaggctgggcacagtggctcacgcctgtaatcccagcacttcgggagggtgaggcaagacaattgcttgagcccaggagtttgagaccagcctgggcaacatagtgagatcccatctctacagaaaaacttttaaatattagctgggcatggtggcatgtgcctgtgttccagctattcttgaggctgagatgggaagatctcttgagcccggaaagtcaaggctgcagtgagccatgatttggacttcatgtaagaaagcaaaaaattacttctaccttgtttaagccagttattgtgggactttgttgtttccaactaatcagtatatgaactcagttttgtaggggaaagtatttaaatacatgcccccacaccaccacactccagcctgggtgacagagtgagactttatctcaaaaaaatcaaaacgaaacaaaggctgggcacagtgtctcacccctgtaatcccagcactttgggaggccgaggcttggatcatgaggtcaggagttcaagaccagcctgaccaacatggtgaaactccatctttactaaaaatacaaaaattagccgggtgtggtgatgcgcgcctgtaatcccagctactcaggaggctgaggcgagagaatcgcttgaacccaggaggcagaggttacagtgagccgagattgcgccactgcactccagcctgggcgacagagtgagactccatctcaaaacaaaacaaaacaaaaaaaccttatgcctagtccccagccctaacagattttgatttaacttttctggggtgaggcctgagccttgggacttgggaatgtgcggcaaggttgagaaccactaccttaaatgtccctatggagtcagctctcttatgtttaccaatttgtcatttctttaataaaacattaaacagcttgagcccacagagcaagaaaaattaaaaaccaaacaaaattaaaaattaaacatgttatttttctcataaaacaaataatgcatattattataggaaatttggtaaataccaaataaaaatagtatgttgacccaaagttaagtactgttaacattttggtgtatattcttccaagttttgggggcaggcagggagcatgtatataaatactttccctacaaaattgggttcatgtagtgattgagttggaaataacaaagcctcaaaatcactgtggtttaaggtagagtagttttttgctatctttttcgtggcgtgatctctattcaccgcaacctccgcctcctgggttcaagcaattctcttttctcagcctcccaaatagctgggattacaggtatgtaccactgcacctggctaatttttatatttttagtagagatagggtttcgccatgttggccaggctggtcttgaattcctgatctcaggggatccccccacctcagcctcccaaagtgttgggattacaggtgtgaatcactgcgccctgccttgttcctcttttttaaaagtaagaataactttcccaggaatttctattatagcaaacctctccttgggtaccatcggctagaatgaggttaaatctcatttcttatctctggcaagagggattcagttactcttagctcagacaagtgcaccactgcaaaggtcagttccccacgctgcaccctcacctgatttcaggggagaggaggacacagaatggatgtcgggaggtcatcttcagtgtccactcctggtagtgttttgggtgagatcttgagcttcttgatgggctgaggagaaggaggtgtgaaggtaccagcttgcaggttcagggagaggtgactgatgagtcagaaggcagcaggggtgagggacgacactggctttggatattgtcagggtggaggcaaagtgattggtgagaactagggtttaaggccctcaaaccacatctaaaaacatcaaggcaaatcctagaaataatttgaaatagatgatgaagatttttctaggagaacatgtgtgtgtattccatgtaaatactgcgcgctaatcaattgcacaactggagctgctcacgtaagtactctttacgaaaggatacagcatttgtcccttgattatagtaaaaaatatagtattcatggtagaaaatgtgggaaatacagaaaaggatttagaaaaaaggaaaatcttatcaggaacagtctcggtatcattttgtggtttccacttcgtgtgtagggccacacgtgagtctgtttgttttacatgctagagctcttggggctgtggaatctagactggataagttgaaaacaaagagttggaggtgcttatttatgttcagggaaactcgaagagttcagggaagacttctggatgggggattcatgctgccctgggaagtggggtttgatttggcaggtggggccaggatagggaaggctcagtgatcatgagatcattgtggctggagtgttggttgttgggggaatgggggaggaagactgggaaggtaagggagggcctccaaagcagtagtttccccttatctatggtttcacttttcgtgatttcagttacctgtggtcaactgaggtccaaaaatactaaatggagccaggtgcggtggctcacgcctgtaatcccagcactttgggtggctgagacaggtggaaaccttgagtcccagagttggagaccagcctgggcaacatggcaaaaccccgcctctacaaaaagtagctgggcatggtgatctacgcctgtagtcccagctacttgggagattgaggtgggaaattgcttgagcctgggaggtggaagctgcagtgatcatgccactggactccagcctggacaatagagtgagacccttctcaaaaaaaaaaaaaagaaaaattaaatggaaaattccagaaattatttataagttgtaagttgtgtaccattctgagtattattacataattgttctatttttagttattgttaatttataaattattatttatatttattattgtgcctaatttataaattaaacctggtcataggtaagcttggaggctgaagcagctccactgtgaatgctaatcctccacgctgacttctgaccaaccccagcttcaggaatgcctctaaaatttccgctctcatgcactttgatgtaaatcctgccctcaggtcagaacaactttgatgttatcataaatacatacttaccgtaaatcctgcccttcgtcaaattccctgtggtatgtaagccctgcgtctgagccataacagtgtgggggcccagtttctcactgcccgagacaaggcttctgtttgtatgtctctataaagtgtgtctttctgagaagctggatttgccagtctttcctcagcctctcagctcccgtggcctgttggggtaggtttgcatagagctgcccaccatggaacagtatgtatgtatag

SEQ ID NO: 13525 - DNA, 540 bp, Homo sapiens
aaggtatccgggctgccgtgagcagggtgaaggacagaggacagaaggccttggttctcgacattggcactggcacgggactcttgtcaatgatggcggtcacagcaggtgccgacttctgctatgccatcgaggtaagcttggaggctgaagcagctccactgtgaatgctaatcctccacgctgacttctgaccaaccccagcttcaggaatgcctctaaaatttccgctctcatgcactttgatgtaaatcctgccctcaggtcagaacaactttgatgttatcataaatacatacttaccgtaaatcctgcccttcgtcaaattccctgtggtatgtaagccctgcgtctgagccataacagtgtgggggcccagtttctcactgcccgagacaaggcttctgtttgtatgtctctataaagtgtgtctttctgagaagctggatttgccagtctttcctcagcctctcagctcccgtggcctgttggggtaggtttgcatagagctgcccaccatggaacagtatgtatgtatag

SEQ ID NO: 13526 - DNA, 28876 bp, Homo sapiens
cggaggcgagcggagggtttcccgcggcgggtgaggcgctgggtatgctgggaaggtggggtcgctttggggttctgtgtgcagcgagcatggtgtccttggcaccagggtttcggcagaggagcctagcgtgggcctacttggactcctccgcgtggggcagctcgggacacccgggcctgcaggagagcggggttctaggctggccccggctctgcagtgcagccgggtgcctgccactcgcggggctctgtcgcagtactcgtgcctggcgcctcccctcagccacagagaccgcagtagctccaaccatcgcacccctaactgggccacgagttctctgattgccagacctgttgtctttgccactcactgttctgagtaattggagagtcgtgtattcactacacgccaaccagagtggtcctgtaaaagcgtaagcctagtgtagatacgcttctgcttaaaactcttgagtggctcccagtgcttttagaacaaaatccaaacgcctttccgaagtcgacaaggcccagcttgattgagcagaagatgtgataggagatgaggagcggggggcttctgcaaaagtgcttcggtcgctcaggcttttggcacattttgcttatgcaacctagttctttctaccttagggccttttcttgggaaagttggggtaaggattcctgacctgtaaaaactcttccccaacttttatcccggtctgtcttgtagatctcaaatgctagtttcctcagagtccttctgtaaccttggttttctctttctacaacgctctgtgtatttcttgcattcatgtagtctgtaatttgtattactctctcattagagtctaagctcttggagggcaagggtcttctctagcttgtggtggtggctccagtccctaatatagtgcctggcacatagaaggtatttaataaattttgttattttattttttcgagacagagtctcactctgctgcctaggctgagtgcagtggtgtgatcgaggcgcactgcagccttgacctcctgggctcaagcgatcctcacctcggcctaccgagtagctgggactacaggcacgcgccactacactcgggtaatttttaattttaatatatgtatatttatatatatatatatatatatatatttttttttttaagacagggtctcactctgtcacccaggctggagttcagtggcgccatctctgctcactgcaacctctgcctcccgggctcaagtgattcccctacctcagcctcccgagtagctgggagtaactgggactacaggcacaggccaccgcgcccggctaatttttttaaaaattttttgtagagaacggggtctcactatgttgcgcaggctggtctggaactcccagactcgatatccttgcgtctcggcccctcacagtgctgggatcacaggtgtgagccaccaccgcctagcaaatacattttgaatgaatgtagtggaccatctgctctgcagtctgacggctaatacaattagggcttggcatggtggtttctatttcctccttgtaaatggccatgcaagtttacaactcttggagaatgaggaggggttcagagaatatctcctgaatctgtagtgtagactgcttctgggagagaacaaataataatggatgagggcattcagccagagaaggtgtgtagtgcccaccagaagaggttcatgccttcataaaattgttaacacaagacatagttccaggtttgtttgtttgtttgagatacagtcttgctctgttgcccaggctggagtgcagtggcgcgatcttggctcactgcaacctctgcctcccaggttcaagcaattctcctgcctcagcctcccaagtagcagggattacaggcacctgccaccatgctggctaattttttgtatttttagtagagacggggtttcgccatgttggccaggctggtctcgaactcctgacctcaggtgatccacctgctttggtctcccaaagtgctgggattataggcgtgagtcaccgtgcctgggctgttccaggttttgaaaagacactgtggtcctggttttagactcagcaacatcacagacaagaaaggaatcctatggattaaagttcttcactataagttttttttttcctccagttcaaatgggtaacgtgccaatgtagtaaaggtttgagggaggcacgtctgacacaggcacatgaacacccagtcatcacgcttatgaactacaaaacgatgactcttaaccttgaagtgacttcagaattgattccacatggaccacaggattagtatttcaggactctaccatatggatcctattgatatgtttgacacctggtccagttttacttcactaaactgattgatataatgtgcatgattgtctaagcctttctaattggatgaaatgccttctccgtccacaaccccctccttctcctcctgcctcagctgaatccaccttttaagccttccttgaacattcagtcagatatggccatttctttctctactccaacatttgttggacacagttttctaatgcacattacagattctgacagttctagatattctgtctgtaaaataaatgttagtacatgagataaagtggattatagcaatgttgttaaactgctggttgcaacccattgatgggtcctgaccagcaagtaaaagtgcagctgggtgccgtggtgcatgccggtagtctagctacttgggaggctgacgtaggaggatcgcttgagtccaggagtttaaggctgtagagtgtaatgatcatgcctgtgaatagccactgtgatccaacctggacagcagggagatcccatctcttaaaaacaataaaaatgaaatagagcatatcagagggccttgttcgtaggaagtcagtattgttttgtggaacatttagttgtatgcgtacatgcaggtatgtgtattgagtctcattttaaagtatatttcttactggggttatcagaaagtttgaaaatcattagactaggggataggtatgctgagattttagtagtagagttttacctggacaaattgtctactttgaacctgactgccggcctgagtttgttcagggaagattgtttctaatctatttgctttttgtttgtttgttttggtgacggagtcttactctgttgcccaggctggagtgcagtggtgcggtctcagctcactgcaacctccgcctcctggattcaagtgattctcctgcctcagcctcctgagtagctgggaatacagacgtgcgccaccatgtctggctaatttttgtatttttagtagagacgagggtttcgccatgttggcaaggctggtcttgaactcctgacctcaggtgatccgcctgccttggcctcccaaagtgctgggattacaggtgtgagccaccgtgcccagcctgtttctcatctatttgtgtaagaattccatgtttacttactctagataacttcaaaagaaaaaaaactctggccaataaaatgccataggaatgtttagggatatgtggagtaggcattctttctaagttttcctgaagatgcaccaatgtttaacaagaaaggaagggcagtgtagaacacctattgctttctgcatggtaagagggatgggtattgggagagcccacacctgctgaggagtgcctttagactttgagcggtggtgtttctctccctcccagaaatagatctctttggggagacaggccatacaagacgtgaatctggtgacattttacttgtttgaagcaaaatttttttagatgatggagggtttttaaaaattgcttttaaaattaaaatttgaatagataagaagtaatcactataaaaaataatgaagcataaggaatgctagtattagctgggtgtggggcactcacttgtagtcccaactactggagaggctgaggcaggaagaatgcttgagcccaggagtttgagtccagcctgggcaacataacgagaccccatcttttaaaaaaaaaaaaaaagaaaaagaatgctaatatcgtgaacatttatgttcccaccacccaatttaagaaaaagaacaatacttttgaagtccactgcgtacccctccttgatcccatctctttcccttctcttttaggagttaactatcctgattccttgctatgctttttagtgtgatccctgaagaacgtatcactccattttgcatagctataaatttcatagaaatggaatcgtattgcatgtgttgtgtgatttgctgtttttgctcatcattatattcctgggattatccatttttaggtttatgtgtgactgtaatttattgtttagatgaaagttttcctggtttgacttgctctatcttcatatttttccttaagctaagggttcagcatacgaaggcagtattggtggcacttctttaacagtaccccatctcttctcctagccttgagggctgcacctagatgaacttgtgaggctcatttgaaccttttggaagcaccgaagcctgctgaagtttccagacatctgtatgaatctgttgtagttttttaatgttatatgctgaatataaaaccaagtaactcctgctggaaacatttacaatatcgattaacaaatactatcagtggctttgacatttttgtcagtttcttgatttttttccccgcttttgtctccccttcccccctccacattttggggcattgtgctgttaatagattttttttctgttcgtttgtttatatacctcctgtttccttctgatgttaatagatttctgacagtcagacttgtccacaagaactcaactggcaaggctgcttttctgtgctaaaactggggagctagtgggcaccatgaagatcttctgcagtcgggccaatccgaccacggggtctgtggagtggctggaggaggatgaacactatgattaccaccaggagattgcaaggtactgggttggtttacagcaggctgcagctgggtggggcacttgatctcaaagcagatgccttgggctccagtctgagcgtgggctaggctgtcacccagtgcttatgatgagggctggtgttggtcctgagcaggtctgctcagccaggtaggtatatgtagcagttaggcaaaatcatgcctgtttggagagtcagacattatgtagcagccttagcagagcctcagcatctgtttaacggagcaaagaaaacccaagcctcagtagtgttgatgaagttgaatcatttacttgccttactgaaatggtgacatgttcatcatatggttaaattcttttgaatgaaaaaaatgaaaatggttttttttttcccttagaagaaatatttaaaagtatgtgagttgttggccaggcgcagtggctcacgcctctaatcctagcactttgggaggccgaggtggccagatcacctgaggtcaggagttcgagaccagcctgaccaacatggagaaaccccgtttctactaaaaatacaaaattagctgggcatggtggctcatgcctgtaatcccagcttacttgagaggctgaggcaggagaatcacttgagcctgggaggcagaggttgtgttgagccgagatcgagccattgcactccagcctgggcaacaagagcgaaactctgtctcaaaaaaaaagtatgtgagttgttatgtagcaatcattaagtgcattcagtgtgccagcattgtgctaaggctgtggataccagatgaagaagatcctgttctcatcttcaaggaccatgcagttttgtggaagagacaggcacatacaaaattacagcacaaaagccaggcacggtggctcatgcccgtaatcccagcactttgggaggcaaagggcgggcgggcgggcggtggagggggtggtggcggctgatcacttgagggtcaggagttcgagaccagcctggccaacacggtgaaaccccgtctctataaaaaaaaattagctgggagtggtggtgggcgcctgtaatcccaggtactcgggaggctgaggcaggaaaatcacttgaactcgggaggtggaggttgcagtgagccaaggttgtgccactgcactccagcctgggtaacagagtgagactctgtctcaaaaaaaaaaaaaaaaaaattacagcacagtgagataaaggcacaagaggtcatggaagcagcaagaaccagctgaacttggggtgggaggtaatgtttgaataatttctcagttctaaaggaagagaaggtgaagtttgagcagcagggattacaggtaagctttcagatgagccagattgtggctgggtgcagtggcctacacctgtagtcccagctacttgggaggccaaggcaggaggattgcttatgcccacgagttcaacatagtaaaacactgtctcacaaacaaacaaagaccaaaaacaggctgggcacagtggctcatgcctgtaatcccagcactttgggagaccaaggcgggcggatcacctgaggtcgggagttcgagaccagcctgaccaacatggagaaaccctgtctctactaaaaatacaaaattagccaggtgtggtggcgcatgcatgcctgtaatcccagctgctcgggaggctgaggcaggagaatcacttgaacctgggaggcggaggttgccatgagccgagatcgtgccattgcattccagcctgggcaacaagagctaaactctgtctcaaaaaaaaaaaaagaaaaaaaaccacacacacacagatgggctattctggggagcagctagcagtttagtgcagctggagtgtggtacaaaagtactatggtaagagaggctgccgaaagcatacgcggggtcattttgtaaagggtggtagcaaaatgcaggaagaggaacatgagtttaagtccaagctttgccacttctttactctcttggccaagttacttctctgagccttaatataaaataatatatacttcaatatagtaatacattatctcacagtataatacaattatcttagaattgtttgatgattaaatgtaatacagtatctggtgcagaattagggcttaaaatatttacttttttttctttttttttttttgagacagagtctcgctctgtttcccaggctaaagtgcagtggcacgatctctgctcactgcaagctccgcctcctgggttcacgccattctcccgcctcagcctcttgagtagctgggactacaggtgcccgctgccacgcccggctaattttttgtatttttaatagagacggggtttcaccgtgttagccaggatgatcttgatctcctgaccttgtgatccgcccgcctcggcctcccaaagagctgggattacaggcgtgagccactgcacctgcccaggtcttaaaatatttctaaacattttggacattattttcttgttttattgttcagatggagtcttactctgttgccttggctggagtgcagtggcgcagtctcggctcactgcaatctctgcctcccaggttcaagggattctcttgcctcagcctcttaggtaactgggattacaggcatctgccaccacacctggctaatatttgtgtttttagtagagacttggtttcacctgttggccaggctggtcttgaacttctgacctcaggtgatccacctgcctctgcctcccaaagtgctgggattacaggtgtgagccacagtgtcaggcctggacgttattttctgagtgatatattaaacaggagagaaagaggattggattgcattttggaacactcactgagagcggtgtggagaggagagcatttggggatattgtagtcccagagctgcatagtcccagaggagacagctcgggggaacttgagtttggtaactcactggatatgatggagggagagagaagattcaagaagcaccaagacttctggttagaatgacaaagtggatggggcctgcaagggaggaatgggtggtgtggggaggggaacacgatggagattaggcgtttaggtttggacatccacatagagatgccaatggcagatagaattttgggtctggagacagaatttgtagttgttggaactgaaactgggagaggttgcagtctctcaagggggtgtggaatgtgaaaggtagagggctgaagaaggaatcccggaatagctgaggaggcaaagaagggcaagggagatagccagcatggaaaggaagaaagagggagtgtgtctagcaaggtcagaggcactgggaagtcccagatactgatgactgacatcagctgcaggagtgagctggtggtggttaccgagagtgatgtcagtggagtggtgggcagtaagtgtgaagaggccaggaaggtggtgagtgagatgccttttaaatagtgagcagaggtagaaaggactacatttcagctaagcatccatagctggcttcagatataaaaccttgatgtgccattaaaaaaaaaaaaaaaagaacccccttctttcagtgcaccgctcttcaaagtgtggaatgtggaccacctgtggcacaattgcctggagcacattagcccagccttctcaataagagtgagagtgtgtgtgtgtgtgtgtgtgtgtgtgtgttctgggactctgcatttcaggtaagctttctagtgattctagtgttgacccaaggctggagggcctctgttttaatgtgagctccttagctgtccccttgaattcccagaaagcgtggcagggcctgcctagttctgggtgctcatcccgaccccgcctgagggttttcagtgtgtgaattactgcagtaggaaatatggagaagtgattctcctccctttactacggtattggtgaactctttagttttccctgatgatgttaagtgaacgtgcccagtggggtacctgtcacatatacagtgggtgtatgtgagtgcttctctttccccggctgctctccctaataccgcatcagtggttatctccaggcagagatgtaggccaggttaggtcaagtattaggcagattgagtctgagtttttcctgaggaggaaaatgtgtagtgtatagcaagatcaagatgctagtggctgtggaattactgtgacagggctaactgccgagaccagctcggtcgtggagaccctaacccagtggcgctagaggaattaaagacacacacacagaaatatagagtgcagagtgggaattggggggctgacagccttcagagctgacagccacgaacagaactttacctacatatttattgacagcaagccagtgataagcattgttcctatagattatagattaaaacgggaaacaaagggatgggctctggctagttatttgcagcaggaacatgtccttaaggcacagatcactcatgctattgtttgtggttcaggaacgccttaagcgaaagccgccctgggtgggccaggtattccttgccctcattccagtaaacccacgaccttcagtgtgggcatcatagccatcaacgagcatgtcacagtgctgcagagatttgtttatgaccagttttggggcctgtttttggccagatttgggggcctgttcccagcagctaactactggagcatttttaggtctgagaacatctttctctgagacttttttctgcagcactagagaataacagcttgaaactctattaaaataaagtggccaggtgcagcgacggatgcttgtattgtagttctgctgaggcaagaggatctcttgagctaaggagttcaaggctgcagtgcccaatgattgaggctgttcatagccactgcactacagcctgggtgacataacgagaccctgtttctaaaaataaacaaaaaaataggccaggcgcagtagctcacacctgtaatcccagcactttaggaggccaaggtgggcggatcagttgaggtcaggagttcgagaacagcctggccaacatagtgaaaccccatctctaatgtaaatacaaaaattagccaggcgtggtggtgagcacctgtaatcccagctacctgggaggctgaggcatgagaatcacttgaacttgggaggcagaggttgcagtgagctgagattgcaccactgtactccagcctgggtgatggggtgagaccctgtctcaaaaaaaaaaaaataaataaagataaaagacaaccaaaaaatagtttaaaatagatgacacgtttgttctatctgtttagcaatgtgtttatatatgtgaatactcttgtgtgttgatgtgtatcatgcaaaggttactgacttttttgttttttaggtcatcttatgcagatatgctacatgacaaagacagagtaagtgtaaaaggaaactattatcttgatgtggggtgttttgaagtcttggattacaagaaggttaagaatccctgggggtcatgatgttaaatgatactgagaggcgtatggtgtagaagtcaggaaatcagttgggagactgggtcctacttctggctctatttttgttgtttaatctcccagctttatcaagatagaactgacaaataaaaatggtctatgtttatggtaatacaatgtgatgaatatatgtgtatggtgtaaaatgattgaatcaagctaattaacaaatctaccgcctcatacttttttgtgtgtggtgagaacatttaagatctactcgcttagtaatttttaagtgtacattattaactatagctcacaatgccgtacagcagatctccacaacttattcatcctatctgactgaaacatcagatcctctcccttagcaggtaccattctctgggcttctgagttcaacatttttttttttttttgagacagaatctcgctctgtcactcaggctagagtacaggggcgagatctcggctcactgcagcctcagtctcccgagttcaagcgattctcctgcctcaacctgcctaagtgttgggattgtacctagtattgggataatactattattatactattatacctagtattgggattataacttgggattacaggtgcgtgccatgacacctggccttcactgtagttttaatttccatttttaattttaattttatttttttgagactgggtctctgttgcccagtgcagtggtgtgatctcggctgcactgcagcctagacttcttgggcttaagcgatcccccaacctcagccttcccagtagctgggactacaggcatgccaccatgcctggctaatttttgtatgttttgtagaggcagagtttcgctgtattgcccaggctggtcttgatcccctgaggtcaagtgatccacccgccttggtctcccaaagtgctgggattatgggcatgagctactgcgcccggccatcgtgtgcttgtttaccatgtgtatatctttgttctagtctagggttatgaacataggtgtgattcttgatagacactgccacattgccttcaaaaagggttccagattcactgtaatatcttcaaaactgggtcattaaaaagtgacagctaatttaatggcatcgttaaagtgaaggctgtgccatccctggtttacaattgaggacgctgttcatcaattttttttaacttaaaaaataaataaaacaaggccaggcacggtggctcatgcctgtaatcccagcactttgggaagccgaggcaggcagatcacggggtcaggagatcgagaccatcctggctaacatggtgaaaccccgtccctactaaaaatacaaaaaaaagccgagcgtggtggcgggcagggcctgtaatcccagctactcaggaggctgatgcgggagaatggcgtgaatctgggaggcggagcttgcagtgagccgagattgcaccactgcactccagcctgggcgacagggagactccgtctcaaaaaaaaaaattgtggtaaaaacacataacataaacggtcatactgattgtatctaagacataaatgcacttactttgacaatgaaatagttctatatttctgtgaaaaattatttcacccagactaaacatttttgtgctttacctcagaggcaacgtcatttcttttttttcttttttctttctttctttttttttttttaacaagaatgagtctccctctgttgccaggctttagtgcagtggtgtgatcttagctcactgcaacctccacctcccgagttcaagtgattctcctgccttagcctcccaagtagctggggttacaggcatgcgccaccatgcctggctaattttttgtatctttagtagagatggggtttcaccatgttggccaggttggtctccaactcctgacctcaagtgatccacccgcctcagcctcccaaagtgctgggattacagatgtgagtcactgcacccggcctggtaattctaaagaatattcagttctagatattttctaattccagtctgatttagtcttttgcctatcagtttagaagtgtgtttcttaatgtatgaaaaattttttttcttcagttgtgtttctgatattaagatttttgacttgttttgcattgtggtcagaggatatcacccttttgatgccagttctgtattagctgtctaatgttatttaacaaattaccttaaattttaatagcctcttaatatttcttactaacttggcaggtcatcagtctatttaaaagatttgcacatattttttccatcatctttagttattttcaacagaagggtcactgtgcctattgagtcagaccgttatagatgaaagatgtatgtgtttactaaagacagaagtaaaaatcttcaagatgcaaagaagttattttctgatggggaaaatactttttagtgaagctctctgagttagagtcggtaaaggaaaacaagccatacatattgcagcagagcggctttaacacaaggagctggctacccagctgtgggagggctagaaagcaaatgggaacgctgagtaacctaacagtagagattgcagggagcagttaccttgcctagggctgagaaactaaacgagaagattaggatttccagaagccacaagcattgaggagagatcctgtggaccactgtccaagtacggctgcagctctgaggggcccaaggagctggttatgggatcattgggaaaagttggagtctgcaatcaactgcccctaccgagaggaccctgatgagaacagcagcatgcagaaaggagcaagcctgctctgtcctcctaccttccagtcgccctcttggtcccccttttggctgtacctaacagttggaaaaaggagaacatggtttgcagggctctggcatcacttagtagaggatagaagagtgagtgtggagcagggacagtcgcttaataaagggcaaggggctgactcacaagacctgcccaactcagccagagctgttctgccaggggccagaaaggccatagggccctgacttgcactgccactgccagctgtgactctagaactttgcaaagcacctttccacttacttataataactggtagtaagtgacggccatgtcttccttagaatgtaaaatactaccaaggtatccgggctgccgtgagcagggtgaaggacagaggacagaaggccttggttctcgacattggcactggcacgggactcttgtcaatgatggcggtcacagcaggtgccgacttctgctatgccatcgaggtaagccattcccttcaggtgtgtgtcctgcatcttgcatgggaaatcccctatgctcttgcactttccccgtctgttccttcacaaacattcatggagtgctcactctgtgccaagcacagagccaggctctgagcgtatagagatgagtcagacacagttccttcctccaggagctaattttctcctctgtcagcctaggctgcacatcagaatcactaggagctttagaaaatacttacaggctgggcacagtggctcacgcctgtaatcccagcacttcgggagggtgaggcaagacaattgcttgagcccaggagtttgagaccagcctgggcaacatagtgagatcccatctctacagaaaaacttttaaatattagctgggcatggtggcatgtgcctgtgttccagctattcttgaggctgagatgggaagatctcttgagcccggaaagtcaaggctgcagtgagccatgatttggacttcatgtaagaaagcaaaaaattacttctaccttgtttaagccagttattgtgggactttgttgtttccaactaatcagtatatgaactcagttttgtaggggaaagtatttaaatacatgcccccacaccaccacactccagcctgggtgacagagtgagactttatctcaaaaaaatcaaaacgaaacaaaggctgggcacagtgtctcacccctgtaatcccagcactttgggaggccgaggcttggatcatgaggtcaggagttcaagaccagcctgaccaacatggtgaaactccatctttactaaaaatacaaaaattagccgggtgtggtgatgcgcgcctgtaatcccagctactcaggaggctgaggcgagagaatcgcttgaacccaggaggcagaggttacagtgagccgagattgcgccactgcactccagcctgggcgacagagtgagactccatctcaaaacaaaacaaaacaaaaaaaccttatgcctagtccccagccctaacagattttgatttaacttttctggggtgaggcctgagccttgggacttgggaatgtgcggcaaggttgagaaccactaccttaaatgtccctatggagtcagctctcttatgtttaccaatttgtcatttctttaataaaacattaaacagcttgagcccacagagcaagaaaaattaaaaaccaaacaaaattaaaaattaaacatgttatttttctcataaaacaaataatgcatattattataggaaatttggtaaataccaaataaaaatagtatgttgacccaaagttaagtactgttaacattttggtgtatattcttccaagttttgggggcaggcagggagcatgtatataaatactttccctacaaaattgggttcatgtagtgattgagttggaaataacaaagcctcaaaatcactgtggtttaaggtagagtagttttttgctatctttttcgtggcgtgatctctattcaccgcaacctccgcctcctgggttcaagcaattctcttttctcagcctcccaaatagctgggattacaggtatgtaccactgcacctggctaatttttatatttttagtagagatagggtttcgccatgttggccaggctggtcttgaattcctgatctcaggggatccccccacctcagcctcccaaagtgttgggattacaggtgtgaatcactgcgccctgccttgttcctcttttttaaaagtaagaataactttcccaggaatttctattatagcaaacctctccttgggtaccatcggctagaatgaggttaaatctcatttcttatctctggcaagagggattcagttactcttagctcagacaagtgcaccactgcaaaggtcagttccccacgctgcaccctcacctgatttcaggggagaggaggacacagaatggatgtcgggaggtcatcttcagtgtccactcctggtagtgttttgggtgagatcttgagcttcttgatgggctgaggagaaggaggtgtgaaggtaccagcttgcaggttcagggagaggtgactgatgagtcagaaggcagcaggggtgagggacgacactggctttggatattgtcagggtggaggcaaagtgattggtgagaactagggtttaaggccctcaaaccacatctaaaaacatcaaggcaaatcctagaaataatttgaaatagatgatgaagatttttctaggagaacatgtgtgtgtattccatgtaaatactgcgcgctaatcaattgcacaactggagctgctcacgtaagtactctttacgaaaggatacagcatttgtcccttgattatagtaaaaaatatagtattcatggtagaaaatgtgggaaatacagaaaaggatttagaaaaaaggaaaatcttatcaggaacagtctcggtatcattttgtggtttccacttcgtgtgtagggccacacgtgagtctgtttgttttacatgctagagctcttggggctgtggaatctagactggataagttgaaaacaaagagttggaggtgcttatttatgttcagggaaactcgaagagttcagggaagacttctggatgggggattcatgctgccctgggaagtggggtttgatttggcaggtggggccaggatagggaaggctcagtgatcatgagatcattgtggctggagtgttggttgttgggggaatgggggaggaagactgggaaggtaagggagggcctccaaagcagtagtttccccttatctatggtttcacttttcgtgatttcagttacctgtggtcaactgaggtccaaaaatactaaatggagccaggtgcggtggctcacgcctgtaatcccagcactttgggtggctgagacaggtggaaaccttgagtcccagagttggagaccagcctgggcaacatggcaaaaccccgcctctacaaaaagtagctgggcatggtgatctacgcctgtagtcccagctacttgggagattgaggtgggaaattgcttgagcctgggaggtggaagctgcagtgatcatgccactggactccagcctggacaatagagtgagacccttctcaaaaaaaaaaaaaagaaaaattaaatggaaaattccagaaattatttataagttgtaagttgtgtaccattctgagtattattacataattgttctatttttagttattgttaatttataaattattatttatatttattattgtgcctaatttataaattaaacctggtcataggtaagcttggaggctgaagcagctccactgtgaatgctaatcctccacgctgacttctgaccaaccccagcttcaggaatgcctctaaaatttccgctctcatgcactttgatgtaaatcctgccctcaggtcagaacaactttgatgttatcataaatacatacttaccgtaaatcctgcccttcgtcaaattccctgtggtatgtaagccctgcgtctgagccataacagtgtgggggcccagtttctcactgcccgagacaaggcttctgtttgtatgtctctataaagtgtgtctttctgagaagctggatttgccagtctttcctcagcctctcagctcccgtggcctgttggggtaggtttgcatagagctgcccaccatggaacagtatgtatgtatagcaaaaaaaaaaaaaaaaaaaaaatggtatacataagggtcagtactgtctgaggtttcaagcatccaccaagggtcttaaaatgtatcccccatggacaagaggcactgctgcaccataagaaaatagaggctgtgttctgccaacagtggggatttgggacaattttgagcccagaggatgacctacttactcacacctacagtctgctctcctctggagggcacagcacgcctcccaggttcgtgaggcaagtccctttcctggctttttggcgtcctcttgtgcggtactgacacctactgctcttactaagtagtgcagcctcctcaggatccccggcatccccgctgtgcctggcacggaatgagagtccctaatcacaagttaaagccagctgaatctcagccctttttcatgatgcacatttggagaataaagtatttaagttacatatcttaggaccagaatcaaggaatagcttgctcaccttaaaggtcagactactgtttaatttattgctcatttttccttgggtttcggctctattttctaggttttcaagcctatggctgatgctgctgtgaagattgtggagaaaaatggctttagtgataagattaaggttatcaacaagcattccaccgaggtgactgtaggtccaggtgagatttacacaccctgtgttgaaagctttgcttgctcttgtgtgagagaggaaaagggttattccagttacctggaacaaatccaggtcatagcatagaagtgggacctctctgtgtggagctctgacagtaaggacttggtttctcttgatgtttattttcctgctagttaaaactagtcaacaaggagtagactagagctagtcaggtccagcaatggagacgcaaacaaaacctacatttgctttaagcaaattggaattcttatggggctcaactcttgagtttcaactaccaataattacgccttggataaacctcattggctacgatactgccactgctcaaagctcaactctgagtttcatcaggcagaaagtacttagttcttttatttatttatttttttgagagagagtctcactctgtcgcccaggctggagtgcagtggcgctatcttgcctcactgcaagctctgcctcctgggttcacccatcctggctaacacggtgaaactctatctctactaaaaatacaaaaaattagccaggcatggtggtgggcacctgtagtcccagctactggagaggctgaggcaggagaatggcgagagtagttctgacattctgcttctgcatacaacatgaacaattttcctgtatagcattgtctcttaaggtttccagaatatgtatatgtacacacacacacacacacacacatattttttttttgagacggaatctcactgtgtcacccaggctgcattgcagtggtgcaatcttggctcactgcatcctccacctcctgggtacaagtgattctcctgcctcagcctcccaagtagcggtgattacaggtgcctgccaccacacctggctgctttttgtatttttagcagagacggggtttcaccatgttggccaggctggtcttgaacccctgacctcaggtgatccgcctgcctcagcctcccaaagtgctaggattataagcgtgagccaccatgcctggcctccagaatattttttatagtctagaactttgtttcagtctttgaaaatttcacatgccactgacacttagagaacatagttgaaagatttgcaaaggaaaaactgtggtgaagttatggataacaccatgggttttttctaattttttgtggagatagggtcttactatgttgcccaggctggactcaaactcttatgctaaagtgatcctcccatctcagcgacccaagtacctgggactacaggtgtgcactactgcacctggctttttcaccacggttttggagaatgcagtatcattctgaattgaagcttctacctaaggtcaacattattctcccatttaacaatttttttttaatggagaatctgaaacatgtacaaaagaagtgggtactatcttatttatttatttatttgagacagagtctcactctgttgcccaggctggagtgcaatggcaggatctcagctcactgcaacctctgcctcccatgttcaagcgattctcctgcttcagcctcatgagtagctgggattacaggcgtgcaccaccatgcctggctaatttttgtatttttagtggagacggggtttcaccgtgttggccaggctagtcccgaactcctgacctcaggtgaccagcctgcctcggcctccgaaagtgctgggattacaggtgtgagccaccgcgcccggcctatcttttttatttttaaaatatacaatagagtgctcaaatcattccatttacaatcaacgttattgaagtatgatttacattaaatgaatatccattttcattatggatatttgacaaatataaacacacttgtaaccaccatcaccataatgaagataatagaacatctccatcatgcccaaagagattcctcataaccctttctatcagtccccccatatcctggtcctaggcacccactcatagacttcattatagattagatttgcctgtctaggatttcaaggaagtggaatcaaagaagtgtggactcttctgtgtgtgtgctctcttttttatagcgtgatgctggtaagattcttccacactgttcatgtcttgggggtccgttcttttgtgttactgagcagcactctattagatagatgtaccataacttgtttatctctctacctgttgatggacagggatttcttggataggtctttagattcactgatcttttcttttgcagcatctaatatgctgttaagtatatttagtaaacttttcatttctctttctttgttgttcttttttttttttttttgagacaggatcttgacctgtcccccaggctggagtgcaggggtgtgagcatggcttattgcagctttgacctcctgggctcaagcagtcctcctgcttcagcctcctgtgtagctgggaccacaggctcatgccaccatgcctggctaacttaaaaaaaatttttttttgtagagatgggatctcagtttgttgcttaggctggtctcaaactcctgggctcaagcgattctcccacctcagcatcccaaagtcctaggattacaggcgtgggccgctgtgcctggcctcatttttgatattgtattttttaatctctgaaagttccacttgattctttttcataacttccatttttctcatgttcatagttttctataagcacatttattttagctttttgaacatccttatcttctgttcccaccatctttgttttttctgggtttgttctcttgactcatttttatccttattctgggtcacattttccttcttcacatgtctaaccatttttgtttggatgctgtggctatttggaattccccattgttgagtgctagacttcgttggttttgctttttaaactttggcatgcagttgggttacttgcagttcagattgatcctttcagggcttgtttaagctttctttggagtggggttagagtagctttaagtcaggccttctcaacagtagtgctgtgacgttttggcattctccaactatgtgacattttgataattctttgttgtggaccctgtcctttgcattgtaggatgtttagcagtgtccctggcctcttcccagtggatgtcagtagcactcccctcctcccaccattcttgccaactaaaaatgtctccagactgccacgtcttccttggtctcgagtgtgtaaaattgccacctgttgagaaccactgctctaaggctgtttagccagacagttactgtaacctttctggagtgtctgctgagagctctaggtgctcagcagggtttcccttgtctggctgatcagaacttgaatgtttcccaggcctctgagagctccggagattgttatcactcatgcaacctttgctcggcttcacagagtattaccctgtgtgtgtgtgaatgtattaacacagaccctagaggaaccctgtgcagcattctgaaggctttttttctgtgtaatttcctctctgattctctgcctggcaagttccagctgcttccacttccctgaactcgtttcctgtctgtttaactcagcaagactgccgtgctctgtgtcacctcttaccctatactgtggtctggaaagggtctcctggctgatagccagagcagggtaagggttacttggtttgtttcccttcttagggagcaaactgtgttgcctcttgctcaacatctgaaaacacttgtttcatatattttgcccagttttctagttgataacagccggagggtaagcctgatcccacttattccactatggccagagtggagattgattcatttatttatttttttttgagacagtctcactctgttgcctaggctggagtacagtgatgcgaacacagctcactgcagcctcgacttctgggctcaagtgatcctcctgcctcagcctcctgagtagctgggaccacaggcaggcgccaccatacccaactaatttttttgtttttttaaatttttattagaaactaagtcttgcggctgggtgcagtggcttatgcctgtaatcctagcactttgggaggccgaggctggcggatcacctgaggttgggagtagcaaccagcctgaccaacttggagaaacctgtctctactaaaaatacaaaattagtcaggtgtggtggtgcatgcctgtaatcccagctactgaggagattgaggcaggagaattgcttgaacctgggaggcaaaggttgcggtgagccgagattgcgctattgcacttcagcctgggcaacaagagcaaaattctggctcaaaaaaaaaaaaaaagaaaagaaaagaaactaggtctcgctttgtttcacaggctggtcttgaacgccaggcctcacacagtccttctgcctcagcctcccaaagtgctgggatcacagatgggagccactgtacctggcgagatcatttattcttgaaaatttatccattttgacggcagggagactgatctgcagggcagccttggccatgaagtatgctgactctgcctccaggcagcattgttcacacacacctcagcttaggccaggcccctcatatgatttcttattaaaaaaaaaaattttttttagatagagtggctctgtcgcccaggctggagtgcagtggcatgacctcggctcactgcaacctccacctcccggattcaagtgatccttccacgtcagcctcctaagtagctgatattacaggcatgcaccaccacctggctaatttttgtatttttagtagagatggggtttcactatgttggccaagctggtcttgaactcatgacctcaagcgatctgcctgccttggcctcccaaaatgctgggattacaggcatgaaccaccacgcctggccaatttcgtaatacttttcttcatagcgcttaccactgcaatcattaaatcattatgtagttatgtatttaatgtctgtatccccacccagctgaggcatcctgaggtcatgcactgcgtgggttgtattaactattccattccgttatttgctccgggcctgtcatgtaaaggagttaggtaatttttgtaaagtgagtagattgtcagttgtgcttcatccataatcccttgtaaatgtgactttgtttccgatcctcagcctgacaagtggcttcctcattgccaagttgggtggtctttcctctgcttttcctctctaaccactgccgctttggtacttctgccattccttccttcttgaaactctccctggaccttagtgacatctcttcatcttggttctcctgtgttgctttctttctgctccagatgtatactttccaaggttctgctctcagccctttttaaaagtggcatctgaagttgcctgttccccagagctgggttacatgctgaggcttgtggagagccaacccagggagcagcgtgtgttcatccgtccattttgttcatttggaaagggcttaggaagctcctggggtggctacctgcttcagactcccccaccccgtgcccttatacattagcagtcacactcaaaataccaggccctcaagaagtacttgttaaaatgcactggaccataaagcttgaattttttttttttaatttttattattttttgagacagtctcactgtatcacccaagatggagtatggtggggcaatttcagctcactacaacatctgcctcccgggttcaggcaattctcatgcctcagcctcctgagtagctgggactacaggcgcgtgctactacacccggctaatttttgtatttttagtagagacaaggtttcaccacattggccaggctggtatcgaactcctggcctcaagtgatcagcccagcttggcctctcaaagtgctggaattacaggtgtgagtcactgtgcctggctcttgatttttattttaatgaagcaatttggactataaagcattttaagttatataattggtttaaacattcaggagatagaattggcagagtgggtgatcagtgggttgtagggtgacagaaatcaataatttatctaatgtgtgttgactgttacggggcactagaccttgtgggtgctggggtacagtagtggacaggcagtcagcggtcctgctgtcctggaactagtaaatgatgcccagattcctggactatgtgactcattgattgattgaggcagaaaccctggagggaggagcaggcgtgttagctggggtgggtgggatgagttttggacagtgtattccagttggagtttgatgtgacatcagagaggatgggcagggcttctcgggagggtggtctctgtggcagaagacagaagtttcttcttaagctcctccacgtgatactgtcatggagcacaggtgagcttcataggaagtgtgcttttttttttttatcttcatcatcccgaccaccaccacatgagacagagcccattcacccgttttactgatgaggcaactgatggtcagaacggagggctcagggataggaagtgagatccaggccaggctccagcctcgagctcgaggttcacgctgtctctgttgtgctcttctatcagctgctctctttcttttttttttttttttgaaatggagtctcactctggcccagattagagtgcagtggcgtgatctcggctcactgcaacctctgcctcccaggtttaagtgattctcctgcctcagcctctcaagtagctgggattacaggcacccatcaccacgcctggctaatttttgtattcttagtagagacagggtttcaccacgttggccaggttggtttcaaacttctgacctcaggtgatctgcccatctcagcctcccaaagtgctgggattacaggcgggagccaccgcgcccggcccctgtcagctgctttcatgcttctcttttccttgtgtcatctgtgagacttgtgctctgtgtaggggaaatgagtgggctttgtcagattataattcatgaggcattaaaagtgtttacagttaattctccctgatgaatagccccttccaaagtctattttggctcttggctcattaaaaattataattgtagaagtagcagtacattactgaggtttagaaaacagttaacagaagatccctcccaaatcctactcttctctaaaatcctactgtcctaaaacaactgttatttaagagattgtttggtgacaaggcgctttcattaagggaatttgccatagtgatctggggattctaagtcatggatctcaattttggctgccagagcctaactcacagtagctggaagatcatcagagaaccttgttgtcttgctttggctttccctccctctccctgcaacctagaagtatttgacataccagcattctgtttttgcttttcaaataatttttctaatttagtggttaatagtttaattgttaatttatatctctctaattgctaatagggatgaaaaagttttcataagtttgatttctgttttgaattttctgtttatatttttacctggtttctttttgggtgtgtgttttttttgtttgtttgagacagagtctcactctgtcgcgcaggctggatcactctgtcgcgcaggctggagtacagtggcacaatttcggctcactgcaacctctgcctcccaggttcaagtgattctcatgcctcagcctcctgggtagctggggttacaggcgtgtgccatcacacctggctaatttttgtatttttagtagagatggggtttcgccatgatggccaggctggtcttgaactcctggcttcaagtgatcctcctgccttggcctcccaaagtgctaggattacaggcgtgagccaccatgcctggctaatttttgtattttttgtggaaatggggttttgtcatgtttcccaggctgatctcaaactcctgaactcaatccattgggtatttatagttttcttatcattttttgcagtctccctcccaatattaagcatacagaatagctgtaagagcagtacagtaaacacttatgatcccttaccctagatttatcaattagcgttttgtcatacatttacatatggattttttttttttcctgaaccattggcaagtcagttgcagacatcctgacacttctgaatacctcagcatgtatatgtgcttttagcgtgatggccccttaaccacttatctttcccatatttgctgtaaatatttttcctagtctgttgcttatgtccaactctgttttcttgtgtttttcagagggtgacatgccatgccgtgccaacatcctggtcacagagttgtttgacacagagctgatcggggagggggcgctgccctcctatgagcacgcacacaggcatctcgtggaggtagtagacggagggctccctcagacgtgtctgtggtctcagccagctcacatagcactcactcatgcaccgtgtcccacacagcccaagccctcagcacctctgatacacctgggacacccctccattcctgggggggctctggttctcctcacttaaaactttcatgtcccttgaatgccaaatcttaataggttagagttgaaaagcaagaaactatattcaaattcagttaagttcagcaaatattctcaggaaggcgatgcttgagctgtcagtcttgagaagtgatcaggtgttggcctggcagatggaatatttctggtagaggagagcagcacgtgctagacgtgagactgaatcggtgcggtggctccggagcctgctttggattttgtgctgtgtgggaggcaggagagatgggcttagcaactgaggctagagagctgggcaggggctagatggagtggggtttgggggccatgcccagagggtagctgtcattagaaggtggggtggcatcacaggagggtttgaagcagaggattgacagcagacttatgcaggcagatgtgtggagggcagttggggtatagggctggaggttgcgggtgggttaaaaggctgtggaatcgtccagacgctgtggtacagtgggcctcagctaaggctgtagacagaggcctgataggtggtcccaggagttggtggtcccttaggtgtagagatatcgatgctagggtttgggcacctggattggatggtggtgcttcctgttgacggggagtgcaggaagaggggtagccttgggaaggttgggaagtggtgagggcgattcttctggtttacacagagtttgagctctctaaaggtcagccaagcaaagaggcccagagatgcatggatttactcagtgaagagggcatggttgaggtcactgtggagagtgtggagggagacagtccggaccagggagtccccttgtgaggtggggcggaggaagcacagcctggggaaggcagcgggagtgagtccagttagagcagcatttgtctaccagagcaaggttgggagatgcttcgcagggaggccagttattctgctagccttttaccatgcccagagcaacccctacagcagagaatcatttggcccaagaggccagtggtgtcctggtggtgaaagccatgtgggtagcagctgtgagtgtgctcttgccgggtccctattgcctggtgcatggaggacgtggagtggatgcaagaggtaggaggagagccggacaaggagccggagccggagccacagccctaggggctgagtgtgcagcagtgcccagcggcgctagagggctgggcagctgagggggcaccgtggtccacagggctttgccacaaggaggctcttgttttggtgctgggcaggagcggcactgaagggacactgagcccagagccaggatcaccacccagcagcaggacgtgaagcatttaagagtgccaggtagccaggaacttagctgacagaagtcattttaggcacagtgtgtgttctttttgaaatgtagtaccctttttttcccttttccaagggcatagggctgaaaacagttcactattctaatagtataaggtgttgggcattactgaaccaacctaatgttaaggaataaacctcttttgatcaatgggaattactgtgggtctaagcatctgatttttgtttggttttgtttttaatataaacttaggaaaattgtgaggccgtgccccacagagccaccgtctatgcacagctggtggagtccgggaggatgtggtcgtggaacaagctatttcccatccacgtgcagaccagcctcggagagcaggtcatcgtccctcccgttgacgtggagagctgccctggcgcaccctctgtctgtgacattcagctgaaccaggtgtcaccagccgactttacagtcctcagcgatgtgctgcccatgttcaggtaccaaggagccaccataggtgatggcgctttgagacatttgatggaagttgggtattaggaggttctttttgagtgggaaggaaatctagctgctgtcacctgcctcgaaggcaagagtcctttgcagccaaatgtcattgccagtgaagtcactgtaaaagcttaaaaaatggagtgtgtgaggttaaactctgcttacattcttgaatattattcctcagcatagacttcagcaagcaagtcagtagctcagcagcctgccatagcaggcggtttgaacctctgacatctggccgagctcaggtggttctctcgtggtgggacattgaaatggaccctgaggggaagatcaagtgcaccatggcccccttctgggcac

SEQ ID NO: 13527 - DNA, 839 bp, Homo sapiens
cggaggcgagcggagggtttcccgcggcgggtcatcttatgcagatatgctacatgacaaagacagaaatgtaaaatactaccaaggtatccgggctgccgtgagcagggtgaaggacagaggacagaaggccttggttctcgacattggcactggcacgggactcttgtcaatgatggcggtcacagcaggtgccgacttctgctatgccatcgaggttttcaagcctatggctgatgctgctgtgaagattgtggagaaaaatggctttagtgataagattaaggttatcaacaagcattccaccgaggtgactgtaggtccagagggtgacatgccatgccgtgccaacatcctggtcacagagttgtttgacacagagctgatcggggagggggcgctgccctcctatgagcacgcacacaggcatctcgtggaggaaaattgtgaggccgtgccccacagagccaccgtctatgcacagctggtggagtccgggaggatgtggtcgtggaacaagctatttcccatccacgtgcagaccagcctcggagagcaggtcatcgtccctcccgttgacgtggagagctgccctggcgcaccctctgtctgtgacattcagctgaaccaggtgtcaccagccgactttacagtcctcagcgatgtgctgcccatgttcagcatagacttcagcaagcaagtcagtagctcagcagcctgccatagcaggcggtttgaacctctgacatctggccgagctcaggtggttctctcgtggtgggacattgaaatggaccctgaggggaagatcaagtgcaccatggcccccttctgggcac

SEQ ID NO: 13528 - DNA, 21684 bp, Homo sapiens
attttttttctgttcgtttgtttatatacctcctgtttccttctgatgttaatagatttctgacagtcagacttgtccacaagaactcaactggcaaggctgcttttctgtgctaaaactggggagctagtgggcaccatgaagatcttctgcagtcgggccaatccgaccacggggtctgtggagtggctggaggaggatgaacactatgattaccaccaggagattgcaaggtactgggttggtttacagcaggctgcagctgggtggggcacttgatctcaaagcagatgccttgggctccagtctgagcgtgggctaggctgtcacccagtgcttatgatgagggctggtgttggtcctgagcaggtctgctcagccaggtaggtatatgtagcagttaggcaaaatcatgcctgtttggagagtcagacattatgtagcagccttagcagagcctcagcatctgtttaacggagcaaagaaaacccaagcctcagtagtgttgatgaagttgaatcatttacttgccttactgaaatggtgacatgttcatcatatggttaaattcttttgaatgaaaaaaatgaaaatggttttttttttcccttagaagaaatatttaaaagtatgtgagttgttggccaggcgcagtggctcacgcctctaatcctagcactttgggaggccgaggtggccagatcacctgaggtcaggagttcgagaccagcctgaccaacatggagaaaccccgtttctactaaaaatacaaaattagctgggcatggtggctcatgcctgtaatcccagcttacttgagaggctgaggcaggagaatcacttgagcctgggaggcagaggttgtgttgagccgagatcgagccattgcactccagcctgggcaacaagagcgaaactctgtctcaaaaaaaaagtatgtgagttgttatgtagcaatcattaagtgcattcagtgtgccagcattgtgctaaggctgtggataccagatgaagaagatcctgttctcatcttcaaggaccatgcagttttgtggaagagacaggcacatacaaaattacagcacaaaagccaggcacggtggctcatgcccgtaatcccagcactttgggaggcaaagggcgggcgggcgggcggtggagggggtggtggcggctgatcacttgagggtcaggagttcgagaccagcctggccaacacggtgaaaccccgtctctataaaaaaaaattagctgggagtggtggtgggcgcctgtaatcccaggtactcgggaggctgaggcaggaaaatcacttgaactcgggaggtggaggttgcagtgagccaaggttgtgccactgcactccagcctgggtaacagagtgagactctgtctcaaaaaaaaaaaaaaaaaaattacagcacagtgagataaaggcacaagaggtcatggaagcagcaagaaccagctgaacttggggtgggaggtaatgtttgaataatttctcagttctaaaggaagagaaggtgaagtttgagcagcagggattacaggtaagctttcagatgagccagattgtggctgggtgcagtggcctacacctgtagtcccagctacttgggaggccaaggcaggaggattgcttatgcccacgagttcaacatagtaaaacactgtctcacaaacaaacaaagaccaaaaacaggctgggcacagtggctcatgcctgtaatcccagcactttgggagaccaaggcgggcggatcacctgaggtcgggagttcgagaccagcctgaccaacatggagaaaccctgtctctactaaaaatacaaaattagccaggtgtggtggcgcatgcatgcctgtaatcccagctgctcgggaggctgaggcaggagaatcacttgaacctgggaggcggaggttgccatgagccgagatcgtgccattgcattccagcctgggcaacaagagctaaactctgtctcaaaaaaaaaaaaagaaaaaaaaccacacacacacagatgggctattctggggagcagctagcagtttagtgcagctggagtgtggtacaaaagtactatggtaagagaggctgccgaaagcatacgcggggtcattttgtaaagggtggtagcaaaatgcaggaagaggaacatgagtttaagtccaagctttgccacttctttactctcttggccaagttacttctctgagccttaatataaaataatatatacttcaatatagtaatacattatctcacagtataatacaattatcttagaattgtttgatgattaaatgtaatacagtatctggtgcagaattagggcttaaaatatttacttttttttctttttttttttttgagacagagtctcgctctgtttcccaggctaaagtgcagtggcacgatctctgctcactgcaagctccgcctcctgggttcacgccattctcccgcctcagcctcttgagtagctgggactacaggtgcccgctgccacgcccggctaattttttgtatttttaatagagacggggtttcaccgtgttagccaggatgatcttgatctcctgaccttgtgatccgcccgcctcggcctcccaaagagctgggattacaggcgtgagccactgcacctgcccaggtcttaaaatatttctaaacattttggacattattttcttgttttattgttcagatggagtcttactctgttgccttggctggagtgcagtggcgcagtctcggctcactgcaatctctgcctcccaggttcaagggattctcttgcctcagcctcttaggtaactgggattacaggcatctgccaccacacctggctaatatttgtgtttttagtagagacttggtttcacctgttggccaggctggtcttgaacttctgacctcaggtgatccacctgcctctgcctcccaaagtgctgggattacaggtgtgagccacagtgtcaggcctggacgttattttctgagtgatatattaaacaggagagaaagaggattggattgcattttggaacactcactgagagcggtgtggagaggagagcatttggggatattgtagtcccagagctgcatagtcccagaggagacagctcgggggaacttgagtttggtaactcactggatatgatggagggagagagaagattcaagaagcaccaagacttctggttagaatgacaaagtggatggggcctgcaagggaggaatgggtggtgtggggaggggaacacgatggagattaggcgtttaggtttggacatccacatagagatgccaatggcagatagaattttgggtctggagacagaatttgtagttgttggaactgaaactgggagaggttgcagtctctcaagggggtgtggaatgtgaaaggtagagggctgaagaaggaatcccggaatagctgaggaggcaaagaagggcaagggagatagccagcatggaaaggaagaaagagggagtgtgtctagcaaggtcagaggcactgggaagtcccagatactgatgactgacatcagctgcaggagtgagctggtggtggttaccgagagtgatgtcagtggagtggtgggcagtaagtgtgaagaggccaggaaggtggtgagtgagatgccttttaaatagtgagcagaggtagaaaggactacatttcagctaagcatccatagctggcttcagatataaaaccttgatgtgccattaaaaaaaaaaaaaaaagaacccccttctttcagtgcaccgctcttcaaagtgtggaatgtggaccacctgtggcacaattgcctggagcacattagcccagccttctcaataagagtgagagtgtgtgtgtgtgtgtgtgtgtgtgtgtgttctgggactctgcatttcaggtaagctttctagtgattctagtgttgacccaaggctggagggcctctgttttaatgtgagctccttagctgtccccttgaattcccagaaagcgtggcagggcctgcctagttctgggtgctcatcccgaccccgcctgagggttttcagtgtgtgaattactgcagtaggaaatatggagaagtgattctcctccctttactacggtattggtgaactctttagttttccctgatgatgttaagtgaacgtgcccagtggggtacctgtcacatatacagtgggtgtatgtgagtgcttctctttccccggctgctctccctaataccgcatcagtggttatctccaggcagagatgtaggccaggttaggtcaagtattaggcagattgagtctgagtttttcctgaggaggaaaatgtgtagtgtatagcaagatcaagatgctagtggctgtggaattactgtgacagggctaactgccgagaccagctcggtcgtggagaccctaacccagtggcgctagaggaattaaagacacacacacagaaatatagagtgcagagtgggaattggggggctgacagccttcagagctgacagccacgaacagaactttacctacatatttattgacagcaagccagtgataagcattgttcctatagattatagattaaaacgggaaacaaagggatgggctctggctagttatttgcagcaggaacatgtccttaaggcacagatcactcatgctattgtttgtggttcaggaacgccttaagcgaaagccgccctgggtgggccaggtattccttgccctcattccagtaaacccacgaccttcagtgtgggcatcatagccatcaacgagcatgtcacagtgctgcagagatttgtttatgaccagttttggggcctgtttttggccagatttgggggcctgttcccagcagctaactactggagcatttttaggtctgagaacatctttctctgagacttttttctgcagcactagagaataacagcttgaaactctattaaaataaagtggccaggtgcagcgacggatgcttgtattgtagttctgctgaggcaagaggatctcttgagctaaggagttcaaggctgcagtgcccaatgattgaggctgttcatagccactgcactacagcctgggtgacataacgagaccctgtttctaaaaataaacaaaaaaataggccaggcgcagtagctcacacctgtaatcccagcactttaggaggccaaggtgggcggatcagttgaggtcaggagttcgagaacagcctggccaacatagtgaaaccccatctctaatgtaaatacaaaaattagccaggcgtggtggtgagcacctgtaatcccagctacctgggaggctgaggcatgagaatcacttgaacttgggaggcagaggttgcagtgagctgagattgcaccactgtactccagcctgggtgatggggtgagaccctgtctcaaaaaaaaaaaaataaataaagataaaagacaaccaaaaaatagtttaaaatagatgacacgtttgttctatctgtttagcaatgtgtttatatatgtgaatactcttgtgtgttgatgtgtatcatgcaaaggttactgacttttttgttttttaggtcatcttatgcagatatgctacatgacaaagacagagtaagtgtaaaaggaaactattatcttgatgtggggtgttttgaagtcttggattacaagaaggttaagaatccctgggggtcatgatgttaaatgatactgagaggcgtatggtgtagaagtcaggaaatcagttgggagactgggtcctacttctggctctatttttgttgtttaatctcccagctttatcaagatagaactgacaaataaaaatggtctatgtttatggtaatacaatgtgatgaatatatgtgtatggtgtaaaatgattgaatcaagctaattaacaaatctaccgcctcatacttttttgtgtgtggtgagaacatttaagatctactcgcttagtaatttttaagtgtacattattaactatagctcacaatgccgtacagcagatctccacaacttattcatcctatctgactgaaacatcagatcctctcccttagcaggtaccattctctgggcttctgagttcaacatttttttttttttttgagacagaatctcgctctgtcactcaggctagagtacaggggcgagatctcggctcactgcagcctcagtctcccgagttcaagcgattctcctgcctcaacctgcctaagtgttgggattgtacctagtattgggataatactattattatactattatacctagtattgggattataacttgggattacaggtgcgtgccatgacacctggccttcactgtagttttaatttccatttttaattttaattttatttttttgagactgggtctctgttgcccagtgcagtggtgtgatctcggctgcactgcagcctagacttcttgggcttaagcgatcccccaacctcagccttcccagtagctgggactacaggcatgccaccatgcctggctaatttttgtatgttttgtagaggcagagtttcgctgtattgcccaggctggtcttgatcccctgaggtcaagtgatccacccgccttggtctcccaaagtgctgggattatgggcatgagctactgcgcccggccatcgtgtgcttgtttaccatgtgtatatctttgttctagtctagggttatgaacataggtgtgattcttgatagacactgccacattgccttcaaaaagggttccagattcactgtaatatcttcaaaactgggtcattaaaaagtgacagctaatttaatggcatcgttaaagtgaaggctgtgccatccctggtttacaattgaggacgctgttcatcaattttttttaacttaaaaaataaataaaacaaggccaggcacggtggctcatgcctgtaatcccagcactttgggaagccgaggcaggcagatcacggggtcaggagatcgagaccatcctggctaacatggtgaaaccccgtccctactaaaaatacaaaaaaaagccgagcgtggtggcgggcagggcctgtaatcccagctactcaggaggctgatgcgggagaatggcgtgaatctgggaggcggagcttgcagtgagccgagattgcaccactgcactccagcctgggcgacagggagactccgtctcaaaaaaaaaaattgtggtaaaaacacataacataaacggtcatactgattgtatctaagacataaatgcacttactttgacaatgaaatagttctatatttctgtgaaaaattatttcacccagactaaacatttttgtgctttacctcagaggcaacgtcatttcttttttttcttttttctttctttctttttttttttttaacaagaatgagtctccctctgttgccaggctttagtgcagtggtgtgatcttagctcactgcaacctccacctcccgagttcaagtgattctcctgccttagcctcccaagtagctggggttacaggcatgcgccaccatgcctggctaattttttgtatctttagtagagatggggtttcaccatgttggccaggttggtctccaactcctgacctcaagtgatccacccgcctcagcctcccaaagtgctgggattacagatgtgagtcactgcacccggcctggtaattctaaagaatattcagttctagatattttctaattccagtctgatttagtcttttgcctatcagtttagaagtgtgtttcttaatgtatgaaaaattttttttcttcagttgtgtttctgatattaagatttttgacttgttttgcattgtggtcagaggatatcacccttttgatgccagttctgtattagctgtctaatgttatttaacaaattaccttaaattttaatagcctcttaatatttcttactaacttggcaggtcatcagtctatttaaaagatttgcacatattttttccatcatctttagttattttcaacagaagggtcactgtgcctattgagtcagaccgttatagatgaaagatgtatgtgtttactaaagacagaagtaaaaatcttcaagatgcaaagaagttattttctgatggggaaaatactttttagtgaagctctctgagttagagtcggtaaaggaaaacaagccatacatattgcagcagagcggctttaacacaaggagctggctacccagctgtgggagggctagaaagcaaatgggaacgctgagtaacctaacagtagagattgcagggagcagttaccttgcctagggctgagaaactaaacgagaagattaggatttccagaagccacaagcattgaggagagatcctgtggaccactgtccaagtacggctgcagctctgaggggcccaaggagctggttatgggatcattgggaaaagttggagtctgcaatcaactgcccctaccgagaggaccctgatgagaacagcagcatgcagaaaggagcaagcctgctctgtcctcctaccttccagtcgccctcttggtcccccttttggctgtacctaacagttggaaaaaggagaacatggtttgcagggctctggcatcacttagtagaggatagaagagtgagtgtggagcagggacagtcgcttaataaagggcaaggggctgactcacaagacctgcccaactcagccagagctgttctgccaggggccagaaaggccatagggccctgacttgcactgccactgccagctgtgactctagaactttgcaaagcacctttccacttacttataataactggtagtaagtgacggccatgtcttccttagaatgtaaaatactaccaaggtatccgggctgccgtgagcagggtgaaggacagaggacagaaggccttggttctcgacattggcactggcacgggactcttgtcaatgatggcggtcacagcaggtgccgacttctgctatgccatcgaggtaagccattcccttcaggtgtgtgtcctgcatcttgcatgggaaatcccctatgctcttgcactttccccgtctgttccttcacaaacattcatggagtgctcactctgtgccaagcacagagccaggctctgagcgtatagagatgagtcagacacagttccttcctccaggagctaattttctcctctgtcagcctaggctgcacatcagaatcactaggagctttagaaaatacttacaggctgggcacagtggctcacgcctgtaatcccagcacttcgggagggtgaggcaagacaattgcttgagcccaggagtttgagaccagcctgggcaacatagtgagatcccatctctacagaaaaacttttaaatattagctgggcatggtggcatgtgcctgtgttccagctattcttgaggctgagatgggaagatctcttgagcccggaaagtcaaggctgcagtgagccatgatttggacttcatgtaagaaagcaaaaaattacttctaccttgtttaagccagttattgtgggactttgttgtttccaactaatcagtatatgaactcagttttgtaggggaaagtatttaaatacatgcccccacaccaccacactccagcctgggtgacagagtgagactttatctcaaaaaaatcaaaacgaaacaaaggctgggcacagtgtctcacccctgtaatcccagcactttgggaggccgaggcttggatcatgaggtcaggagttcaagaccagcctgaccaacatggtgaaactccatctttactaaaaatacaaaaattagccgggtgtggtgatgcgcgcctgtaatcccagctactcaggaggctgaggcgagagaatcgcttgaacccaggaggcagaggttacagtgagccgagattgcgccactgcactccagcctgggcgacagagtgagactccatctcaaaacaaaacaaaacaaaaaaaccttatgcctagtccccagccctaacagattttgatttaacttttctggggtgaggcctgagccttgggacttgggaatgtgcggcaaggttgagaaccactaccttaaatgtccctatggagtcagctctcttatgtttaccaatttgtcatttctttaataaaacattaaacagcttgagcccacagagcaagaaaaattaaaaaccaaacaaaattaaaaattaaacatgttatttttctcataaaacaaataatgcatattattataggaaatttggtaaataccaaataaaaatagtatgttgacccaaagttaagtactgttaacattttggtgtatattcttccaagttttgggggcaggcagggagcatgtatataaatactttccctacaaaattgggttcatgtagtgattgagttggaaataacaaagcctcaaaatcactgtggtttaaggtagagtagttttttgctatctttttcgtggcgtgatctctattcaccgcaacctccgcctcctgggttcaagcaattctcttttctcagcctcccaaatagctgggattacaggtatgtaccactgcacctggctaatttttatatttttagtagagatagggtttcgccatgttggccaggctggtcttgaattcctgatctcaggggatccccccacctcagcctcccaaagtgttgggattacaggtgtgaatcactgcgccctgccttgttcctcttttttaaaagtaagaataactttcccaggaatttctattatagcaaacctctccttgggtaccatcggctagaatgaggttaaatctcatttcttatctctggcaagagggattcagttactcttagctcagacaagtgcaccactgcaaaggtcagttccccacgctgcaccctcacctgatttcaggggagaggaggacacagaatggatgtcgggaggtcatcttcagtgtccactcctggtagtgttttgggtgagatcttgagcttcttgatgggctgaggagaaggaggtgtgaaggtaccagcttgcaggttcagggagaggtgactgatgagtcagaaggcagcaggggtgagggacgacactggctttggatattgtcagggtggaggcaaagtgattggtgagaactagggtttaaggccctcaaaccacatctaaaaacatcaaggcaaatcctagaaataatttgaaatagatgatgaagatttttctaggagaacatgtgtgtgtattccatgtaaatactgcgcgctaatcaattgcacaactggagctgctcacgtaagtactctttacgaaaggatacagcatttgtcccttgattatagtaaaaaatatagtattcatggtagaaaatgtgggaaatacagaaaaggatttagaaaaaaggaaaatcttatcaggaacagtctcggtatcattttgtggtttccacttcgtgtgtagggccacacgtgagtctgtttgttttacatgctagagctcttggggctgtggaatctagactggataagttgaaaacaaagagttggaggtgcttatttatgttcagggaaactcgaagagttcagggaagacttctggatgggggattcatgctgccctgggaagtggggtttgatttggcaggtggggccaggatagggaaggctcagtgatcatgagatcattgtggctggagtgttggttgttgggggaatgggggaggaagactgggaaggtaagggagggcctccaaagcagtagtttccccttatctatggtttcacttttcgtgatttcagttacctgtggtcaactgaggtccaaaaatactaaatggagccaggtgcggtggctcacgcctgtaatcccagcactttgggtggctgagacaggtggaaaccttgagtcccagagttggagaccagcctgggcaacatggcaaaaccccgcctctacaaaaagtagctgggcatggtgatctacgcctgtagtcccagctacttgggagattgaggtgggaaattgcttgagcctgggaggtggaagctgcagtgatcatgccactggactccagcctggacaatagagtgagacccttctcaaaaaaaaaaaaaagaaaaattaaatggaaaattccagaaattatttataagttgtaagttgtgtaccattctgagtattattacataattgttctatttttagttattgttaatttataaattattatttatatttattattgtgcctaatttataaattaaacctggtcataggtaagcttggaggctgaagcagctccactgtgaatgctaatcctccacgctgacttctgaccaaccccagcttcaggaatgcctctaaaatttccgctctcatgcactttgatgtaaatcctgccctcaggtcagaacaactttgatgttatcataaatacatacttaccgtaaatcctgcccttcgtcaaattccctgtggtatgtaagccctgcgtctgagccataacagtgtgggggcccagtttctcactgcccgagacaaggcttctgtttgtatgtctctataaagtgtgtctttctgagaagctggatttgccagtctttcctcagcctctcagctcccgtggcctgttggggtaggtttgcatagagctgcccaccatggaacagtatgtatgtatagcaaaaaaaaaaaaaaaaaaaaaatggtatacataagggtcagtactgtctgaggtttcaagcatccaccaagggtcttaaaatgtatcccccatggacaagaggcactgctgcaccataagaaaatagaggctgtgttctgccaacagtggggatttgggacaattttgagcccagaggatgacctacttactcacacctacagtctgctctcctctggagggcacagcacgcctcccaggttcgtgaggcaagtccctttcctggctttttggcgtcctcttgtgcggtactgacacctactgctcttactaagtagtgcagcctcctcaggatccccggcatccccgctgtgcctggcacggaatgagagtccctaatcacaagttaaagccagctgaatctcagccctttttcatgatgcacatttggagaataaagtatttaagttacatatcttaggaccagaatcaaggaatagcttgctcaccttaaaggtcagactactgtttaatttattgctcatttttccttgggtttcggctctattttctaggttttcaagcctatggctgatgctgctgtgaagattgtggagaaaaatggctttagtgataagattaaggttatcaacaagcattccaccgaggtgactgtaggtccaggtgagatttacacaccctgtgttgaaagctttgcttgctcttgtgtgagagaggaaaagggttattccagttacctggaacaaatccaggtcatagcatagaagtgggacctctctgtgtggagctctgacagtaaggacttggtttctcttgatgtttattttcctgctagttaaaactagtcaacaaggagtagactagagctagtcaggtccagcaatggagacgcaaacaaaacctacatttgctttaagcaaattggaattcttatggggctcaactcttgagtttcaactaccaataattacgccttggataaacctcattggctacgatactgccactgctcaaagctcaactctgagtttcatcaggcagaaagtacttagttcttttatttatttatttttttgagagagagtctcactctgtcgcccaggctggagtgcagtggcgctatcttgcctcactgcaagctctgcctcctgggttcacccatcctggctaacacggtgaaactctatctctactaaaaatacaaaaaattagccaggcatggtggtgggcacctgtagtcccagctactggagaggctgaggcaggagaatggcgagagtagttctgacattctgcttctgcatacaacatgaacaattttcctgtatagcattgtctcttaaggtttccagaatatgtatatgtacacacacacacacacacacacatattttttttttgagacggaatctcactgtgtcacccaggctgcattgcagtggtgcaatcttggctcactgcatcctccacctcctgggtacaagtgattctcctgcctcagcctcccaagtagcggtgattacaggtgcctgccaccacacctggctgctttttgtatttttagcagagacggggtttcaccatgttggccaggctggtcttgaacccctgacctcaggtgatccgcctgcctcagcctcccaaagtgctaggattataagcgtgagccaccatgcctggcctccagaatattttttatagtctagaactttgtttcagtctttgaaaatttcacatgccactgacacttagagaacatagttgaaagatttgcaaaggaaaaactgtggtgaagttatggataacaccatgggttttttctaattttttgtggagatagggtcttactatgttgcccaggctggactcaaactcttatgctaaagtgatcctcccatctcagcgacccaagtacctgggactacaggtgtgcactactgcacctggctttttcaccacggttttggagaatgcagtatcattctgaattgaagcttctacctaaggtcaacattattctcccatttaacaatttttttttaatggagaatctgaaacatgtacaaaagaagtgggtactatcttatttatttatttatttgagacagagtctcactctgttgcccaggctggagtgcaatggcaggatctcagctcactgcaacctctgcctcccatgttcaagcgattctcctgcttcagcctcatgagtagctgggattacaggcgtgcaccaccatgcctggctaatttttgtatttttagtggagacggggtttcaccgtgttggccaggctagtcccgaactcctgacctcaggtgaccagcctgcctcggcctccgaaagtgctgggattacaggtgtgagccaccgcgcccggcctatcttttttatttttaaaatatacaatagagtgctcaaatcattccatttacaatcaacgttattgaagtatgatttacattaaatgaatatccattttcattatggatatttgacaaatataaacacacttgtaaccaccatcaccataatgaagataatagaacatctccatcatgcccaaagagattcctcataaccctttctatcagtccccccatatcctggtcctaggcacccactcatagacttcattatagattagatttgcctgtctaggatttcaaggaagtggaatcaaagaagtgtggactcttctgtgtgtgtgctctcttttttatagcgtgatgctggtaagattcttccacactgttcatgtcttgggggtccgttcttttgtgttactgagcagcactctattagatagatgtaccataacttgtttatctctctacctgttgatggacagggatttcttggataggtctttagattcactgatcttttcttttgcagcatctaatatgctgttaagtatatttagtaaacttttcatttctctttctttgttgttcttttttttttttttttgagacaggatcttgacctgtcccccaggctggagtgcaggggtgtgagcatggcttattgcagctttgacctcctgggctcaagcagtcctcctgcttcagcctcctgtgtagctgggaccacaggctcatgccaccatgcctggctaacttaaaaaaaatttttttttgtagagatgggatctcagtttgttgcttaggctggtctcaaactcctgggctcaagcgattctcccacctcagcatcccaaagtcctaggattacaggcgtgggccgctgtgcctggcctcatttttgatattgtattttttaatctctgaaagttccacttgattctttttcataacttccatttttctcatgttcatagttttctataagcacatttattttagctttttgaacatccttatcttctgttcccaccatctttgttttttctgggtttgttctcttgactcatttttatccttattctgggtcacattttccttcttcacatgtctaaccatttttgtttggatgctgtggctatttggaattccccattgttgagtgctagacttcgttggttttgctttttaaactttggcatgcagttgggttacttgcagttcagattgatcctttcagggcttgtttaagctttctttggagtggggttagagtagctttaagtcaggccttctcaacagtagtgctgtgacgttttggcattctccaactatgtgacattttgataattctttgttgtggaccctgtcctttgcattgtaggatgtttagcagtgtccctggcctcttcccagtggatgtcagtagcactcccctcctcccaccattcttgccaactaaaaatgtctccagactgccacgtcttccttggtctcgagtgtgtaaaattgccacctgttgagaaccactgctctaaggctgtttagccagacagttactgtaacctttctggagtgtctgctgagagctctaggtgctcagcagggtttcccttgtctggctgatcagaacttgaatgtttcccaggcctctgagagctccggagattgttatcactcatgcaacctttgctcggcttcacagagtattaccctgtgtgtgtgtgaatgtattaacacagaccctagaggaaccctgtgcagcattctgaaggctttttttctgtgtaatttcctctctgattctctgcctggcaagttccagctgcttccacttccctgaactcgtttcctgtctgtttaactcagcaagactgccgtgctctgtgtcacctcttaccctatactgtggtctggaaagggtctcctggctgatagccagagcagggtaagggttacttggtttgtttcccttcttagggagcaaactgtgttgcctcttgctcaacatctgaaaacacttgtttcatatattttgcccagttttctagttgataacagccggagggtaagcctgatcccacttattccactatggccagagtggagattgattcatttatttatttttttttgagacagtctcactctgttgcctaggctggagtacagtgatgcgaacacagctcactgcagcctcgacttctgggctcaagtgatcctcctgcctcagcctcctgagtagctgggaccacaggcaggcgccaccatacccaactaatttttttgtttttttaaatttttattagaaactaagtcttgcggctgggtgcagtggcttatgcctgtaatcctagcactttgggaggccgaggctggcggatcacctgaggttgggagtagcaaccagcctgaccaacttggagaaacctgtctctactaaaaatacaaaattagtcaggtgtggtggtgcatgcctgtaatcccagctactgaggagattgaggcaggagaattgcttgaacctgggaggcaaaggttgcggtgagccgagattgcgctattgcacttcagcctgggcaacaagagcaaaattctggctcaaaaaaaaaaaaaaagaaaagaaaagaaactaggtctcgctttgtttcacaggctggtcttgaacgccaggcctcacacagtccttctgcctcagcctcccaaagtgctgggatcacagatgggagccactgtacctggcgagatcatttattcttgaaaatttatccattttgacggcagggagactgatctgcagggcagccttggccatgaagtatgctgactctgcctccaggcagcattgttcacacacacctcagcttaggccaggcccctcatatgatttcttattaaaaaaaaaaattttttttagatagagtggctctgtcgcccaggctggagtgcagtggcatgacctcggctcactgcaacctccacctcccggattcaagtgatccttccacgtcagcctcctaagtagctgatattacaggcatgcaccaccacctggctaatttttgtatttttagtagagatggggtttcactatgttggccaagctggtcttgaactcatgacctcaagcgatctgcctgccttggcctcccaaaatgctgggattacaggcatgaaccaccacgcctggccaatttcgtaatacttttcttcatagcgcttaccactgcaatcattaaatcattatgtagttatgtatttaatgtctgtatccccacccagctgaggcatcctgaggtcatgcactgcgtgggttgtattaactattccattccgttatttgctccgggcctgtcatgtaaaggagttaggtaatttttgtaaagtgagtagattgtcagttgtgcttcatccataatcccttgtaaatgtgactttgtttccgatcctcagcctgacaagtggcttcctcattgccaagttgggtggtctttcctctgcttttcctctctaaccactgccgctttggtacttctgccattccttccttcttgaaactctccctggaccttagtgacatctcttcatcttggttctcctgtgttgctttctttctgctccagatgtatactttccaaggttctgctctcagccctttttaaaagtggcatctgaagttgcctgttccccagagctgggttacatgctgaggcttgtggagagccaacccagggagcagcgtgtgttcatccgtccattttgttcatttggaaagggcttaggaagctcctggggtggctacctgcttcagactcccccaccccgtgcccttatacattagcagtcacactcaaaataccaggccctcaagaagtacttgttaaaatgcactggaccataaagcttgaattttttttttttaatttttattattttttgagacagtctcactgtatcacccaagatggagtatggtggggcaatttcagctcactacaacatctgcctcccgggttcaggcaattctcatgcctcagcctcctgagtagctgggactacaggcgcgtgctactacacccggctaatttttgtatttttagtagagacaaggtttcaccacattggccaggctggtatcgaactcctggcctcaagtgatcagcccagcttggcctctcaaagtgctggaattacaggtgtgagtcactgtgcctggctcttgatttttattttaatgaagcaatttggactataaagcattttaagttatataattggtttaaacattcaggagatagaattggcagagtgggtgatcagtgggttgtagggtgacagaaatcaataatttatctaatgtgtgttgactgttacggggcactagaccttgtgggtgctggggtacagtagtggacaggcagtcagcggtcctgctgtcctggaactagtaaatgatgcccagattcctggactatgtgactcattgattgattgaggcagaaaccctggagggaggagcaggcgtgttagctggggtgggtgggatgagttttggacagtgtattccagttggagtttgatgtgacatcagagaggatgggcagggcttctcgggagggtggtctctgtggcagaagacagaagtttcttcttaagctcctccacgtgatactgtcatggagcacaggtgagcttcataggaagtgtgcttttttttttttatcttcatcatcccgaccaccaccacatgagacagagcccattcacccgttttactgatgaggcaactgatggtcagaacggagggctcagggataggaagtgagatccaggccaggctccagcctcgagctcgaggttcacgctgtctctgttgtgctcttctatcagctgctctctttcttttttttttttttttgaaatggagtctcactctggcccagattagagtgcagtggcgtgatctcggctcactgcaacctctgcctcccaggtttaagtgattctcctgcctcagcctctcaagtagctgggattacaggcacccatcaccacgcctggctaatttttgtattcttagtagagacagggtttcaccacgttggccaggttggtttcaaacttctgacctcaggtgatctgcccatctcagcctcccaaagtgctgggattacaggcgggagccaccgcgcccggcccctgtcagctgctttcatgcttctcttttccttgtgtcatctgtgagacttgtgctctgtgtaggggaaatgagtgggctttgtcagattataattcatgaggcattaaaagtgtttacagttaattctccctgatgaatagccccttccaaagtctattttggctcttggctcattaaaaattataattgtagaagtagcagtacattactgaggtttagaaaacagttaacagaagatccctcccaaatcctactcttctctaaaatcctactgtcctaaaacaactgttatttaagagattgtttggtgacaaggcgctttcattaagggaatttgccatagtgatctggggattctaagtcatggatctcaattttggctgccagagcctaactcacagtagctggaagatcatcagagaaccttgttgtcttgctttggctttccctccctctccctgcaacctagaagtatttgacataccagcattctgtttttgcttttcaaataatttttctaatttagtggttaatagtttaattgttaatttatatctctctaattgctaatagggatgaaaaagttttcataagtttgatttctgttttgaattttctgtttatatttttacctggtttctttttgggtgtgtgttttttttgtttgtttgagacagagtctcactctgtcgcgcaggctggatcactctgtcgcgcaggctggagtacagtggcacaatttcggctcactgcaacctctgcctcccaggttcaagtgattctcatgcctcagcctcctgggtagctggggttacaggcgtgtgccatcacacctggctaatttttgtatttttagtagagatggggtttcgccatgatggccaggctggtcttgaactcctggcttcaagtgatcctcctgccttggcctcccaaagtgctaggattacaggcgtgagccaccatgcctggctaatttttgtattttttgtggaaatggggttttgtcatgtttcccaggctgatctcaaactcctgaactcaatccattgggtatttatagttttcttatcattttttgcagtctccctcccaatattaagcatacagaatagctgtaagagcagtacagtaaacacttatgatcccttaccctagatttatcaattagcgttttgtcatacatttacatatggattttttttttttcctgaaccattggcaagtcagttgcagacatcctgacacttctgaatacctcagcatgtatatgtgcttttagcgtgatggccccttaaccacttatctttcccatatttgctgtaaatatttttcctagtctgttgcttatgtccaactctgttttcttgtgtttttcagagggtgacatgccatgccgtgccaacatcctggtcacagagttgtttgacacagagctgatcgggga

SEQ ID NO: 13529 - DNA, 487 bp, Homo sapiens
attttttttctgttcgtttgtttatatacctcctgtttccttctgatgttaatagatttctgacagtcagacttgtccacaagaactcaactggcaaggctgcttttctgtgctaaaactggggagctagtgggcaccatgaagatcttctgcagtcgggccaatccgaccacggggtctgtggagtggctggaggaggatgaacactatgattaccaccaggagattgcaaggtcatcttatgcagatatgctacatgacaaagacagaaatgtaaaatactaccaaggtatccgggctgccgtgagcagggtgaaggacagaggacagaaggccttggttctcgacattggcactggcacgggactcttgtcaatgatggcggtcacagcaggtgccgacttctgctatgccatcgagagggtgacatgccatgccgtgccaacatcctggtcacagagttgtttgacacagagctgatcgggga

SEQ ID NO: 13530 - DNA, 4681 bp, Homo sapiens
gggagggagggactgatgagggagggagggaatgagtgagtgactgagtgagggagggagagggagggagtgagggagtgacttgagtgactgagtggcctgttgcttccgtgttcctgttaacactcctggaccgagccctactgacacctgggccctgcttctcgcccattcaccaggtctctctcctcctgggcgagccgttcttcactaccagcctgctgccgtggcacaacctctacttctggtacgtgcggaccgctgtggaccagcacctggggccaggtgccatggtgatgccccaggcagcctcgctgcacgctgtggttgtggagttcagggtaggccacccaggggatgttggagaaaaaagcagaggaggcgggtggggaaccttgttttcttgcaggaaccttgggtgcctgtagagcggctcaggccttgatgatttgagcttgtgttttctttctgtgtcagcacactgtggggttgaatagaagatgcttgccttttaaaaaatgcgataatttgacatacgaaatggaaatggctgagtgttgtcattttacaattgtggcttatcagaataatttaaaaatataaattaagcgtttcagaagccatgccgtgtggcctgctctgctctcattaatagccgaggcttcgattgttaaaggcattttgagatgggagagtcagctgctttgtgcaagaaaaaatggaaaagcttccttttaattttctcatcaaagcagaaccatagtcacaaagtcattttgggaagggcatttttattaaaaggatttgaaaagctttaccctggatggagagtgtatctcatttgatgagagtggttttctctcctagcttagtggctccatcactgaaagtctgggcatttctcctgtgttacttgtttacctaatcagatttccacatgaattctggttttcatggccaaagaggggatgtcacgatccatgcgtgcgtgtgaccaggaggaagggagggaaggctgtgtggcctgagtgtcctctgggttcctcttggcagggcctttttctctccccagcatcctcatgaactggagatgatgctggggagagaattggcttacagatttcttcccaaagaaatgatgttcaggatggcccggataggagtgtgcagcccccagcctaggagctctggccgactgtcccttataggagaggactcaggtgtcacgtcagagcttgcaggttcccgcccagcccagtctgttacagaaaccgttgtggatctttgttctctctgagccccttcatacttgggggtctctttcaggtgtgcagggaacagcaagatgtgcctcttgttcttgctgccacgcttccctgtgtcctggcgggcgggtgtggacggggctgctccttcctcacaggacctgtggcggatccggagcccctgtggtgactgcgaaggcttcgacgtgcacatcatggacgacatgattaaggtaggcagggccacactctgcatagtacccccgacctgctcctgtatcgcaggcctctcacagggtcccagcttgggcagcacaggctcttctgttgggggcagtgaggtcaggtgctgccattttgtgtggttcaacatgagcattgcttggtaccagccctgttcttggctccgtgctgtcaccctgtgtcagaatctccactgggcctgcacgtcctgtcattgcaactgcccctgccagtgcccacagcttcttttctagtggggctgactttccagaggccatctgggaaccttcttaggcagccatttccatggtgggggctccattcccgggaggggtacctgaggagattcccacaggttatttacatggtaggggttagcaactgggcctacgttctccagaaccatgggctgtcctgacagcgccagtggtccttggattcatgaggactgaagctgagagtcgtgttccatccacatgagaggggcagggtgaggagcatgggccgtgctgtgtattaaggaaatgcacgtggctcctgcttgtcatcccagcactctgggaacctgaggctggtggattgcttgagcccagacgtttgagaccagcttgggcaatatagcaagaccctgtctcgacaaaaaataacaaaaaattagccaggcatggtagtgcacacctgtattcccagctactcaggaggctgaggtgggaggatggctttagcctgggaggtcgaggctgcagtgagctgcgtttgtgccactgcctccaggctgggtgacagagcaagaccttgtctcaaaaaaagaaatctcatggacaccagaggagcgggaagcagcggtggccccgcagcagcagctatgcatcgggaggtggggcttttctgcttctgctcacctttctgctctcattttcccatagtgaacatggattgcctgtgtgtgaacacttttttaagtaaattaaaccttgtggatattttcagtttgtatcttatctgcccctcacagcagaccattgactgttcgatgcttttagaaatctccttcgtgctgagccctgcgtgctctggacccatgcgctctacgcctcctctgggcccctgctcatggcctgcccaccctggctgtccctgtcccctcttgctgatacggttctgctactctggtcctgggccagtgtctgtctctcgtgtgctaaggcagatggccgagagtggtgggtatcccacagtggggtgccaggcatttttacttctatgctttccaaatccacctgcccttccccacccttagcctggcccttccagtgccctgtcttagacctggcgccacttcacacgaccagccaggcccagggccccgggcatcctccctggcaagtcctcccatcccctgccattggtcttcgtgctcctggtgagcctccgacccaggctgtcccctgactgctgccgtcctggtttgagcccctcctgctctggccgtcctccacacggagcccacatgaacttgtagatctgagtctggccacatccccactgcaggaatgccctagctggctccccacaccacacctgcagagtggcccggctggcctgggtgccctggcctgctctcctgacttagctctatcctcaaggccccctctggcccttctcctgccggctcccatttgaccgtcacctcccctcctccaggtagctttctgcatccctcctggatgcaggtgcccccagcctgccgccaggcaccggggctgtactgtcacgcatttatccctccctgtggcccggggcccacctgtcggggccacacagctgtggtggtcaccaagtttctaggtgctgggtgttctcaccagtgatgtagatatgtggtcctcagaaggcttgagacaggcagcaccaccccatcttaaaaatccggagagcgaggctcagagccagcggtgcctggggagccactgatgagagagaagtggcagagagggggcgccgctggtctgctgggcgctcggcatctttatgggagaacgcacaccccttgtgactgcagtcagtgggagccaagccggggagcggtacctctgtctagctgccggcctgtctctgcagcccccaggcccccttctgttcgcagcgtgccctggacttcagggagagcagggaagctgagccccacccgctgtgggagtacccatgccgcagcctctccgagccctggcagatcctgacctttgacttccagcagccggtgcccctgcagcccctgtgtgccgagggcaccgtggagctcagaaggtgggtgcagagagggctggggggcagggaggggctgctgcttgcccttggagttctcacccccgtggtgagcacagctggcctgggagacgctgacacgtggagggggtattcgtcctccccacaaccttgcccttccctgtcagagtggccctgcgcgtgtggtggttcccacggtcctgtgtgtgccactggtggaggagccaggaagggctctgctccccctctacagctgaggctcccttgttggatcacagctcaggaagatgggagcttacttcctgtggtcaccgatgcaccattttcctgaaccctcctgggagctgaagcaggtcagggtcagcaagtgctgcttgcgtccagggacgggcagccctgtcctgctccggccctcaccccaccctcgcccgaggagtgacttctcctggaagcacctcccaactcggggcaggcagccaggcagggcgggcgccatcacctgagctcccagggttgctgtctggggcatcagaggggccttccggccttcagtgccaggctgtgcctcaagctcccccagaccctgcagccacaccggccctgccccatgtgtggcccggctgcagggctcgggttggctcaggtgggggcttggctgcggctcttctggctggggtttttctgaggaacgtttatgtaactgcagcactaggaactcccggcagggcaggaaggaagtggggaagaccacaggtttctggaaagccgcaggagctgcagctgttcccccgctgcctcttgtgtgactacttctgctgggcccccctctccttgacaggcccgggcagagccacgcagcggtgctatggatggagtaccacctgacc

SEQ ID NO: 13531 - DNA, 626 bp, Homo sapiens
gggagggagggactgatgagggagggagggaatgagtgagtgactgagtgagggagggagagggagggagtgagggagtgacttgagtgactgagtggcctgttgcttccgtgttcctgttaacactcctggaccgagccctactgacacctgggccctgcttctcgcccattcaccaggtctctctcctcctgggcgagccgttcttcactaccagcctgctgccgtggcacaacctctacttctggtacgtgcggaccgctgtggaccagcacctggggccaggtgccatggtgatgccccaggcagcctcgctgcacgctgtggttgtggagttcagggacctgtggcggatccggagcccctgtggtgactgcgaaggcttcgacgtgcacatcatggacgacatgattaagcgtgccctggacttcagggagagcagggaagctgagccccacccgctgtgggagtacccatgccgcagcctctccgagccctggcagatcctgacctttgacttccagcagccggtgcccctgcagcccctgtgtgccgagggcaccgtggagctcagaaggcccgggcagagccacgcagcggtgctatggatggagtaccacctgacc

SEQ ID NO: 13532 - DNA, 846 bp, Homo sapiens
gtaaaagtggtagcagcggaggcgagcggagggtttcccgcggcggagggtgacatgccatgccgtgccaacatcctggtcacagagttgtttgacacagagctgatcggggagggggcgctgccctcctatgagcacgcacacaggcatctcgtggaggaaaattgtgaggccgtgccccacagagccaccgtctatgcacagctggtggagtccgggaggatgtggtcgtggaacaagctatttcccatccacgtgcagaccagcctcggagagcaggtcatcgtccctcccgttgacgtggagagctgccctggcgcaccctctgtctgtgacattcagctgaaccaggtgtcaccagccgactttacagtcctcagcgatgtgctgcccatgttcagcatagacttcagcaagcaagtcagtagctcagcagcctgccatagcaggcggtttgaacctctgacatctggccgagctcaggtggttctctcgtggtgggacattgaaatggaccctgaggggaagatcaagtgcaccatggcccccttctgggcacactcagacccagaggagatgcagtggcgggaccactggatgcagtgtgtgtacttcctgccacaagaggagcctgtggtgcagggctcagcgctctatctggtagcccaccacgatgactactgcgtatggtacagcctgcagaggaccagccctgaaaagaatgagagagtccgccagatgcgccccgtgtgtgactgccaggctcacctgctctggaaccggcctcggtttggagagatcaatgaccaggacagaactgatcgatacgtccaggctctgaggacc

SEQ ID NO: 13533 - DNA, 28901 bp, Homo sapiens
gtagcagcggaggcgagcggagggtttcccgcggcgggtgaggcgctgggtatgctgggaaggtggggtcgctttggggttctgtgtgcagcgagcatggtgtccttggcaccagggtttcggcagaggagcctagcgtgggcctacttggactcctccgcgtggggcagctcgggacacccgggcctgcaggagagcggggttctaggctggccccggctctgcagtgcagccgggtgcctgccactcgcggggctctgtcgcagtactcgtgcctggcgcctcccctcagccacagagaccgcagtagctccaaccatcgcacccctaactgggccacgagttctctgattgccagacctgttgtctttgccactcactgttctgagtaattggagagtcgtgtattcactacacgccaaccagagtggtcctgtaaaagcgtaagcctagtgtagatacgcttctgcttaaaactcttgagtggctcccagtgcttttagaacaaaatccaaacgcctttccgaagtcgacaaggcccagcttgattgagcagaagatgtgataggagatgaggagcggggggcttctgcaaaagtgcttcggtcgctcaggcttttggcacattttgcttatgcaacctagttctttctaccttagggccttttcttgggaaagttggggtaaggattcctgacctgtaaaaactcttccccaacttttatcccggtctgtcttgtagatctcaaatgctagtttcctcagagtccttctgtaaccttggttttctctttctacaacgctctgtgtatttcttgcattcatgtagtctgtaatttgtattactctctcattagagtctaagctcttggagggcaagggtcttctctagcttgtggtggtggctccagtccctaatatagtgcctggcacatagaaggtatttaataaattttgttattttattttttcgagacagagtctcactctgctgcctaggctgagtgcagtggtgtgatcgaggcgcactgcagccttgacctcctgggctcaagcgatcctcacctcggcctaccgagtagctgggactacaggcacgcgccactacactcgggtaatttttaattttaatatatgtatatttatatatatatatatatatatatatttttttttttaagacagggtctcactctgtcacccaggctggagttcagtggcgccatctctgctcactgcaacctctgcctcccgggctcaagtgattcccctacctcagcctcccgagtagctgggagtaactgggactacaggcacaggccaccgcgcccggctaatttttttaaaaattttttgtagagaacggggtctcactatgttgcgcaggctggtctggaactcccagactcgatatccttgcgtctcggcccctcacagtgctgggatcacaggtgtgagccaccaccgcctagcaaatacattttgaatgaatgtagtggaccatctgctctgcagtctgacggctaatacaattagggcttggcatggtggtttctatttcctccttgtaaatggccatgcaagtttacaactcttggagaatgaggaggggttcagagaatatctcctgaatctgtagtgtagactgcttctgggagagaacaaataataatggatgagggcattcagccagagaaggtgtgtagtgcccaccagaagaggttcatgccttcataaaattgttaacacaagacatagttccaggtttgtttgtttgtttgagatacagtcttgctctgttgcccaggctggagtgcagtggcgcgatcttggctcactgcaacctctgcctcccaggttcaagcaattctcctgcctcagcctcccaagtagcagggattacaggcacctgccaccatgctggctaattttttgtatttttagtagagacggggtttcgccatgttggccaggctggtctcgaactcctgacctcaggtgatccacctgctttggtctcccaaagtgctgggattataggcgtgagtcaccgtgcctgggctgttccaggttttgaaaagacactgtggtcctggttttagactcagcaacatcacagacaagaaaggaatcctatggattaaagttcttcactataagttttttttttcctccagttcaaatgggtaacgtgccaatgtagtaaaggtttgagggaggcacgtctgacacaggcacatgaacacccagtcatcacgcttatgaactacaaaacgatgactcttaaccttgaagtgacttcagaattgattccacatggaccacaggattagtatttcaggactctaccatatggatcctattgatatgtttgacacctggtccagttttacttcactaaactgattgatataatgtgcatgattgtctaagcctttctaattggatgaaatgccttctccgtccacaaccccctccttctcctcctgcctcagctgaatccaccttttaagccttccttgaacattcagtcagatatggccatttctttctctactccaacatttgttggacacagttttctaatgcacattacagattctgacagttctagatattctgtctgtaaaataaatgttagtacatgagataaagtggattatagcaatgttgttaaactgctggttgcaacccattgatgggtcctgaccagcaagtaaaagtgcagctgggtgccgtggtgcatgccggtagtctagctacttgggaggctgacgtaggaggatcgcttgagtccaggagtttaaggctgtagagtgtaatgatcatgcctgtgaatagccactgtgatccaacctggacagcagggagatcccatctcttaaaaacaataaaaatgaaatagagcatatcagagggccttgttcgtaggaagtcagtattgttttgtggaacatttagttgtatgcgtacatgcaggtatgtgtattgagtctcattttaaagtatatttcttactggggttatcagaaagtttgaaaatcattagactaggggataggtatgctgagattttagtagtagagttttacctggacaaattgtctactttgaacctgactgccggcctgagtttgttcagggaagattgtttctaatctatttgctttttgtttgtttgttttggtgacggagtcttactctgttgcccaggctggagtgcagtggtgcggtctcagctcactgcaacctccgcctcctggattcaagtgattctcctgcctcagcctcctgagtagctgggaatacagacgtgcgccaccatgtctggctaatttttgtatttttagtagagacgagggtttcgccatgttggcaaggctggtcttgaactcctgacctcaggtgatccgcctgccttggcctcccaaagtgctgggattacaggtgtgagccaccgtgcccagcctgtttctcatctatttgtgtaagaattccatgtttacttactctagataacttcaaaagaaaaaaaactctggccaataaaatgccataggaatgtttagggatatgtggagtaggcattctttctaagttttcctgaagatgcaccaatgtttaacaagaaaggaagggcagtgtagaacacctattgctttctgcatggtaagagggatgggtattgggagagcccacacctgctgaggagtgcctttagactttgagcggtggtgtttctctccctcccagaaatagatctctttggggagacaggccatacaagacgtgaatctggtgacattttacttgtttgaagcaaaatttttttagatgatggagggtttttaaaaattgcttttaaaattaaaatttgaatagataagaagtaatcactataaaaaataatgaagcataaggaatgctagtattagctgggtgtggggcactcacttgtagtcccaactactggagaggctgaggcaggaagaatgcttgagcccaggagtttgagtccagcctgggcaacataacgagaccccatcttttaaaaaaaaaaaaaaagaaaaagaatgctaatatcgtgaacatttatgttcccaccacccaatttaagaaaaagaacaatacttttgaagtccactgcgtacccctccttgatcccatctctttcccttctcttttaggagttaactatcctgattccttgctatgctttttagtgtgatccctgaagaacgtatcactccattttgcatagctataaatttcatagaaatggaatcgtattgcatgtgttgtgtgatttgctgtttttgctcatcattatattcctgggattatccatttttaggtttatgtgtgactgtaatttattgtttagatgaaagttttcctggtttgacttgctctatcttcatatttttccttaagctaagggttcagcatacgaaggcagtattggtggcacttctttaacagtaccccatctcttctcctagccttgagggctgcacctagatgaacttgtgaggctcatttgaaccttttggaagcaccgaagcctgctgaagtttccagacatctgtatgaatctgttgtagttttttaatgttatatgctgaatataaaaccaagtaactcctgctggaaacatttacaatatcgattaacaaatactatcagtggctttgacatttttgtcagtttcttgatttttttccccgcttttgtctccccttcccccctccacattttggggcattgtgctgttaatagattttttttctgttcgtttgtttatatacctcctgtttccttctgatgttaatagatttctgacagtcagacttgtccacaagaactcaactggcaaggctgcttttctgtgctaaaactggggagctagtgggcaccatgaagatcttctgcagtcgggccaatccgaccacggggtctgtggagtggctggaggaggatgaacactatgattaccaccaggagattgcaaggtactgggttggtttacagcaggctgcagctgggtggggcacttgatctcaaagcagatgccttgggctccagtctgagcgtgggctaggctgtcacccagtgcttatgatgagggctggtgttggtcctgagcaggtctgctcagccaggtaggtatatgtagcagttaggcaaaatcatgcctgtttggagagtcagacattatgtagcagccttagcagagcctcagcatctgtttaacggagcaaagaaaacccaagcctcagtagtgttgatgaagttgaatcatttacttgccttactgaaatggtgacatgttcatcatatggttaaattcttttgaatgaaaaaaatgaaaatggttttttttttcccttagaagaaatatttaaaagtatgtgagttgttggccaggcgcagtggctcacgcctctaatcctagcactttgggaggccgaggtggccagatcacctgaggtcaggagttcgagaccagcctgaccaacatggagaaaccccgtttctactaaaaatacaaaattagctgggcatggtggctcatgcctgtaatcccagcttacttgagaggctgaggcaggagaatcacttgagcctgggaggcagaggttgtgttgagccgagatcgagccattgcactccagcctgggcaacaagagcgaaactctgtctcaaaaaaaaagtatgtgagttgttatgtagcaatcattaagtgcattcagtgtgccagcattgtgctaaggctgtggataccagatgaagaagatcctgttctcatcttcaaggaccatgcagttttgtggaagagacaggcacatacaaaattacagcacaaaagccaggcacggtggctcatgcccgtaatcccagcactttgggaggcaaagggcgggcgggcgggcggtggagggggtggtggcggctgatcacttgagggtcaggagttcgagaccagcctggccaacacggtgaaaccccgtctctataaaaaaaaattagctgggagtggtggtgggcgcctgtaatcccaggtactcgggaggctgaggcaggaaaatcacttgaactcgggaggtggaggttgcagtgagccaaggttgtgccactgcactccagcctgggtaacagagtgagactctgtctcaaaaaaaaaaaaaaaaaaattacagcacagtgagataaaggcacaagaggtcatggaagcagcaagaaccagctgaacttggggtgggaggtaatgtttgaataatttctcagttctaaaggaagagaaggtgaagtttgagcagcagggattacaggtaagctttcagatgagccagattgtggctgggtgcagtggcctacacctgtagtcccagctacttgggaggccaaggcaggaggattgcttatgcccacgagttcaacatagtaaaacactgtctcacaaacaaacaaagaccaaaaacaggctgggcacagtggctcatgcctgtaatcccagcactttgggagaccaaggcgggcggatcacctgaggtcgggagttcgagaccagcctgaccaacatggagaaaccctgtctctactaaaaatacaaaattagccaggtgtggtggcgcatgcatgcctgtaatcccagctgctcgggaggctgaggcaggagaatcacttgaacctgggaggcggaggttgccatgagccgagatcgtgccattgcattccagcctgggcaacaagagctaaactctgtctcaaaaaaaaaaaaagaaaaaaaaccacacacacacagatgggctattctggggagcagctagcagtttagtgcagctggagtgtggtacaaaagtactatggtaagagaggctgccgaaagcatacgcggggtcattttgtaaagggtggtagcaaaatgcaggaagaggaacatgagtttaagtccaagctttgccacttctttactctcttggccaagttacttctctgagccttaatataaaataatatatacttcaatatagtaatacattatctcacagtataatacaattatcttagaattgtttgatgattaaatgtaatacagtatctggtgcagaattagggcttaaaatatttacttttttttctttttttttttttgagacagagtctcgctctgtttcccaggctaaagtgcagtggcacgatctctgctcactgcaagctccgcctcctgggttcacgccattctcccgcctcagcctcttgagtagctgggactacaggtgcccgctgccacgcccggctaattttttgtatttttaatagagacggggtttcaccgtgttagccaggatgatcttgatctcctgaccttgtgatccgcccgcctcggcctcccaaagagctgggattacaggcgtgagccactgcacctgcccaggtcttaaaatatttctaaacattttggacattattttcttgttttattgttcagatggagtcttactctgttgccttggctggagtgcagtggcgcagtctcggctcactgcaatctctgcctcccaggttcaagggattctcttgcctcagcctcttaggtaactgggattacaggcatctgccaccacacctggctaatatttgtgtttttagtagagacttggtttcacctgttggccaggctggtcttgaacttctgacctcaggtgatccacctgcctctgcctcccaaagtgctgggattacaggtgtgagccacagtgtcaggcctggacgttattttctgagtgatatattaaacaggagagaaagaggattggattgcattttggaacactcactgagagcggtgtggagaggagagcatttggggatattgtagtcccagagctgcatagtcccagaggagacagctcgggggaacttgagtttggtaactcactggatatgatggagggagagagaagattcaagaagcaccaagacttctggttagaatgacaaagtggatggggcctgcaagggaggaatgggtggtgtggggaggggaacacgatggagattaggcgtttaggtttggacatccacatagagatgccaatggcagatagaattttgggtctggagacagaatttgtagttgttggaactgaaactgggagaggttgcagtctctcaagggggtgtggaatgtgaaaggtagagggctgaagaaggaatcccggaatagctgaggaggcaaagaagggcaagggagatagccagcatggaaaggaagaaagagggagtgtgtctagcaaggtcagaggcactgggaagtcccagatactgatgactgacatcagctgcaggagtgagctggtggtggttaccgagagtgatgtcagtggagtggtgggcagtaagtgtgaagaggccaggaaggtggtgagtgagatgccttttaaatagtgagcagaggtagaaaggactacatttcagctaagcatccatagctggcttcagatataaaaccttgatgtgccattaaaaaaaaaaaaaaaagaacccccttctttcagtgcaccgctcttcaaagtgtggaatgtggaccacctgtggcacaattgcctggagcacattagcccagccttctcaataagagtgagagtgtgtgtgtgtgtgtgtgtgtgtgtgtgttctgggactctgcatttcaggtaagctttctagtgattctagtgttgacccaaggctggagggcctctgttttaatgtgagctccttagctgtccccttgaattcccagaaagcgtggcagggcctgcctagttctgggtgctcatcccgaccccgcctgagggttttcagtgtgtgaattactgcagtaggaaatatggagaagtgattctcctccctttactacggtattggtgaactctttagttttccctgatgatgttaagtgaacgtgcccagtggggtacctgtcacatatacagtgggtgtatgtgagtgcttctctttccccggctgctctccctaataccgcatcagtggttatctccaggcagagatgtaggccaggttaggtcaagtattaggcagattgagtctgagtttttcctgaggaggaaaatgtgtagtgtatagcaagatcaagatgctagtggctgtggaattactgtgacagggctaactgccgagaccagctcggtcgtggagaccctaacccagtggcgctagaggaattaaagacacacacacagaaatatagagtgcagagtgggaattggggggctgacagccttcagagctgacagccacgaacagaactttacctacatatttattgacagcaagccagtgataagcattgttcctatagattatagattaaaacgggaaacaaagggatgggctctggctagttatttgcagcaggaacatgtccttaaggcacagatcactcatgctattgtttgtggttcaggaacgccttaagcgaaagccgccctgggtgggccaggtattccttgccctcattccagtaaacccacgaccttcagtgtgggcatcatagccatcaacgagcatgtcacagtgctgcagagatttgtttatgaccagttttggggcctgtttttggccagatttgggggcctgttcccagcagctaactactggagcatttttaggtctgagaacatctttctctgagacttttttctgcagcactagagaataacagcttgaaactctattaaaataaagtggccaggtgcagcgacggatgcttgtattgtagttctgctgaggcaagaggatctcttgagctaaggagttcaaggctgcagtgcccaatgattgaggctgttcatagccactgcactacagcctgggtgacataacgagaccctgtttctaaaaataaacaaaaaaataggccaggcgcagtagctcacacctgtaatcccagcactttaggaggccaaggtgggcggatcagttgaggtcaggagttcgagaacagcctggccaacatagtgaaaccccatctctaatgtaaatacaaaaattagccaggcgtggtggtgagcacctgtaatcccagctacctgggaggctgaggcatgagaatcacttgaacttgggaggcagaggttgcagtgagctgagattgcaccactgtactccagcctgggtgatggggtgagaccctgtctcaaaaaaaaaaaaataaataaagataaaagacaaccaaaaaatagtttaaaatagatgacacgtttgttctatctgtttagcaatgtgtttatatatgtgaatactcttgtgtgttgatgtgtatcatgcaaaggttactgacttttttgttttttaggtcatcttatgcagatatgctacatgacaaagacagagtaagtgtaaaaggaaactattatcttgatgtggggtgttttgaagtcttggattacaagaaggttaagaatccctgggggtcatgatgttaaatgatactgagaggcgtatggtgtagaagtcaggaaatcagttgggagactgggtcctacttctggctctatttttgttgtttaatctcccagctttatcaagatagaactgacaaataaaaatggtctatgtttatggtaatacaatgtgatgaatatatgtgtatggtgtaaaatgattgaatcaagctaattaacaaatctaccgcctcatacttttttgtgtgtggtgagaacatttaagatctactcgcttagtaatttttaagtgtacattattaactatagctcacaatgccgtacagcagatctccacaacttattcatcctatctgactgaaacatcagatcctctcccttagcaggtaccattctctgggcttctgagttcaacatttttttttttttttgagacagaatctcgctctgtcactcaggctagagtacaggggcgagatctcggctcactgcagcctcagtctcccgagttcaagcgattctcctgcctcaacctgcctaagtgttgggattgtacctagtattgggataatactattattatactattatacctagtattgggattataacttgggattacaggtgcgtgccatgacacctggccttcactgtagttttaatttccatttttaattttaattttatttttttgagactgggtctctgttgcccagtgcagtggtgtgatctcggctgcactgcagcctagacttcttgggcttaagcgatcccccaacctcagccttcccagtagctgggactacaggcatgccaccatgcctggctaatttttgtatgttttgtagaggcagagtttcgctgtattgcccaggctggtcttgatcccctgaggtcaagtgatccacccgccttggtctcccaaagtgctgggattatgggcatgagctactgcgcccggccatcgtgtgcttgtttaccatgtgtatatctttgttctagtctagggttatgaacataggtgtgattcttgatagacactgccacattgccttcaaaaagggttccagattcactgtaatatcttcaaaactgggtcattaaaaagtgacagctaatttaatggcatcgttaaagtgaaggctgtgccatccctggtttacaattgaggacgctgttcatcaattttttttaacttaaaaaataaataaaacaaggccaggcacggtggctcatgcctgtaatcccagcactttgggaagccgaggcaggcagatcacggggtcaggagatcgagaccatcctggctaacatggtgaaaccccgtccctactaaaaatacaaaaaaaagccgagcgtggtggcgggcagggcctgtaatcccagctactcaggaggctgatgcgggagaatggcgtgaatctgggaggcggagcttgcagtgagccgagattgcaccactgcactccagcctgggcgacagggagactccgtctcaaaaaaaaaaattgtggtaaaaacacataacataaacggtcatactgattgtatctaagacataaatgcacttactttgacaatgaaatagttctatatttctgtgaaaaattatttcacccagactaaacatttttgtgctttacctcagaggcaacgtcatttcttttttttcttttttctttctttctttttttttttttaacaagaatgagtctccctctgttgccaggctttagtgcagtggtgtgatcttagctcactgcaacctccacctcccgagttcaagtgattctcctgccttagcctcccaagtagctggggttacaggcatgcgccaccatgcctggctaattttttgtatctttagtagagatggggtttcaccatgttggccaggttggtctccaactcctgacctcaagtgatccacccgcctcagcctcccaaagtgctgggattacagatgtgagtcactgcacccggcctggtaattctaaagaatattcagttctagatattttctaattccagtctgatttagtcttttgcctatcagtttagaagtgtgtttcttaatgtatgaaaaattttttttcttcagttgtgtttctgatattaagatttttgacttgttttgcattgtggtcagaggatatcacccttttgatgccagttctgtattagctgtctaatgttatttaacaaattaccttaaattttaatagcctcttaatatttcttactaacttggcaggtcatcagtctatttaaaagatttgcacatattttttccatcatctttagttattttcaacagaagggtcactgtgcctattgagtcagaccgttatagatgaaagatgtatgtgtttactaaagacagaagtaaaaatcttcaagatgcaaagaagttattttctgatggggaaaatactttttagtgaagctctctgagttagagtcggtaaaggaaaacaagccatacatattgcagcagagcggctttaacacaaggagctggctacccagctgtgggagggctagaaagcaaatgggaacgctgagtaacctaacagtagagattgcagggagcagttaccttgcctagggctgagaaactaaacgagaagattaggatttccagaagccacaagcattgaggagagatcctgtggaccactgtccaagtacggctgcagctctgaggggcccaaggagctggttatgggatcattgggaaaagttggagtctgcaatcaactgcccctaccgagaggaccctgatgagaacagcagcatgcagaaaggagcaagcctgctctgtcctcctaccttccagtcgccctcttggtcccccttttggctgtacctaacagttggaaaaaggagaacatggtttgcagggctctggcatcacttagtagaggatagaagagtgagtgtggagcagggacagtcgcttaataaagggcaaggggctgactcacaagacctgcccaactcagccagagctgttctgccaggggccagaaaggccatagggccctgacttgcactgccactgccagctgtgactctagaactttgcaaagcacctttccacttacttataataactggtagtaagtgacggccatgtcttccttagaatgtaaaatactaccaaggtatccgggctgccgtgagcagggtgaaggacagaggacagaaggccttggttctcgacattggcactggcacgggactcttgtcaatgatggcggtcacagcaggtgccgacttctgctatgccatcgaggtaagccattcccttcaggtgtgtgtcctgcatcttgcatgggaaatcccctatgctcttgcactttccccgtctgttccttcacaaacattcatggagtgctcactctgtgccaagcacagagccaggctctgagcgtatagagatgagtcagacacagttccttcctccaggagctaattttctcctctgtcagcctaggctgcacatcagaatcactaggagctttagaaaatacttacaggctgggcacagtggctcacgcctgtaatcccagcacttcgggagggtgaggcaagacaattgcttgagcccaggagtttgagaccagcctgggcaacatagtgagatcccatctctacagaaaaacttttaaatattagctgggcatggtggcatgtgcctgtgttccagctattcttgaggctgagatgggaagatctcttgagcccggaaagtcaaggctgcagtgagccatgatttggacttcatgtaagaaagcaaaaaattacttctaccttgtttaagccagttattgtgggactttgttgtttccaactaatcagtatatgaactcagttttgtaggggaaagtatttaaatacatgcccccacaccaccacactccagcctgggtgacagagtgagactttatctcaaaaaaatcaaaacgaaacaaaggctgggcacagtgtctcacccctgtaatcccagcactttgggaggccgaggcttggatcatgaggtcaggagttcaagaccagcctgaccaacatggtgaaactccatctttactaaaaatacaaaaattagccgggtgtggtgatgcgcgcctgtaatcccagctactcaggaggctgaggcgagagaatcgcttgaacccaggaggcagaggttacagtgagccgagattgcgccactgcactccagcctgggcgacagagtgagactccatctcaaaacaaaacaaaacaaaaaaaccttatgcctagtccccagccctaacagattttgatttaacttttctggggtgaggcctgagccttgggacttgggaatgtgcggcaaggttgagaaccactaccttaaatgtccctatggagtcagctctcttatgtttaccaatttgtcatttctttaataaaacattaaacagcttgagcccacagagcaagaaaaattaaaaaccaaacaaaattaaaaattaaacatgttatttttctcataaaacaaataatgcatattattataggaaatttggtaaataccaaataaaaatagtatgttgacccaaagttaagtactgttaacattttggtgtatattcttccaagttttgggggcaggcagggagcatgtatataaatactttccctacaaaattgggttcatgtagtgattgagttggaaataacaaagcctcaaaatcactgtggtttaaggtagagtagttttttgctatctttttcgtggcgtgatctctattcaccgcaacctccgcctcctgggttcaagcaattctcttttctcagcctcccaaatagctgggattacaggtatgtaccactgcacctggctaatttttatatttttagtagagatagggtttcgccatgttggccaggctggtcttgaattcctgatctcaggggatccccccacctcagcctcccaaagtgttgggattacaggtgtgaatcactgcgccctgccttgttcctcttttttaaaagtaagaataactttcccaggaatttctattatagcaaacctctccttgggtaccatcggctagaatgaggttaaatctcatttcttatctctggcaagagggattcagttactcttagctcagacaagtgcaccactgcaaaggtcagttccccacgctgcaccctcacctgatttcaggggagaggaggacacagaatggatgtcgggaggtcatcttcagtgtccactcctggtagtgttttgggtgagatcttgagcttcttgatgggctgaggagaaggaggtgtgaaggtaccagcttgcaggttcagggagaggtgactgatgagtcagaaggcagcaggggtgagggacgacactggctttggatattgtcagggtggaggcaaagtgattggtgagaactagggtttaaggccctcaaaccacatctaaaaacatcaaggcaaatcctagaaataatttgaaatagatgatgaagatttttctaggagaacatgtgtgtgtattccatgtaaatactgcgcgctaatcaattgcacaactggagctgctcacgtaagtactctttacgaaaggatacagcatttgtcccttgattatagtaaaaaatatagtattcatggtagaaaatgtgggaaatacagaaaaggatttagaaaaaaggaaaatcttatcaggaacagtctcggtatcattttgtggtttccacttcgtgtgtagggccacacgtgagtctgtttgttttacatgctagagctcttggggctgtggaatctagactggataagttgaaaacaaagagttggaggtgcttatttatgttcagggaaactcgaagagttcagggaagacttctggatgggggattcatgctgccctgggaagtggggtttgatttggcaggtggggccaggatagggaaggctcagtgatcatgagatcattgtggctggagtgttggttgttgggggaatgggggaggaagactgggaaggtaagggagggcctccaaagcagtagtttccccttatctatggtttcacttttcgtgatttcagttacctgtggtcaactgaggtccaaaaatactaaatggagccaggtgcggtggctcacgcctgtaatcccagcactttgggtggctgagacaggtggaaaccttgagtcccagagttggagaccagcctgggcaacatggcaaaaccccgcctctacaaaaagtagctgggcatggtgatctacgcctgtagtcccagctacttgggagattgaggtgggaaattgcttgagcctgggaggtggaagctgcagtgatcatgccactggactccagcctggacaatagagtgagacccttctcaaaaaaaaaaaaaagaaaaattaaatggaaaattccagaaattatttataagttgtaagttgtgtaccattctgagtattattacataattgttctatttttagttattgttaatttataaattattatttatatttattattgtgcctaatttataaattaaacctggtcataggtaagcttggaggctgaagcagctccactgtgaatgctaatcctccacgctgacttctgaccaaccccagcttcaggaatgcctctaaaatttccgctctcatgcactttgatgtaaatcctgccctcaggtcagaacaactttgatgttatcataaatacatacttaccgtaaatcctgcccttcgtcaaattccctgtggtatgtaagccctgcgtctgagccataacagtgtgggggcccagtttctcactgcccgagacaaggcttctgtttgtatgtctctataaagtgtgtctttctgagaagctggatttgccagtctttcctcagcctctcagctcccgtggcctgttggggtaggtttgcatagagctgcccaccatggaacagtatgtatgtatagcaaaaaaaaaaaaaaaaaaaaaatggtatacataagggtcagtactgtctgaggtttcaagcatccaccaagggtcttaaaatgtatcccccatggacaagaggcactgctgcaccataagaaaatagaggctgtgttctgccaacagtggggatttgggacaattttgagcccagaggatgacctacttactcacacctacagtctgctctcctctggagggcacagcacgcctcccaggttcgtgaggcaagtccctttcctggctttttggcgtcctcttgtgcggtactgacacctactgctcttactaagtagtgcagcctcctcaggatccccggcatccccgctgtgcctggcacggaatgagagtccctaatcacaagttaaagccagctgaatctcagccctttttcatgatgcacatttggagaataaagtatttaagttacatatcttaggaccagaatcaaggaatagcttgctcaccttaaaggtcagactactgtttaatttattgctcatttttccttgggtttcggctctattttctaggttttcaagcctatggctgatgctgctgtgaagattgtggagaaaaatggctttagtgataagattaaggttatcaacaagcattccaccgaggtgactgtaggtccaggtgagatttacacaccctgtgttgaaagctttgcttgctcttgtgtgagagaggaaaagggttattccagttacctggaacaaatccaggtcatagcatagaagtgggacctctctgtgtggagctctgacagtaaggacttggtttctcttgatgtttattttcctgctagttaaaactagtcaacaaggagtagactagagctagtcaggtccagcaatggagacgcaaacaaaacctacatttgctttaagcaaattggaattcttatggggctcaactcttgagtttcaactaccaataattacgccttggataaacctcattggctacgatactgccactgctcaaagctcaactctgagtttcatcaggcagaaagtacttagttcttttatttatttatttttttgagagagagtctcactctgtcgcccaggctggagtgcagtggcgctatcttgcctcactgcaagctctgcctcctgggttcacccatcctggctaacacggtgaaactctatctctactaaaaatacaaaaaattagccaggcatggtggtgggcacctgtagtcccagctactggagaggctgaggcaggagaatggcgagagtagttctgacattctgcttctgcatacaacatgaacaattttcctgtatagcattgtctcttaaggtttccagaatatgtatatgtacacacacacacacacacacacatattttttttttgagacggaatctcactgtgtcacccaggctgcattgcagtggtgcaatcttggctcactgcatcctccacctcctgggtacaagtgattctcctgcctcagcctcccaagtagcggtgattacaggtgcctgccaccacacctggctgctttttgtatttttagcagagacggggtttcaccatgttggccaggctggtcttgaacccctgacctcaggtgatccgcctgcctcagcctcccaaagtgctaggattataagcgtgagccaccatgcctggcctccagaatattttttatagtctagaactttgtttcagtctttgaaaatttcacatgccactgacacttagagaacatagttgaaagatttgcaaaggaaaaactgtggtgaagttatggataacaccatgggttttttctaattttttgtggagatagggtcttactatgttgcccaggctggactcaaactcttatgctaaagtgatcctcccatctcagcgacccaagtacctgggactacaggtgtgcactactgcacctggctttttcaccacggttttggagaatgcagtatcattctgaattgaagcttctacctaaggtcaacattattctcccatttaacaatttttttttaatggagaatctgaaacatgtacaaaagaagtgggtactatcttatttatttatttatttgagacagagtctcactctgttgcccaggctggagtgcaatggcaggatctcagctcactgcaacctctgcctcccatgttcaagcgattctcctgcttcagcctcatgagtagctgggattacaggcgtgcaccaccatgcctggctaatttttgtatttttagtggagacggggtttcaccgtgttggccaggctagtcccgaactcctgacctcaggtgaccagcctgcctcggcctccgaaagtgctgggattacaggtgtgagccaccgcgcccggcctatcttttttatttttaaaatatacaatagagtgctcaaatcattccatttacaatcaacgttattgaagtatgatttacattaaatgaatatccattttcattatggatatttgacaaatataaacacacttgtaaccaccatcaccataatgaagataatagaacatctccatcatgcccaaagagattcctcataaccctttctatcagtccccccatatcctggtcctaggcacccactcatagacttcattatagattagatttgcctgtctaggatttcaaggaagtggaatcaaagaagtgtggactcttctgtgtgtgtgctctcttttttatagcgtgatgctggtaagattcttccacactgttcatgtcttgggggtccgttcttttgtgttactgagcagcactctattagatagatgtaccataacttgtttatctctctacctgttgatggacagggatttcttggataggtctttagattcactgatcttttcttttgcagcatctaatatgctgttaagtatatttagtaaacttttcatttctctttctttgttgttcttttttttttttttttgagacaggatcttgacctgtcccccaggctggagtgcaggggtgtgagcatggcttattgcagctttgacctcctgggctcaagcagtcctcctgcttcagcctcctgtgtagctgggaccacaggctcatgccaccatgcctggctaacttaaaaaaaatttttttttgtagagatgggatctcagtttgttgcttaggctggtctcaaactcctgggctcaagcgattctcccacctcagcatcccaaagtcctaggattacaggcgtgggccgctgtgcctggcctcatttttgatattgtattttttaatctctgaaagttccacttgattctttttcataacttccatttttctcatgttcatagttttctataagcacatttattttagctttttgaacatccttatcttctgttcccaccatctttgttttttctgggtttgttctcttgactcatttttatccttattctgggtcacattttccttcttcacatgtctaaccatttttgtttggatgctgtggctatttggaattccccattgttgagtgctagacttcgttggttttgctttttaaactttggcatgcagttgggttacttgcagttcagattgatcctttcagggcttgtttaagctttctttggagtggggttagagtagctttaagtcaggccttctcaacagtagtgctgtgacgttttggcattctccaactatgtgacattttgataattctttgttgtggaccctgtcctttgcattgtaggatgtttagcagtgtccctggcctcttcccagtggatgtcagtagcactcccctcctcccaccattcttgccaactaaaaatgtctccagactgccacgtcttccttggtctcgagtgtgtaaaattgccacctgttgagaaccactgctctaaggctgtttagccagacagttactgtaacctttctggagtgtctgctgagagctctaggtgctcagcagggtttcccttgtctggctgatcagaacttgaatgtttcccaggcctctgagagctccggagattgttatcactcatgcaacctttgctcggcttcacagagtattaccctgtgtgtgtgtgaatgtattaacacagaccctagaggaaccctgtgcagcattctgaaggctttttttctgtgtaatttcctctctgattctctgcctggcaagttccagctgcttccacttccctgaactcgtttcctgtctgtttaactcagcaagactgccgtgctctgtgtcacctcttaccctatactgtggtctggaaagggtctcctggctgatagccagagcagggtaagggttacttggtttgtttcccttcttagggagcaaactgtgttgcctcttgctcaacatctgaaaacacttgtttcatatattttgcccagttttctagttgataacagccggagggtaagcctgatcccacttattccactatggccagagtggagattgattcatttatttatttttttttgagacagtctcactctgttgcctaggctggagtacagtgatgcgaacacagctcactgcagcctcgacttctgggctcaagtgatcctcctgcctcagcctcctgagtagctgggaccacaggcaggcgccaccatacccaactaatttttttgtttttttaaatttttattagaaactaagtcttgcggctgggtgcagtggcttatgcctgtaatcctagcactttgggaggccgaggctggcggatcacctgaggttgggagtagcaaccagcctgaccaacttggagaaacctgtctctactaaaaatacaaaattagtcaggtgtggtggtgcatgcctgtaatcccagctactgaggagattgaggcaggagaattgcttgaacctgggaggcaaaggttgcggtgagccgagattgcgctattgcacttcagcctgggcaacaagagcaaaattctggctcaaaaaaaaaaaaaaagaaaagaaaagaaactaggtctcgctttgtttcacaggctggtcttgaacgccaggcctcacacagtccttctgcctcagcctcccaaagtgctgggatcacagatgggagccactgtacctggcgagatcatttattcttgaaaatttatccattttgacggcagggagactgatctgcagggcagccttggccatgaagtatgctgactctgcctccaggcagcattgttcacacacacctcagcttaggccaggcccctcatatgatttcttattaaaaaaaaaaattttttttagatagagtggctctgtcgcccaggctggagtgcagtggcatgacctcggctcactgcaacctccacctcccggattcaagtgatccttccacgtcagcctcctaagtagctgatattacaggcatgcaccaccacctggctaatttttgtatttttagtagagatggggtttcactatgttggccaagctggtcttgaactcatgacctcaagcgatctgcctgccttggcctcccaaaatgctgggattacaggcatgaaccaccacgcctggccaatttcgtaatacttttcttcatagcgcttaccactgcaatcattaaatcattatgtagttatgtatttaatgtctgtatccccacccagctgaggcatcctgaggtcatgcactgcgtgggttgtattaactattccattccgttatttgctccgggcctgtcatgtaaaggagttaggtaatttttgtaaagtgagtagattgtcagttgtgcttcatccataatcccttgtaaatgtgactttgtttccgatcctcagcctgacaagtggcttcctcattgccaagttgggtggtctttcctctgcttttcctctctaaccactgccgctttggtacttctgccattccttccttcttgaaactctccctggaccttagtgacatctcttcatcttggttctcctgtgttgctttctttctgctccagatgtatactttccaaggttctgctctcagccctttttaaaagtggcatctgaagttgcctgttccccagagctgggttacatgctgaggcttgtggagagccaacccagggagcagcgtgtgttcatccgtccattttgttcatttggaaagggcttaggaagctcctggggtggctacctgcttcagactcccccaccccgtgcccttatacattagcagtcacactcaaaataccaggccctcaagaagtacttgttaaaatgcactggaccataaagcttgaattttttttttttaatttttattattttttgagacagtctcactgtatcacccaagatggagtatggtggggcaatttcagctcactacaacatctgcctcccgggttcaggcaattctcatgcctcagcctcctgagtagctgggactacaggcgcgtgctactacacccggctaatttttgtatttttagtagagacaaggtttcaccacattggccaggctggtatcgaactcctggcctcaagtgatcagcccagcttggcctctcaaagtgctggaattacaggtgtgagtcactgtgcctggctcttgatttttattttaatgaagcaatttggactataaagcattttaagttatataattggtttaaacattcaggagatagaattggcagagtgggtgatcagtgggttgtagggtgacagaaatcaataatttatctaatgtgtgttgactgttacggggcactagaccttgtgggtgctggggtacagtagtggacaggcagtcagcggtcctgctgtcctggaactagtaaatgatgcccagattcctggactatgtgactcattgattgattgaggcagaaaccctggagggaggagcaggcgtgttagctggggtgggtgggatgagttttggacagtgtattccagttggagtttgatgtgacatcagagaggatgggcagggcttctcgggagggtggtctctgtggcagaagacagaagtttcttcttaagctcctccacgtgatactgtcatggagcacaggtgagcttcataggaagtgtgcttttttttttttatcttcatcatcccgaccaccaccacatgagacagagcccattcacccgttttactgatgaggcaactgatggtcagaacggagggctcagggataggaagtgagatccaggccaggctccagcctcgagctcgaggttcacgctgtctctgttgtgctcttctatcagctgctctctttcttttttttttttttttgaaatggagtctcactctggcccagattagagtgcagtggcgtgatctcggctcactgcaacctctgcctcccaggtttaagtgattctcctgcctcagcctctcaagtagctgggattacaggcacccatcaccacgcctggctaatttttgtattcttagtagagacagggtttcaccacgttggccaggttggtttcaaacttctgacctcaggtgatctgcccatctcagcctcccaaagtgctgggattacaggcgggagccaccgcgcccggcccctgtcagctgctttcatgcttctcttttccttgtgtcatctgtgagacttgtgctctgtgtaggggaaatgagtgggctttgtcagattataattcatgaggcattaaaagtgtttacagttaattctccctgatgaatagccccttccaaagtctattttggctcttggctcattaaaaattataattgtagaagtagcagtacattactgaggtttagaaaacagttaacagaagatccctcccaaatcctactcttctctaaaatcctactgtcctaaaacaactgttatttaagagattgtttggtgacaaggcgctttcattaagggaatttgccatagtgatctggggattctaagtcatggatctcaattttggctgccagagcctaactcacagtagctggaagatcatcagagaaccttgttgtcttgctttggctttccctccctctccctgcaacctagaagtatttgacataccagcattctgtttttgcttttcaaataatttttctaatttagtggttaatagtttaattgttaatttatatctctctaattgctaatagggatgaaaaagttttcataagtttgatttctgttttgaattttctgtttatatttttacctggtttctttttgggtgtgtgttttttttgtttgtttgagacagagtctcactctgtcgcgcaggctggatcactctgtcgcgcaggctggagtacagtggcacaatttcggctcactgcaacctctgcctcccaggttcaagtgattctcatgcctcagcctcctgggtagctggggttacaggcgtgtgccatcacacctggctaatttttgtatttttagtagagatggggtttcgccatgatggccaggctggtcttgaactcctggcttcaagtgatcctcctgccttggcctcccaaagtgctaggattacaggcgtgagccaccatgcctggctaatttttgtattttttgtggaaatggggttttgtcatgtttcccaggctgatctcaaactcctgaactcaatccattgggtatttatagttttcttatcattttttgcagtctccctcccaatattaagcatacagaatagctgtaagagcagtacagtaaacacttatgatcccttaccctagatttatcaattagcgttttgtcatacatttacatatggattttttttttttcctgaaccattggcaagtcagttgcagacatcctgacacttctgaatacctcagcatgtatatgtgcttttagcgtgatggccccttaaccacttatctttcccatatttgctgtaaatatttttcctagtctgttgcttatgtccaactctgttttcttgtgtttttcagagggtgacatgccatgccgtgccaacatcctggtcacagagttgtttgacacagagctgatcggggagggggcgctgccctcctatgagcacgcacacaggcatctcgtggaggtagtagacggagggctccctcagacgtgtctgtggtctcagccagctcacatagcactcactcatgcaccgtgtcccacacagcccaagccctcagcacctctgatacacctgggacacccctccattcctgggggggctctggttctcctcacttaaaactttcatgtcccttgaatgccaaatcttaataggttagagttgaaaagcaagaaactatattcaaattcagttaagttcagcaaatattctcaggaaggcgatgcttgagctgtcagtcttgagaagtgatcaggtgttggcctggcagatggaatatttctggtagaggagagcagcacgtgctagacgtgagactgaatcggtgcggtggctccggagcctgctttggattttgtgctgtgtgggaggcaggagagatgggcttagcaactgaggctagagagctgggcaggggctagatggagtggggtttgggggccatgcccagagggtagctgtcattagaaggtggggtggcatcacaggagggtttgaagcagaggattgacagcagacttatgcaggcagatgtgtggagggcagttggggtatagggctggaggttgcgggtgggttaaaaggctgtggaatcgtccagacgctgtggtacagtgggcctcagctaaggctgtagacagaggcctgataggtggtcccaggagttggtggtcccttaggtgtagagatatcgatgctagggtttgggcacctggattggatggtggtgcttcctgttgacggggagtgcaggaagaggggtagccttgggaaggttgggaagtggtgagggcgattcttctggtttacacagagtttgagctctctaaaggtcagccaagcaaagaggcccagagatgcatggatttactcagtgaagagggcatggttgaggtcactgtggagagtgtggagggagacagtccggaccagggagtccccttgtgaggtggggcggaggaagcacagcctggggaaggcagcgggagtgagtccagttagagcagcatttgtctaccagagcaaggttgggagatgcttcgcagggaggccagttattctgctagccttttaccatgcccagagcaacccctacagcagagaatcatttggcccaagaggccagtggtgtcctggtggtgaaagccatgtgggtagcagctgtgagtgtgctcttgccgggtccctattgcctggtgcatggaggacgtggagtggatgcaagaggtaggaggagagccggacaaggagccggagccggagccacagccctaggggctgagtgtgcagcagtgcccagcggcgctagagggctgggcagctgagggggcaccgtggtccacagggctttgccacaaggaggctcttgttttggtgctgggcaggagcggcactgaagggacactgagcccagagccaggatcaccacccagcagcaggacgtgaagcatttaagagtgccaggtagccaggaacttagctgacagaagtcattttaggcacagtgtgtgttctttttgaaatgtagtaccctttttttcccttttccaagggcatagggctgaaaacagttcactattctaatagtataaggtgttgggcattactgaaccaacctaatgttaaggaataaacctcttttgatcaatgggaattactgtgggtctaagcatctgatttttgtttggttttgtttttaatataaacttaggaaaattgtgaggccgtgccccacagagccaccgtctatgcacagctggtggagtccgggaggatgtggtcgtggaacaagctatttcccatccacgtgcagaccagcctcggagagcaggtcatcgtccctcccgttgacgtggagagctgccctggcgcaccctctgtctgtgacattcagctgaaccaggtgtcaccagccgactttacagtcctcagcgatgtgctgcccatgttcaggtaccaaggagccaccataggtgatggcgctttgagacatttgatggaagttgggtattaggaggttctttttgagtgggaaggaaatctagctgctgtcacctgcctcgaaggcaagagtcctttgcagccaaatgtcattgccagtgaagtcactgtaaaagcttaaaaaatggagtgtgtgaggttaaactctgcttacattcttgaatattattcctcagcatagacttcagcaagcaagtcagtagctcagcagcctgccatagcaggcggtttgaacctctgacatctggccgagctcaggtggttctctcgtggtgggacattgaaatggaccctgaggggaagatcaagtgcaccatggcccccttctgggcacactcagacccagaggaga

SEQ ID NO: 13534 - DNA, 1011 bp, Homo sapiens
gtagcagcggaggcgagcggagggtttcccgcggcgggtgaggcgctggagtctcactctgctgcctaggctgagtgcagtggtgtgatcgaggcgcactgcagccttgacctcctgggctcaagcgatcctcacctcggcctaccgagtagctgggactacaggcacgcgccactacactcgggtcatcttatgcagatatgctacatgacaaagacagaaatgtaaaatactaccaaggtatccgggctgccgtgagcagggtgaaggacagaggacagaaggccttggttctcgacattggcactggcacgggactcttgtcaatgatggcggtcacagcaggtgccgacttctgctatgccatcgaggttttcaagcctatggctgatgctgctgtgaagattgtggagaaaaatggctttagtgataagattaaggttatcaacaagcattccaccgaggtgactgtaggtccagagggtgacatgccatgccgtgccaacatcctggtcacagagttgtttgacacagagctgatcggggagggggcgctgccctcctatgagcacgcacacaggcatctcgtggaggaaaattgtgaggccgtgccccacagagccaccgtctatgcacagctggtggagtccgggaggatgtggtcgtggaacaagctatttcccatccacgtgcagaccagcctcggagagcaggtcatcgtccctcccgttgacgtggagagctgccctggcgcaccctctgtctgtgacattcagctgaaccaggtgtcaccagccgactttacagtcctcagcgatgtgctgcccatgttcagcatagacttcagcaagcaagtcagtagctcagcagcctgccatagcaggcggtttgaacctctgacatctggccgagctcaggtggttctctcgtggtgggacattgaaatggaccctgaggggaagatcaagtgcaccatggcccccttctgggcacactcagacccagaggaga

SEQ ID NO: 13535 - DNA, 1723 bp, Homo sapiens
tagcagcggaggcgagcggagggtttcccgcggcggatttctgacagtcagacttgtccacaagaactcaactggcaaggctgcttttctgtgctaaaactggggagctagtgggcaccatgaagatcttctgcagtcgggccaatccgaccacggggtctgtggagtggctggaggaggatgaacactatgattaccaccaggagattgcaaggtcatcttatgcagatatgctacatgacaaagacagaaatgtaaaatactaccaaggtatccgggctgccgtgagcagggtgaaggacagaggacagaaggccttggttctcgacattggcactggcacgggactcttgtcaatgatggcggtcacagcaggtgccgacttctgctatgccatcgaggttttcaagcctatggctgatgctgctgtgaagattgtggagaaaaatggctttagtgataagattaaggttatcaacaagcattccaccgaggtgactgtaggtccagagggtgacatgccatgccgtgccaacatcctggtcacagagttgtttgacacagagctgatcggggagggggcgctgccctcctatgagcacgcacacaggcatctcgtggaggaaaattgtgaggccgtgccccacagagccaccgtctatgcacagctggtggagtccgggaggatgtggtcgtggaacaagctatttcccatccacgtgcagaccagcctcggagagcaggtcatcgtccctcccgttgacgtggagagctgccctggcgcaccctctgtctgtgacattcagctgaaccaggtgtcaccagccgactttacagtcctcagcgatgtgctgcccatgttcagcatagacttcagcaagcaagtcagtagctcagcagcctgccatagcaggcggtttgaacctctgacatctggccgagctcaggtggttctctcgtggtgggacattgaaatggaccctgaggggaagatcaagtgcaccatggcccccttctgggcacactcagacccagaggagatgcagtggcgggaccactggatgcagtgtgtgtacttcctgccacaagaggagcctgtggtgcagggctcagcgctctatctggtagcccaccacgatgactactgcgtatggtacagcctgcagaggaccagccctgaaaagaatgagagagtccgccagatgcgccccgtgtgtgactgccaggctcacctgctctggaaccggcctcggtttggagagatcaatgaccaggacagaactgatcgatacgtccaggctctgaggaccgtctctctcctcctgggcgagccgttcttcactaccagcctgctgccgtggcacaacctctacttctggtacgtgcggaccgctgtggaccagcacctggggccaggtgccatggtgatgccccaggcagcctcgctgcacgctgtggttgtggagttcagggtaggccacccaggggatgttggagaaaaaagcagaggaggcgggtggggaaccttgttttcttgcaggaaccttgggtgcctgtagagcggctcaggccttgatgatttgagcttgtgttttctttctgtgtcagcacactgtggggttgaatagaagatgcttgccttttaaaaaatgcgataatttgacatacgaaatggaaatggctgagtgttgtcattttacaattgtggcttatcagaataatt

SEQ ID NO: 13536 - DNA, 13751 bp, Homo sapiens
ctcgacgctgcgaggtcccgccccgcgtgctggccgcggtaaaagtggtagcagcggaggcgagcggagggtttcccgcggcgggtgaggcgctgggtatgctgggaaggtggggtcgctttggggttctgtgtgcagcgagcatggtgtccttggcaccagggtttcggcagaggagcctagcgtgggcctacttggactcctccgcgtggggcagctcgggacacccgggcctgcaggagagcggggttctaggctggccccggctctgcagtgcagccgggtgcctgccactcgcggggctctgtcgcagtactcgtgcctggcgcctcccctcagccacagagaccgcagtagctccaaccatcgcacccctaactgggccacgagttctctgattgccagacctgttgtctttgccactcactgttctgagtaattggagagtcgtgtattcactacacgccaaccagagtggtcctgtaaaagcgtaagcctagtgtagatacgcttctgcttaaaactcttgagtggctcccagtgcttttagaacaaaatccaaacgcctttccgaagtcgacaaggcccagcttgattgagcagaagatgtgataggagatgaggagcggggggcttctgcaaaagtgcttcggtcgctcaggcttttggcacattttgcttatgcaacctagttctttctaccttagggccttttcttgggaaagttggggtaaggattcctgacctgtaaaaactcttccccaacttttatcccggtctgtcttgtagatctcaaatgctagtttcctcagagtccttctgtaaccttggttttctctttctacaacgctctgtgtatttcttgcattcatgtagtctgtaatttgtattactctctcattagagtctaagctcttggagggcaagggtcttctctagcttgtggtggtggctccagtccctaatatagtgcctggcacatagaaggtatttaataaattttgttattttattttttcgagacagagtctcactctgctgcctaggctgagtgcagtggtgtgatcgaggcgcactgcagccttgacctcctgggctcaagcgatcctcacctcggcctaccgagtagctgggactacaggcacgcgccactacactcgggtaatttttaattttaatatatgtatatttatatatatatatatatatatatatttttttttttaagacagggtctcactctgtcacccaggctggagttcagtggcgccatctctgctcactgcaacctctgcctcccgggctcaagtgattcccctacctcagcctcccgagtagctgggagtaactgggactacaggcacaggccaccgcgcccggctaatttttttaaaaattttttgtagagaacggggtctcactatgttgcgcaggctggtctggaactcccagactcgatatccttgcgtctcggcccctcacagtgctgggatcacaggtgtgagccaccaccgcctagcaaatacattttgaatgaatgtagtggaccatctgctctgcagtctgacggctaatacaattagggcttggcatggtggtttctatttcctccttgtaaatggccatgcaagtttacaactcttggagaatgaggaggggttcagagaatatctcctgaatctgtagtgtagactgcttctgggagagaacaaataataatggatgagggcattcagccagagaaggtgtgtagtgcccaccagaagaggttcatgccttcataaaattgttaacacaagacatagttccaggtttgtttgtttgtttgagatacagtcttgctctgttgcccaggctggagtgcagtggcgcgatcttggctcactgcaacctctgcctcccaggttcaagcaattctcctgcctcagcctcccaagtagcagggattacaggcacctgccaccatgctggctaattttttgtatttttagtagagacggggtttcgccatgttggccaggctggtctcgaactcctgacctcaggtgatccacctgctttggtctcccaaagtgctgggattataggcgtgagtcaccgtgcctgggctgttccaggttttgaaaagacactgtggtcctggttttagactcagcaacatcacagacaagaaaggaatcctatggattaaagttcttcactataagttttttttttcctccagttcaaatgggtaacgtgccaatgtagtaaaggtttgagggaggcacgtctgacacaggcacatgaacacccagtcatcacgcttatgaactacaaaacgatgactcttaaccttgaagtgacttcagaattgattccacatggaccacaggattagtatttcaggactctaccatatggatcctattgatatgtttgacacctggtccagttttacttcactaaactgattgatataatgtgcatgattgtctaagcctttctaattggatgaaatgccttctccgtccacaaccccctccttctcctcctgcctcagctgaatccaccttttaagccttccttgaacattcagtcagatatggccatttctttctctactccaacatttgttggacacagttttctaatgcacattacagattctgacagttctagatattctgtctgtaaaataaatgttagtacatgagataaagtggattatagcaatgttgttaaactgctggttgcaacccattgatgggtcctgaccagcaagtaaaagtgcagctgggtgccgtggtgcatgccggtagtctagctacttgggaggctgacgtaggaggatcgcttgagtccaggagtttaaggctgtagagtgtaatgatcatgcctgtgaatagccactgtgatccaacctggacagcagggagatcccatctcttaaaaacaataaaaatgaaatagagcatatcagagggccttgttcgtaggaagtcagtattgttttgtggaacatttagttgtatgcgtacatgcaggtatgtgtattgagtctcattttaaagtatatttcttactggggttatcagaaagtttgaaaatcattagactaggggataggtatgctgagattttagtagtagagttttacctggacaaattgtctactttgaacctgactgccggcctgagtttgttcagggaagattgtttctaatctatttgctttttgtttgtttgttttggtgacggagtcttactctgttgcccaggctggagtgcagtggtgcggtctcagctcactgcaacctccgcctcctggattcaagtgattctcctgcctcagcctcctgagtagctgggaatacagacgtgcgccaccatgtctggctaatttttgtatttttagtagagacgagggtttcgccatgttggcaaggctggtcttgaactcctgacctcaggtgatccgcctgccttggcctcccaaagtgctgggattacaggtgtgagccaccgtgcccagcctgtttctcatctatttgtgtaagaattccatgtttacttactctagataacttcaaaagaaaaaaaactctggccaataaaatgccataggaatgtttagggatatgtggagtaggcattctttctaagttttcctgaagatgcaccaatgtttaacaagaaaggaagggcagtgtagaacacctattgctttctgcatggtaagagggatgggtattgggagagcccacacctgctgaggagtgcctttagactttgagcggtggtgtttctctccctcccagaaatagatctctttggggagacaggccatacaagacgtgaatctggtgacattttacttgtttgaagcaaaatttttttagatgatggagggtttttaaaaattgcttttaaaattaaaatttgaatagataagaagtaatcactataaaaaataatgaagcataaggaatgctagtattagctgggtgtggggcactcacttgtagtcccaactactggagaggctgaggcaggaagaatgcttgagcccaggagtttgagtccagcctgggcaacataacgagaccccatcttttaaaaaaaaaaaaaaagaaaaagaatgctaatatcgtgaacatttatgttcccaccacccaatttaagaaaaagaacaatacttttgaagtccactgcgtacccctccttgatcccatctctttcccttctcttttaggagttaactatcctgattccttgctatgctttttagtgtgatccctgaagaacgtatcactccattttgcatagctataaatttcatagaaatggaatcgtattgcatgtgttgtgtgatttgctgtttttgctcatcattatattcctgggattatccatttttaggtttatgtgtgactgtaatttattgtttagatgaaagttttcctggtttgacttgctctatcttcatatttttccttaagctaagggttcagcatacgaaggcagtattggtggcacttctttaacagtaccccatctcttctcctagccttgagggctgcacctagatgaacttgtgaggctcatttgaaccttttggaagcaccgaagcctgctgaagtttccagacatctgtatgaatctgttgtagttttttaatgttatatgctgaatataaaaccaagtaactcctgctggaaacatttacaatatcgattaacaaatactatcagtggctttgacatttttgtcagtttcttgatttttttccccgcttttgtctccccttcccccctccacattttggggcattgtgctgttaatagattttttttctgttcgtttgtttatatacctcctgtttccttctgatgttaatagatttctgacagtcagacttgtccacaagaactcaactggcaaggctgcttttctgtgctaaaactggggagctagtgggcaccatgaagatcttctgcagtcgggccaatccgaccacggggtctgtggagtggctggaggaggatgaacactatgattaccaccaggagattgcaaggtactgggttggtttacagcaggctgcagctgggtggggcacttgatctcaaagcagatgccttgggctccagtctgagcgtgggctaggctgtcacccagtgcttatgatgagggctggtgttggtcctgagcaggtctgctcagccaggtaggtatatgtagcagttaggcaaaatcatgcctgtttggagagtcagacattatgtagcagccttagcagagcctcagcatctgtttaacggagcaaagaaaacccaagcctcagtagtgttgatgaagttgaatcatttacttgccttactgaaatggtgacatgttcatcatatggttaaattcttttgaatgaaaaaaatgaaaatggttttttttttcccttagaagaaatatttaaaagtatgtgagttgttggccaggcgcagtggctcacgcctctaatcctagcactttgggaggccgaggtggccagatcacctgaggtcaggagttcgagaccagcctgaccaacatggagaaaccccgtttctactaaaaatacaaaattagctgggcatggtggctcatgcctgtaatcccagcttacttgagaggctgaggcaggagaatcacttgagcctgggaggcagaggttgtgttgagccgagatcgagccattgcactccagcctgggcaacaagagcgaaactctgtctcaaaaaaaaagtatgtgagttgttatgtagcaatcattaagtgcattcagtgtgccagcattgtgctaaggctgtggataccagatgaagaagatcctgttctcatcttcaaggaccatgcagttttgtggaagagacaggcacatacaaaattacagcacaaaagccaggcacggtggctcatgcccgtaatcccagcactttgggaggcaaagggcgggcgggcgggcggtggagggggtggtggcggctgatcacttgagggtcaggagttcgagaccagcctggccaacacggtgaaaccccgtctctataaaaaaaaattagctgggagtggtggtgggcgcctgtaatcccaggtactcgggaggctgaggcaggaaaatcacttgaactcgggaggtggaggttgcagtgagccaaggttgtgccactgcactccagcctgggtaacagagtgagactctgtctcaaaaaaaaaaaaaaaaaaattacagcacagtgagataaaggcacaagaggtcatggaagcagcaagaaccagctgaacttggggtgggaggtaatgtttgaataatttctcagttctaaaggaagagaaggtgaagtttgagcagcagggattacaggtaagctttcagatgagccagattgtggctgggtgcagtggcctacacctgtagtcccagctacttgggaggccaaggcaggaggattgcttatgcccacgagttcaacatagtaaaacactgtctcacaaacaaacaaagaccaaaaacaggctgggcacagtggctcatgcctgtaatcccagcactttgggagaccaaggcgggcggatcacctgaggtcgggagttcgagaccagcctgaccaacatggagaaaccctgtctctactaaaaatacaaaattagccaggtgtggtggcgcatgcatgcctgtaatcccagctgctcgggaggctgaggcaggagaatcacttgaacctgggaggcggaggttgccatgagccgagatcgtgccattgcattccagcctgggcaacaagagctaaactctgtctcaaaaaaaaaaaaagaaaaaaaaccacacacacacagatgggctattctggggagcagctagcagtttagtgcagctggagtgtggtacaaaagtactatggtaagagaggctgccgaaagcatacgcggggtcattttgtaaagggtggtagcaaaatgcaggaagaggaacatgagtttaagtccaagctttgccacttctttactctcttggccaagttacttctctgagccttaatataaaataatatatacttcaatatagtaatacattatctcacagtataatacaattatcttagaattgtttgatgattaaatgtaatacagtatctggtgcagaattagggcttaaaatatttacttttttttctttttttttttttgagacagagtctcgctctgtttcccaggctaaagtgcagtggcacgatctctgctcactgcaagctccgcctcctgggttcacgccattctcccgcctcagcctcttgagtagctgggactacaggtgcccgctgccacgcccggctaattttttgtatttttaatagagacggggtttcaccgtgttagccaggatgatcttgatctcctgaccttgtgatccgcccgcctcggcctcccaaagagctgggattacaggcgtgagccactgcacctgcccaggtcttaaaatatttctaaacattttggacattattttcttgttttattgttcagatggagtcttactctgttgccttggctggagtgcagtggcgcagtctcggctcactgcaatctctgcctcccaggttcaagggattctcttgcctcagcctcttaggtaactgggattacaggcatctgccaccacacctggctaatatttgtgtttttagtagagacttggtttcacctgttggccaggctggtcttgaacttctgacctcaggtgatccacctgcctctgcctcccaaagtgctgggattacaggtgtgagccacagtgtcaggcctggacgttattttctgagtgatatattaaacaggagagaaagaggattggattgcattttggaacactcactgagagcggtgtggagaggagagcatttggggatattgtagtcccagagctgcatagtcccagaggagacagctcgggggaacttgagtttggtaactcactggatatgatggagggagagagaagattcaagaagcaccaagacttctggttagaatgacaaagtggatggggcctgcaagggaggaatgggtggtgtggggaggggaacacgatggagattaggcgtttaggtttggacatccacatagagatgccaatggcagatagaattttgggtctggagacagaatttgtagttgttggaactgaaactgggagaggttgcagtctctcaagggggtgtggaatgtgaaaggtagagggctgaagaaggaatcccggaatagctgaggaggcaaagaagggcaagggagatagccagcatggaaaggaagaaagagggagtgtgtctagcaaggtcagaggcactgggaagtcccagatactgatgactgacatcagctgcaggagtgagctggtggtggttaccgagagtgatgtcagtggagtggtgggcagtaagtgtgaagaggccaggaaggtggtgagtgagatgccttttaaatagtgagcagaggtagaaaggactacatttcagctaagcatccatagctggcttcagatataaaaccttgatgtgccattaaaaaaaaaaaaaaaagaacccccttctttcagtgcaccgctcttcaaagtgtggaatgtggaccacctgtggcacaattgcctggagcacattagcccagccttctcaataagagtgagagtgtgtgtgtgtgtgtgtgtgtgtgtgtgttctgggactctgcatttcaggtaagctttctagtgattctagtgttgacccaaggctggagggcctctgttttaatgtgagctccttagctgtccccttgaattcccagaaagcgtggcagggcctgcctagttctgggtgctcatcccgaccccgcctgagggttttcagtgtgtgaattactgcagtaggaaatatggagaagtgattctcctccctttactacggtattggtgaactctttagttttccctgatgatgttaagtgaacgtgcccagtggggtacctgtcacatatacagtgggtgtatgtgagtgcttctctttccccggctgctctccctaataccgcatcagtggttatctccaggcagagatgtaggccaggttaggtcaagtattaggcagattgagtctgagtttttcctgaggaggaaaatgtgtagtgtatagcaagatcaagatgctagtggctgtggaattactgtgacagggctaactgccgagaccagctcggtcgtggagaccctaacccagtggcgctagaggaattaaagacacacacacagaaatatagagtgcagagtgggaattggggggctgacagccttcagagctgacagccacgaacagaactttacctacatatttattgacagcaagccagtgataagcattgttcctatagattatagattaaaacgggaaacaaagggatgggctctggctagttatttgcagcaggaacatgtccttaaggcacagatcactcatgctattgtttgtggttcaggaacgccttaagcgaaagccgccctgggtgggccaggtattccttgccctcattccagtaaacccacgaccttcagtgtgggcatcatagccatcaacgagcatgtcacagtgctgcagagatttgtttatgaccagttttggggcctgtttttggccagatttgggggcctgttcccagcagctaactactggagcatttttaggtctgagaacatctttctctgagacttttttctgcagcactagagaataacagcttgaaactctattaaaataaagtggccaggtgcagcgacggatgcttgtattgtagttctgctgaggcaagaggatctcttgagctaaggagttcaaggctgcagtgcccaatgattgaggctgttcatagccactgcactacagcctgggtgacataacgagaccctgtttctaaaaataaacaaaaaaataggccaggcgcagtagctcacacctgtaatcccagcactttaggaggccaaggtgggcggatcagttgaggtcaggagttcgagaacagcctggccaacatagtgaaaccccatctctaatgtaaatacaaaaattagccaggcgtggtggtgagcacctgtaatcccagctacctgggaggctgaggcatgagaatcacttgaacttgggaggcagaggttgcagtgagctgagattgcaccactgtactccagcctgggtgatggggtgagaccctgtctcaaaaaaaaaaaaataaataaagataaaagacaaccaaaaaatagtttaaaatagatgacacgtttgttctatctgtttagcaatgtgtttatatatgtgaatactcttgtgtgttgatgtgtatcatgcaaaggttactgacttttttgttttttaggtcatcttatgcagatatgctacatgacaaagacagagtaagtgtaaaaggaaactattatcttgatgtggggtgttttgaagtcttggattacaagaaggttaagaatccctgggggtcatgatgttaaatgatactgagaggcgtatggtgtagaagtcaggaaatcagttgggagactgggtcctacttctggctctatttttgttgtttaatctcccagctttatcaagatagaactgacaaataaaaatggtctatgtttatggtaatacaatgtgatgaatatatgtgtatggtgtaaaatgattgaatcaagctaattaacaaatctaccgcctcatacttttttgtgtgtggtgagaacatttaagatctactcgcttagtaatttttaagtgtacattattaactatagctcacaatgccgtacagcagatctccacaacttattcatcctatctgactgaaacatcagatcctctcccttagcaggtaccattctctgggcttctgagttcaacatttttttttttttttgagacagaatctcgctctgtcactcaggctagagtacaggggcgagatctcggctcactgcagcctcagtctcccgagttcaagcgattctcctgcctcaacctgcctaagtgttgggattgtacctagtattgggataatactattattatactattatacctagtattgggattataacttgggattacaggtgcgtgccatgacacctggccttcactgtagttttaatttccatttttaattttaattttatttttttgagactgggtctctgttgcccagtgcagtggtgtgatctcggctgcactgcagcctagacttcttgggcttaagcgatcccccaacctcagccttcccagtagctgggactacaggcatgccaccatgcctggctaatttttgtatgttttgtagaggcagagtttcgctgtattgcccaggctggtcttgatcccctgaggtcaagtgatccacccgccttggtctcccaaagtgctgggattatgggcatgagctactgcgcccggccatcgtgtgcttgtttaccatgtgtatatctttgttctagtctagggttatgaacataggtgtgattcttgatagacactgccacattgccttcaaaaagggttccagattcactgtaatatcttcaaaactgggtcattaaaaagtgacagctaatttaatggcatcgttaaagtgaaggctgtgccatccctggtttacaattgaggacgctgttcatcaattttttttaacttaaaaaataaataaaacaaggccaggcacggtggctcatgcctgtaatcccagcactttgggaagccgaggcaggcagatcacggggtcaggagatcgagaccatcctggctaacatggtgaaaccccgtccctactaaaaatacaaaaaaaagccgagcgtggtggcgggcagggcctgtaatcccagctactcaggaggctgatgcgggagaatggcgtgaatctgggaggcggagcttgcagtgagccgagattgcaccactgcactccagcctgggcgacagggagactccgtctcaaaaaaaaaaattgtggtaaaaacacataacataaacggtcatactgattgtatctaagacataaatgcacttactttgacaatgaaatagttctatatttctgtgaaaaattatttcacccagactaaacatttttgtgctttacctcagaggcaacgtcatttcttttttttcttttttctttctttctttttttttttttaacaagaatgagtctccctctgttgccaggctttagtgcagtggtgtgatcttagctcactgcaacctccacctcccgagttcaagtgattctcctgccttagcctcccaagtagctggggttacaggcatgcgccaccatgcctggctaattttttgtatctttagtagagatggggtttcaccatgttggccaggttggtctccaactcctgacctcaagtgatccacccgcctcagcctcccaaagtgctgggattacagatgtgagtcactgcacccggcctggtaattctaaagaatattcagttctagatattttctaattccagtctgatttagtcttttgcctatcagtttagaagtgtgtttcttaatgtatgaaaaattttttttcttcagttgtgtttctgatattaagatttttgacttgttttgcattgtggtcagaggatatcacccttttgatgccagttctgtattagctgtctaatgttatttaacaaattaccttaaattttaatagcctcttaatatttcttactaacttggcaggtcatcagtctatttaaaagatttgcacatattttttccatcatctttagttattttcaacagaagggtcactgtgcctattgagtcagaccgttatagatgaaagatgtatgtgtttactaaagacagaagtaaaaatcttcaagatgcaaagaagttattttctgatggggaaaatactttttagtgaagctctctgagttagagtcggtaaaggaaaacaagccatacatattgcagcagagcggctttaacacaaggagctggctacccagctgtgggagggctagaaagcaaatgggaacgctgagtaacctaacagtagagattgcagggagcagttaccttgcctagggctgagaaactaaacgagaagattaggatttccagaagccacaagcattgaggagagatcctgtggaccactgtccaagtacggctgcagctctgaggggcccaaggagctggttatgggatcattgggaaaagttggagtctgcaatcaactgcccctaccgagaggaccctgatgagaacagcagcatgcagaaaggagcaagcctgctctgtcctcctaccttccagtcgccctcttggtcccccttttggctgtacctaacagttggaaaaaggagaacatggtttgcagggctctggcatcacttagtagaggatagaagagtgagtgtggagcagggacagtcgcttaataaagggcaaggggctgactcacaagacctgcccaactcagccagagctgttctgccaggggccagaaaggccatagggccctgacttgcactgccactgccagctgtgactctagaactttgcaaagcacctttccacttacttataataactggtagtaagtgacggccatgtcttccttagaatgtaaaatactaccaaggtatccgggctgccgtgagcagggtgaaggacagaggacagaaggccttggttctcgacattggc

SEQ ID NO: 13537 - DNA, 440 bp, Homo sapiens
ctcgacgctgcgaggtcccgccccgcgtgctggccgcggtaaaagtggtagcagcggaggcgagcggagggtttcccgcggcggccttgagggctgcacctagatgaacttgtgaggctcatttgaaccttttggaagcaccgaagcctgctgaagtttccagacatctaactcaactggcaaggctgcttttctgtgctaaaactggggagctagtgggcaccatgaagatcttctgcagtcgggccaatccgaccacggggtctgtggagtggctggaggaggatgaacactatgattaccaccaggagattgcaaggtcatcttatgcagatatgctacatgacaaagacagaaatgtaaaatactaccaaggtatccgggctgccgtgagcagggtgaaggacagaggacagaaggccttggttctcgacattggc

SEQ ID NO: 13538 - DNA, 5471 bp, Homo sapiens
atcacccttttgatgccagttctgtattagctgtctaatgttatttaacaaattaccttaaattttaatagcctcttaatatttcttactaacttggcaggtcatcagtctatttaaaagatttgcacatattttttccatcatctttagttattttcaacagaagggtcactgtgcctattgagtcagaccgttatagatgaaagatgtatgtgtttactaaagacagaagtaaaaatcttcaagatgcaaagaagttattttctgatggggaaaatactttttagtgaagctctctgagttagagtcggtaaaggaaaacaagccatacatattgcagcagagcggctttaacacaaggagctggctacccagctgtgggagggctagaaagcaaatgggaacgctgagtaacctaacagtagagattgcagggagcagttaccttgcctagggctgagaaactaaacgagaagattaggatttccagaagccacaagcattgaggagagatcctgtggaccactgtccaagtacggctgcagctctgaggggcccaaggagctggttatgggatcattgggaaaagttggagtctgcaatcaactgcccctaccgagaggaccctgatgagaacagcagcatgcagaaaggagcaagcctgctctgtcctcctaccttccagtcgccctcttggtcccccttttggctgtacctaacagttggaaaaaggagaacatggtttgcagggctctggcatcacttagtagaggatagaagagtgagtgtggagcagggacagtcgcttaataaagggcaaggggctgactcacaagacctgcccaactcagccagagctgttctgccaggggccagaaaggccatagggccctgacttgcactgccactgccagctgtgactctagaactttgcaaagcacctttccacttacttataataactggtagtaagtgacggccatgtcttccttagaatgtaaaatactaccaaggtatccgggctgccgtgagcagggtgaaggacagaggacagaaggccttggttctcgacattggcactggcacgggactcttgtcaatgatggcggtcacagcaggtgccgacttctgctatgccatcgaggtaagccattcccttcaggtgtgtgtcctgcatcttgcatgggaaatcccctatgctcttgcactttccccgtctgttccttcacaaacattcatggagtgctcactctgtgccaagcacagagccaggctctgagcgtatagagatgagtcagacacagttccttcctccaggagctaattttctcctctgtcagcctaggctgcacatcagaatcactaggagctttagaaaatacttacaggctgggcacagtggctcacgcctgtaatcccagcacttcgggagggtgaggcaagacaattgcttgagcccaggagtttgagaccagcctgggcaacatagtgagatcccatctctacagaaaaacttttaaatattagctgggcatggtggcatgtgcctgtgttccagctattcttgaggctgagatgggaagatctcttgagcccggaaagtcaaggctgcagtgagccatgatttggacttcatgtaagaaagcaaaaaattacttctaccttgtttaagccagttattgtgggactttgttgtttccaactaatcagtatatgaactcagttttgtaggggaaagtatttaaatacatgcccccacaccaccacactccagcctgggtgacagagtgagactttatctcaaaaaaatcaaaacgaaacaaaggctgggcacagtgtctcacccctgtaatcccagcactttgggaggccgaggcttggatcatgaggtcaggagttcaagaccagcctgaccaacatggtgaaactccatctttactaaaaatacaaaaattagccgggtgtggtgatgcgcgcctgtaatcccagctactcaggaggctgaggcgagagaatcgcttgaacccaggaggcagaggttacagtgagccgagattgcgccactgcactccagcctgggcgacagagtgagactccatctcaaaacaaaacaaaacaaaaaaaccttatgcctagtccccagccctaacagattttgatttaacttttctggggtgaggcctgagccttgggacttgggaatgtgcggcaaggttgagaaccactaccttaaatgtccctatggagtcagctctcttatgtttaccaatttgtcatttctttaataaaacattaaacagcttgagcccacagagcaagaaaaattaaaaaccaaacaaaattaaaaattaaacatgttatttttctcataaaacaaataatgcatattattataggaaatttggtaaataccaaataaaaatagtatgttgacccaaagttaagtactgttaacattttggtgtatattcttccaagttttgggggcaggcagggagcatgtatataaatactttccctacaaaattgggttcatgtagtgattgagttggaaataacaaagcctcaaaatcactgtggtttaaggtagagtagttttttgctatctttttcgtggcgtgatctctattcaccgcaacctccgcctcctgggttcaagcaattctcttttctcagcctcccaaatagctgggattacaggtatgtaccactgcacctggctaatttttatatttttagtagagatagggtttcgccatgttggccaggctggtcttgaattcctgatctcaggggatccccccacctcagcctcccaaagtgttgggattacaggtgtgaatcactgcgccctgccttgttcctcttttttaaaagtaagaataactttcccaggaatttctattatagcaaacctctccttgggtaccatcggctagaatgaggttaaatctcatttcttatctctggcaagagggattcagttactcttagctcagacaagtgcaccactgcaaaggtcagttccccacgctgcaccctcacctgatttcaggggagaggaggacacagaatggatgtcgggaggtcatcttcagtgtccactcctggtagtgttttgggtgagatcttgagcttcttgatgggctgaggagaaggaggtgtgaaggtaccagcttgcaggttcagggagaggtgactgatgagtcagaaggcagcaggggtgagggacgacactggctttggatattgtcagggtggaggcaaagtgattggtgagaactagggtttaaggccctcaaaccacatctaaaaacatcaaggcaaatcctagaaataatttgaaatagatgatgaagatttttctaggagaacatgtgtgtgtattccatgtaaatactgcgcgctaatcaattgcacaactggagctgctcacgtaagtactctttacgaaaggatacagcatttgtcccttgattatagtaaaaaatatagtattcatggtagaaaatgtgggaaatacagaaaaggatttagaaaaaaggaaaatcttatcaggaacagtctcggtatcattttgtggtttccacttcgtgtgtagggccacacgtgagtctgtttgttttacatgctagagctcttggggctgtggaatctagactggataagttgaaaacaaagagttggaggtgcttatttatgttcagggaaactcgaagagttcagggaagacttctggatgggggattcatgctgccctgggaagtggggtttgatttggcaggtggggccaggatagggaaggctcagtgatcatgagatcattgtggctggagtgttggttgttgggggaatgggggaggaagactgggaaggtaagggagggcctccaaagcagtagtttccccttatctatggtttcacttttcgtgatttcagttacctgtggtcaactgaggtccaaaaatactaaatggagccaggtgcggtggctcacgcctgtaatcccagcactttgggtggctgagacaggtggaaaccttgagtcccagagttggagaccagcctgggcaacatggcaaaaccccgcctctacaaaaagtagctgggcatggtgatctacgcctgtagtcccagctacttgggagattgaggtgggaaattgcttgagcctgggaggtggaagctgcagtgatcatgccactggactccagcctggacaatagagtgagacccttctcaaaaaaaaaaaaaagaaaaattaaatggaaaattccagaaattatttataagttgtaagttgtgtaccattctgagtattattacataattgttctatttttagttattgttaatttataaattattatttatatttattattgtgcctaatttataaattaaacctggtcataggtaagcttggaggctgaagcagctccactgtgaatgctaatcctccacgctgacttctgaccaaccccagcttcaggaatgcctctaaaatttccgctctcatgcactttgatgtaaatcctgccctcaggtcagaacaactttgatgttatcataaatacatacttaccgtaaatcctgcccttcgtcaaattccctgtggtatgtaagccctgcgtctgagccataacagtgtgggggcccagtttctcactgcccgagacaaggcttctgtttgtatgtctctataaagtgtgtctttctgagaagctggatttgccagtctttcctcagcctctcagctcccgtggcctgttggggtaggtttgcatagagctgcccaccatggaacagtatgtatgtatagcaaaaaaaaaaaaaaaaaaaaaatggtatacataagggtcagtactgtctgaggtttcaagcatccaccaagggtcttaaaatgtatcccccatggacaagaggcactgctgcaccataagaaaatagaggctgtgttctgccaacagtggggatttgggacaattttgagcccagaggatgacctacttactcacacctacagtctgctctcctctggagggcacagcacgcctcccaggttcgtgaggcaagtccctttcctggctttttggcgtcctcttgtgcggtactgacacctactgctcttactaagtagtgcagcctcctcaggatccccggcatccccgctgtgcctggcacggaatgagagtccctaatcacaagttaaagccagctgaatctcagccctttttcatgatgcacatttggagaataaagtatttaagttacatatcttaggaccagaatcaaggaatagcttgctcaccttaaaggtcagactactgtttaatttattgctcatttttccttgggtttcggctctattttctaggttttcaagcctatggctgatgctgctgtgaagattgtggagaaaaatggctttagtgataagattaaggttatcaacaagcattccaccgagg

SEQ ID NO: 13539 - DNA, 687 bp, Homo sapiens
atcacccttttgatgccagttctgtattagctgtctaatgttatttaacaaattaccttaaattttaatagcctcttaatatttcttactaacttggcaggtcatcagtctatttaaaagatttgcacatattttttccatcatctttagttattttcaacagaagggtcactgtgcctattgagtcagaccgttatagatgaaagatgtatgtgtttactaaagacagaagtaaaaatcttcaagatgcaaagaagttattttctgatggggaaaatactttttagtgaagctctctgagttagagtcggtaaaggaaaacaagccatacatattgcagcagagcggctttaacacaaggagctggctacccagctgtgggagggctagaaagcaaatgggaacgctgagtaacctaacagtagagattgcagggagcagttaccttgcctagggctgagaaactaaacgagaagattaggatttccagaagccacaagcattgaggagagatcctgtggaccactgtccaagtacggctgcagctctgaggggcccaaggagctggtgccgacttctgctatgccatcgaggttttcaagcctatggctgatgctgctgtgaagattgtggagaaaaatggctttagtgataagattaaggttatcaacaagcattccaccgagg

SEQ ID NO: 13540 - DNA, 4844 bp, Homo sapiens
atgctgggaaggtggggtcgctttggggttctgtgtgcagcgagcatggtgtccttggcaccagggtttcggcagaggagcctagcgtgggcctacttggactcctccgcgtggggcagctcgggacacccgggcctgcaggagagcggggttctaggctggccccggctctgcagtgcagccgggtgcctgccactcgcggggctctgtcgcagtactcgtgcctggcgcctcccctcagccacagagaccgcagtagctccaaccatcgcacccctaactgggccacgagttctctgattgccagacctgttgtctttgccactcactgttctgagtaattggagagtcgtgtattcactacacgccaaccagagtggtcctgtaaaagcgtaagcctagtgtagatacgcttctgcttaaaactcttgagtggctcccagtgcttttagaacaaaatccaaacgcctttccgaagtcgacaaggcccagcttgattgagcagaagatgtgataggagatgaggagcggggggcttctgcaaaagtgcttcggtcgctcaggcttttggcacattttgcttatgcaacctagttctttctaccttagggccttttcttgggaaagttggggtaaggattcctgacctgtaaaaactcttccccaacttttatcccggtctgtcttgtagatctcaaatgctagtttcctcagagtccttctgtaaccttggttttctctttctacaacgctctgtgtatttcttgcattcatgtagtctgtaatttgtattactctctcattagagtctaagctcttggagggcaagggtcttctctagcttgtggtggtggctccagtccctaatatagtgcctggcacatagaaggtatttaataaattttgttattttattttttcgagacagagtctcactctgctgcctaggctgagtgcagtggtgtgatcgaggcgcactgcagccttgacctcctgggctcaagcgatcctcacctcggcctaccgagtagctgggactacaggcacgcgccactacactcgggtaatttttaattttaatatatgtatatttatatatatatatatatatatatatttttttttttaagacagggtctcactctgtcacccaggctggagttcagtggcgccatctctgctcactgcaacctctgcctcccgggctcaagtgattcccctacctcagcctcccgagtagctgggagtaactgggactacaggcacaggccaccgcgcccggctaatttttttaaaaattttttgtagagaacggggtctcactatgttgcgcaggctggtctggaactcccagactcgatatccttgcgtctcggcccctcacagtgctgggatcacaggtgtgagccaccaccgcctagcaaatacattttgaatgaatgtagtggaccatctgctctgcagtctgacggctaatacaattagggcttggcatggtggtttctatttcctccttgtaaatggccatgcaagtttacaactcttggagaatgaggaggggttcagagaatatctcctgaatctgtagtgtagactgcttctgggagagaacaaataataatggatgagggcattcagccagagaaggtgtgtagtgcccaccagaagaggttcatgccttcataaaattgttaacacaagacatagttccaggtttgtttgtttgtttgagatacagtcttgctctgttgcccaggctggagtgcagtggcgcgatcttggctcactgcaacctctgcctcccaggttcaagcaattctcctgcctcagcctcccaagtagcagggattacaggcacctgccaccatgctggctaattttttgtatttttagtagagacggggtttcgccatgttggccaggctggtctcgaactcctgacctcaggtgatccacctgctttggtctcccaaagtgctgggattataggcgtgagtcaccgtgcctgggctgttccaggttttgaaaagacactgtggtcctggttttagactcagcaacatcacagacaagaaaggaatcctatggattaaagttcttcactataagttttttttttcctccagttcaaatgggtaacgtgccaatgtagtaaaggtttgagggaggcacgtctgacacaggcacatgaacacccagtcatcacgcttatgaactacaaaacgatgactcttaaccttgaagtgacttcagaattgattccacatggaccacaggattagtatttcaggactctaccatatggatcctattgatatgtttgacacctggtccagttttacttcactaaactgattgatataatgtgcatgattgtctaagcctttctaattggatgaaatgccttctccgtccacaaccccctccttctcctcctgcctcagctgaatccaccttttaagccttccttgaacattcagtcagatatggccatttctttctctactccaacatttgttggacacagttttctaatgcacattacagattctgacagttctagatattctgtctgtaaaataaatgttagtacatgagataaagtggattatagcaatgttgttaaactgctggttgcaacccattgatgggtcctgaccagcaagtaaaagtgcagctgggtgccgtggtgcatgccggtagtctagctacttgggaggctgacgtaggaggatcgcttgagtccaggagtttaaggctgtagagtgtaatgatcatgcctgtgaatagccactgtgatccaacctggacagcagggagatcccatctcttaaaaacaataaaaatgaaatagagcatatcagagggccttgttcgtaggaagtcagtattgttttgtggaacatttagttgtatgcgtacatgcaggtatgtgtattgagtctcattttaaagtatatttcttactggggttatcagaaagtttgaaaatcattagactaggggataggtatgctgagattttagtagtagagttttacctggacaaattgtctactttgaacctgactgccggcctgagtttgttcagggaagattgtttctaatctatttgctttttgtttgtttgttttggtgacggagtcttactctgttgcccaggctggagtgcagtggtgcggtctcagctcactgcaacctccgcctcctggattcaagtgattctcctgcctcagcctcctgagtagctgggaatacagacgtgcgccaccatgtctggctaatttttgtatttttagtagagacgagggtttcgccatgttggcaaggctggtcttgaactcctgacctcaggtgatccgcctgccttggcctcccaaagtgctgggattacaggtgtgagccaccgtgcccagcctgtttctcatctatttgtgtaagaattccatgtttacttactctagataacttcaaaagaaaaaaaactctggccaataaaatgccataggaatgtttagggatatgtggagtaggcattctttctaagttttcctgaagatgcaccaatgtttaacaagaaaggaagggcagtgtagaacacctattgctttctgcatggtaagagggatgggtattgggagagcccacacctgctgaggagtgcctttagactttgagcggtggtgtttctctccctcccagaaatagatctctttggggagacaggccatacaagacgtgaatctggtgacattttacttgtttgaagcaaaatttttttagatgatggagggtttttaaaaattgcttttaaaattaaaatttgaatagataagaagtaatcactataaaaaataatgaagcataaggaatgctagtattagctgggtgtggggcactcacttgtagtcccaactactggagaggctgaggcaggaagaatgcttgagcccaggagtttgagtccagcctgggcaacataacgagaccccatcttttaaaaaaaaaaaaaaagaaaaagaatgctaatatcgtgaacatttatgttcccaccacccaatttaagaaaaagaacaatacttttgaagtccactgcgtacccctccttgatcccatctctttcccttctcttttaggagttaactatcctgattccttgctatgctttttagtgtgatccctgaagaacgtatcactccattttgcatagctataaatttcatagaaatggaatcgtattgcatgtgttgtgtgatttgctgtttttgctcatcattatattcctgggattatccatttttaggtttatgtgtgactgtaatttattgtttagatgaaagttttcctggtttgacttgctctatcttcatatttttccttaagctaagggttcagcatacgaaggcagtattggtggcacttctttaacagtaccccatctcttctcctagccttgagggctgcacctagatgaacttgtgaggctcatttgaaccttttggaagcaccgaagcctgctgaagtttccagacatctgtatgaatctgttgtagttttttaatgttatatgctgaatataaaaccaagtaactcctgctggaaacatttacaatatcgattaacaaatactatcagtggctttgacatttttgtcagtttcttgatttttttccccgcttttgtctccccttcccccctccacattttggggcattgtgctgttaatagattttttttctgttcgtttgtttatatacctcctgtttccttctgatgttaatagatttctgacagtcagacttgtccacaagaactcaactggcaaggctgcttttctgtgctaa

SEQ ID NO: 13541 - DNA, 588 bp, Homo sapiens
atgctgggaaggtggggtcgctttggggttctgtgtgcagcgagcatggtgtccttggcaccagggtttcggcagaggagcctagcgtgggcctacttggactcctccgcgtggggcagctcgggacacccgggcctgcaggagagcggggttctaggctggccccggctctgcagtgcagccgggtgcctgccactcgcggggctctgtcgcagtactcgtgcctggcgcctcccctcagccacagagaccgcagtagctccaaccatcgcacccctaactgggccacgagttctctgattgccagacctgttgtctttgccactcactgttctgagtaattggagagtcgtgtattcactacacgccaaccagagtggtcctgtaaaagcagtctcactctgctgcctaggctgagtgcagtggtgtgatcgaggcgcactgcagccttgacctcctgggctcaagcgatcctcacctcggcctaccgagtagctgggactacaggcacgcgccactacactcggatttctgacagtcagacttgtccacaagaactcaactggcaaggctgcttttctgtgctaa

SEQ ID NO: 13542 - DNA, 26472 bp, Homo sapiens
cgcggtaaaagtggtagcagcggaggcgagcggagggtttcccgcggcgggtgaggcgctgggtatgctgggaaggtggggtcgctttggggttctgtgtgcagcgagcatggtgtccttggcaccagggtttcggcagaggagcctagcgtgggcctacttggactcctccgcgtggggcagctcgggacacccgggcctgcaggagagcggggttctaggctggccccggctctgcagtgcagccgggtgcctgccactcgcggggctctgtcgcagtactcgtgcctggcgcctcccctcagccacagagaccgcagtagctccaaccatcgcacccctaactgggccacgagttctctgattgccagacctgttgtctttgccactcactgttctgagtaattggagagtcgtgtattcactacacgccaaccagagtggtcctgtaaaagcgtaagcctagtgtagatacgcttctgcttaaaactcttgagtggctcccagtgcttttagaacaaaatccaaacgcctttccgaagtcgacaaggcccagcttgattgagcagaagatgtgataggagatgaggagcggggggcttctgcaaaagtgcttcggtcgctcaggcttttggcacattttgcttatgcaacctagttctttctaccttagggccttttcttgggaaagttggggtaaggattcctgacctgtaaaaactcttccccaacttttatcccggtctgtcttgtagatctcaaatgctagtttcctcagagtccttctgtaaccttggttttctctttctacaacgctctgtgtatttcttgcattcatgtagtctgtaatttgtattactctctcattagagtctaagctcttggagggcaagggtcttctctagcttgtggtggtggctccagtccctaatatagtgcctggcacatagaaggtatttaataaattttgttattttattttttcgagacagagtctcactctgctgcctaggctgagtgcagtggtgtgatcgaggcgcactgcagccttgacctcctgggctcaagcgatcctcacctcggcctaccgagtagctgggactacaggcacgcgccactacactcgggtaatttttaattttaatatatgtatatttatatatatatatatatatatatatttttttttttaagacagggtctcactctgtcacccaggctggagttcagtggcgccatctctgctcactgcaacctctgcctcccgggctcaagtgattcccctacctcagcctcccgagtagctgggagtaactgggactacaggcacaggccaccgcgcccggctaatttttttaaaaattttttgtagagaacggggtctcactatgttgcgcaggctggtctggaactcccagactcgatatccttgcgtctcggcccctcacagtgctgggatcacaggtgtgagccaccaccgcctagcaaatacattttgaatgaatgtagtggaccatctgctctgcagtctgacggctaatacaattagggcttggcatggtggtttctatttcctccttgtaaatggccatgcaagtttacaactcttggagaatgaggaggggttcagagaatatctcctgaatctgtagtgtagactgcttctgggagagaacaaataataatggatgagggcattcagccagagaaggtgtgtagtgcccaccagaagaggttcatgccttcataaaattgttaacacaagacatagttccaggtttgtttgtttgtttgagatacagtcttgctctgttgcccaggctggagtgcagtggcgcgatcttggctcactgcaacctctgcctcccaggttcaagcaattctcctgcctcagcctcccaagtagcagggattacaggcacctgccaccatgctggctaattttttgtatttttagtagagacggggtttcgccatgttggccaggctggtctcgaactcctgacctcaggtgatccacctgctttggtctcccaaagtgctgggattataggcgtgagtcaccgtgcctgggctgttccaggttttgaaaagacactgtggtcctggttttagactcagcaacatcacagacaagaaaggaatcctatggattaaagttcttcactataagttttttttttcctccagttcaaatgggtaacgtgccaatgtagtaaaggtttgagggaggcacgtctgacacaggcacatgaacacccagtcatcacgcttatgaactacaaaacgatgactcttaaccttgaagtgacttcagaattgattccacatggaccacaggattagtatttcaggactctaccatatggatcctattgatatgtttgacacctggtccagttttacttcactaaactgattgatataatgtgcatgattgtctaagcctttctaattggatgaaatgccttctccgtccacaaccccctccttctcctcctgcctcagctgaatccaccttttaagccttccttgaacattcagtcagatatggccatttctttctctactccaacatttgttggacacagttttctaatgcacattacagattctgacagttctagatattctgtctgtaaaataaatgttagtacatgagataaagtggattatagcaatgttgttaaactgctggttgcaacccattgatgggtcctgaccagcaagtaaaagtgcagctgggtgccgtggtgcatgccggtagtctagctacttgggaggctgacgtaggaggatcgcttgagtccaggagtttaaggctgtagagtgtaatgatcatgcctgtgaatagccactgtgatccaacctggacagcagggagatcccatctcttaaaaacaataaaaatgaaatagagcatatcagagggccttgttcgtaggaagtcagtattgttttgtggaacatttagttgtatgcgtacatgcaggtatgtgtattgagtctcattttaaagtatatttcttactggggttatcagaaagtttgaaaatcattagactaggggataggtatgctgagattttagtagtagagttttacctggacaaattgtctactttgaacctgactgccggcctgagtttgttcagggaagattgtttctaatctatttgctttttgtttgtttgttttggtgacggagtcttactctgttgcccaggctggagtgcagtggtgcggtctcagctcactgcaacctccgcctcctggattcaagtgattctcctgcctcagcctcctgagtagctgggaatacagacgtgcgccaccatgtctggctaatttttgtatttttagtagagacgagggtttcgccatgttggcaaggctggtcttgaactcctgacctcaggtgatccgcctgccttggcctcccaaagtgctgggattacaggtgtgagccaccgtgcccagcctgtttctcatctatttgtgtaagaattccatgtttacttactctagataacttcaaaagaaaaaaaactctggccaataaaatgccataggaatgtttagggatatgtggagtaggcattctttctaagttttcctgaagatgcaccaatgtttaacaagaaaggaagggcagtgtagaacacctattgctttctgcatggtaagagggatgggtattgggagagcccacacctgctgaggagtgcctttagactttgagcggtggtgtttctctccctcccagaaatagatctctttggggagacaggccatacaagacgtgaatctggtgacattttacttgtttgaagcaaaatttttttagatgatggagggtttttaaaaattgcttttaaaattaaaatttgaatagataagaagtaatcactataaaaaataatgaagcataaggaatgctagtattagctgggtgtggggcactcacttgtagtcccaactactggagaggctgaggcaggaagaatgcttgagcccaggagtttgagtccagcctgggcaacataacgagaccccatcttttaaaaaaaaaaaaaaagaaaaagaatgctaatatcgtgaacatttatgttcccaccacccaatttaagaaaaagaacaatacttttgaagtccactgcgtacccctccttgatcccatctctttcccttctcttttaggagttaactatcctgattccttgctatgctttttagtgtgatccctgaagaacgtatcactccattttgcatagctataaatttcatagaaatggaatcgtattgcatgtgttgtgtgatttgctgtttttgctcatcattatattcctgggattatccatttttaggtttatgtgtgactgtaatttattgtttagatgaaagttttcctggtttgacttgctctatcttcatatttttccttaagctaagggttcagcatacgaaggcagtattggtggcacttctttaacagtaccccatctcttctcctagccttgagggctgcacctagatgaacttgtgaggctcatttgaaccttttggaagcaccgaagcctgctgaagtttccagacatctgtatgaatctgttgtagttttttaatgttatatgctgaatataaaaccaagtaactcctgctggaaacatttacaatatcgattaacaaatactatcagtggctttgacatttttgtcagtttcttgatttttttccccgcttttgtctccccttcccccctccacattttggggcattgtgctgttaatagattttttttctgttcgtttgtttatatacctcctgtttccttctgatgttaatagatttctgacagtcagacttgtccacaagaactcaactggcaaggctgcttttctgtgctaaaactggggagctagtgggcaccatgaagatcttctgcagtcgggccaatccgaccacggggtctgtggagtggctggaggaggatgaacactatgattaccaccaggagattgcaaggtactgggttggtttacagcaggctgcagctgggtggggcacttgatctcaaagcagatgccttgggctccagtctgagcgtgggctaggctgtcacccagtgcttatgatgagggctggtgttggtcctgagcaggtctgctcagccaggtaggtatatgtagcagttaggcaaaatcatgcctgtttggagagtcagacattatgtagcagccttagcagagcctcagcatctgtttaacggagcaaagaaaacccaagcctcagtagtgttgatgaagttgaatcatttacttgccttactgaaatggtgacatgttcatcatatggttaaattcttttgaatgaaaaaaatgaaaatggttttttttttcccttagaagaaatatttaaaagtatgtgagttgttggccaggcgcagtggctcacgcctctaatcctagcactttgggaggccgaggtggccagatcacctgaggtcaggagttcgagaccagcctgaccaacatggagaaaccccgtttctactaaaaatacaaaattagctgggcatggtggctcatgcctgtaatcccagcttacttgagaggctgaggcaggagaatcacttgagcctgggaggcagaggttgtgttgagccgagatcgagccattgcactccagcctgggcaacaagagcgaaactctgtctcaaaaaaaaagtatgtgagttgttatgtagcaatcattaagtgcattcagtgtgccagcattgtgctaaggctgtggataccagatgaagaagatcctgttctcatcttcaaggaccatgcagttttgtggaagagacaggcacatacaaaattacagcacaaaagccaggcacggtggctcatgcccgtaatcccagcactttgggaggcaaagggcgggcgggcgggcggtggagggggtggtggcggctgatcacttgagggtcaggagttcgagaccagcctggccaacacggtgaaaccccgtctctataaaaaaaaattagctgggagtggtggtgggcgcctgtaatcccaggtactcgggaggctgaggcaggaaaatcacttgaactcgggaggtggaggttgcagtgagccaaggttgtgccactgcactccagcctgggtaacagagtgagactctgtctcaaaaaaaaaaaaaaaaaaattacagcacagtgagataaaggcacaagaggtcatggaagcagcaagaaccagctgaacttggggtgggaggtaatgtttgaataatttctcagttctaaaggaagagaaggtgaagtttgagcagcagggattacaggtaagctttcagatgagccagattgtggctgggtgcagtggcctacacctgtagtcccagctacttgggaggccaaggcaggaggattgcttatgcccacgagttcaacatagtaaaacactgtctcacaaacaaacaaagaccaaaaacaggctgggcacagtggctcatgcctgtaatcccagcactttgggagaccaaggcgggcggatcacctgaggtcgggagttcgagaccagcctgaccaacatggagaaaccctgtctctactaaaaatacaaaattagccaggtgtggtggcgcatgcatgcctgtaatcccagctgctcgggaggctgaggcaggagaatcacttgaacctgggaggcggaggttgccatgagccgagatcgtgccattgcattccagcctgggcaacaagagctaaactctgtctcaaaaaaaaaaaaagaaaaaaaaccacacacacacagatgggctattctggggagcagctagcagtttagtgcagctggagtgtggtacaaaagtactatggtaagagaggctgccgaaagcatacgcggggtcattttgtaaagggtggtagcaaaatgcaggaagaggaacatgagtttaagtccaagctttgccacttctttactctcttggccaagttacttctctgagccttaatataaaataatatatacttcaatatagtaatacattatctcacagtataatacaattatcttagaattgtttgatgattaaatgtaatacagtatctggtgcagaattagggcttaaaatatttacttttttttctttttttttttttgagacagagtctcgctctgtttcccaggctaaagtgcagtggcacgatctctgctcactgcaagctccgcctcctgggttcacgccattctcccgcctcagcctcttgagtagctgggactacaggtgcccgctgccacgcccggctaattttttgtatttttaatagagacggggtttcaccgtgttagccaggatgatcttgatctcctgaccttgtgatccgcccgcctcggcctcccaaagagctgggattacaggcgtgagccactgcacctgcccaggtcttaaaatatttctaaacattttggacattattttcttgttttattgttcagatggagtcttactctgttgccttggctggagtgcagtggcgcagtctcggctcactgcaatctctgcctcccaggttcaagggattctcttgcctcagcctcttaggtaactgggattacaggcatctgccaccacacctggctaatatttgtgtttttagtagagacttggtttcacctgttggccaggctggtcttgaacttctgacctcaggtgatccacctgcctctgcctcccaaagtgctgggattacaggtgtgagccacagtgtcaggcctggacgttattttctgagtgatatattaaacaggagagaaagaggattggattgcattttggaacactcactgagagcggtgtggagaggagagcatttggggatattgtagtcccagagctgcatagtcccagaggagacagctcgggggaacttgagtttggtaactcactggatatgatggagggagagagaagattcaagaagcaccaagacttctggttagaatgacaaagtggatggggcctgcaagggaggaatgggtggtgtggggaggggaacacgatggagattaggcgtttaggtttggacatccacatagagatgccaatggcagatagaattttgggtctggagacagaatttgtagttgttggaactgaaactgggagaggttgcagtctctcaagggggtgtggaatgtgaaaggtagagggctgaagaaggaatcccggaatagctgaggaggcaaagaagggcaagggagatagccagcatggaaaggaagaaagagggagtgtgtctagcaaggtcagaggcactgggaagtcccagatactgatgactgacatcagctgcaggagtgagctggtggtggttaccgagagtgatgtcagtggagtggtgggcagtaagtgtgaagaggccaggaaggtggtgagtgagatgccttttaaatagtgagcagaggtagaaaggactacatttcagctaagcatccatagctggcttcagatataaaaccttgatgtgccattaaaaaaaaaaaaaaaagaacccccttctttcagtgcaccgctcttcaaagtgtggaatgtggaccacctgtggcacaattgcctggagcacattagcccagccttctcaataagagtgagagtgtgtgtgtgtgtgtgtgtgtgtgtgtgttctgggactctgcatttcaggtaagctttctagtgattctagtgttgacccaaggctggagggcctctgttttaatgtgagctccttagctgtccccttgaattcccagaaagcgtggcagggcctgcctagttctgggtgctcatcccgaccccgcctgagggttttcagtgtgtgaattactgcagtaggaaatatggagaagtgattctcctccctttactacggtattggtgaactctttagttttccctgatgatgttaagtgaacgtgcccagtggggtacctgtcacatatacagtgggtgtatgtgagtgcttctctttccccggctgctctccctaataccgcatcagtggttatctccaggcagagatgtaggccaggttaggtcaagtattaggcagattgagtctgagtttttcctgaggaggaaaatgtgtagtgtatagcaagatcaagatgctagtggctgtggaattactgtgacagggctaactgccgagaccagctcggtcgtggagaccctaacccagtggcgctagaggaattaaagacacacacacagaaatatagagtgcagagtgggaattggggggctgacagccttcagagctgacagccacgaacagaactttacctacatatttattgacagcaagccagtgataagcattgttcctatagattatagattaaaacgggaaacaaagggatgggctctggctagttatttgcagcaggaacatgtccttaaggcacagatcactcatgctattgtttgtggttcaggaacgccttaagcgaaagccgccctgggtgggccaggtattccttgccctcattccagtaaacccacgaccttcagtgtgggcatcatagccatcaacgagcatgtcacagtgctgcagagatttgtttatgaccagttttggggcctgtttttggccagatttgggggcctgttcccagcagctaactactggagcatttttaggtctgagaacatctttctctgagacttttttctgcagcactagagaataacagcttgaaactctattaaaataaagtggccaggtgcagcgacggatgcttgtattgtagttctgctgaggcaagaggatctcttgagctaaggagttcaaggctgcagtgcccaatgattgaggctgttcatagccactgcactacagcctgggtgacataacgagaccctgtttctaaaaataaacaaaaaaataggccaggcgcagtagctcacacctgtaatcccagcactttaggaggccaaggtgggcggatcagttgaggtcaggagttcgagaacagcctggccaacatagtgaaaccccatctctaatgtaaatacaaaaattagccaggcgtggtggtgagcacctgtaatcccagctacctgggaggctgaggcatgagaatcacttgaacttgggaggcagaggttgcagtgagctgagattgcaccactgtactccagcctgggtgatggggtgagaccctgtctcaaaaaaaaaaaaataaataaagataaaagacaaccaaaaaatagtttaaaatagatgacacgtttgttctatctgtttagcaatgtgtttatatatgtgaatactcttgtgtgttgatgtgtatcatgcaaaggttactgacttttttgttttttaggtcatcttatgcagatatgctacatgacaaagacagagtaagtgtaaaaggaaactattatcttgatgtggggtgttttgaagtcttggattacaagaaggttaagaatccctgggggtcatgatgttaaatgatactgagaggcgtatggtgtagaagtcaggaaatcagttgggagactgggtcctacttctggctctatttttgttgtttaatctcccagctttatcaagatagaactgacaaataaaaatggtctatgtttatggtaatacaatgtgatgaatatatgtgtatggtgtaaaatgattgaatcaagctaattaacaaatctaccgcctcatacttttttgtgtgtggtgagaacatttaagatctactcgcttagtaatttttaagtgtacattattaactatagctcacaatgccgtacagcagatctccacaacttattcatcctatctgactgaaacatcagatcctctcccttagcaggtaccattctctgggcttctgagttcaacatttttttttttttttgagacagaatctcgctctgtcactcaggctagagtacaggggcgagatctcggctcactgcagcctcagtctcccgagttcaagcgattctcctgcctcaacctgcctaagtgttgggattgtacctagtattgggataatactattattatactattatacctagtattgggattataacttgggattacaggtgcgtgccatgacacctggccttcactgtagttttaatttccatttttaattttaattttatttttttgagactgggtctctgttgcccagtgcagtggtgtgatctcggctgcactgcagcctagacttcttgggcttaagcgatcccccaacctcagccttcccagtagctgggactacaggcatgccaccatgcctggctaatttttgtatgttttgtagaggcagagtttcgctgtattgcccaggctggtcttgatcccctgaggtcaagtgatccacccgccttggtctcccaaagtgctgggattatgggcatgagctactgcgcccggccatcgtgtgcttgtttaccatgtgtatatctttgttctagtctagggttatgaacataggtgtgattcttgatagacactgccacattgccttcaaaaagggttccagattcactgtaatatcttcaaaactgggtcattaaaaagtgacagctaatttaatggcatcgttaaagtgaaggctgtgccatccctggtttacaattgaggacgctgttcatcaattttttttaacttaaaaaataaataaaacaaggccaggcacggtggctcatgcctgtaatcccagcactttgggaagccgaggcaggcagatcacggggtcaggagatcgagaccatcctggctaacatggtgaaaccccgtccctactaaaaatacaaaaaaaagccgagcgtggtggcgggcagggcctgtaatcccagctactcaggaggctgatgcgggagaatggcgtgaatctgggaggcggagcttgcagtgagccgagattgcaccactgcactccagcctgggcgacagggagactccgtctcaaaaaaaaaaattgtggtaaaaacacataacataaacggtcatactgattgtatctaagacataaatgcacttactttgacaatgaaatagttctatatttctgtgaaaaattatttcacccagactaaacatttttgtgctttacctcagaggcaacgtcatttcttttttttcttttttctttctttctttttttttttttaacaagaatgagtctccctctgttgccaggctttagtgcagtggtgtgatcttagctcactgcaacctccacctcccgagttcaagtgattctcctgccttagcctcccaagtagctggggttacaggcatgcgccaccatgcctggctaattttttgtatctttagtagagatggggtttcaccatgttggccaggttggtctccaactcctgacctcaagtgatccacccgcctcagcctcccaaagtgctgggattacagatgtgagtcactgcacccggcctggtaattctaaagaatattcagttctagatattttctaattccagtctgatttagtcttttgcctatcagtttagaagtgtgtttcttaatgtatgaaaaattttttttcttcagttgtgtttctgatattaagatttttgacttgttttgcattgtggtcagaggatatcacccttttgatgccagttctgtattagctgtctaatgttatttaacaaattaccttaaattttaatagcctcttaatatttcttactaacttggcaggtcatcagtctatttaaaagatttgcacatattttttccatcatctttagttattttcaacagaagggtcactgtgcctattgagtcagaccgttatagatgaaagatgtatgtgtttactaaagacagaagtaaaaatcttcaagatgcaaagaagttattttctgatggggaaaatactttttagtgaagctctctgagttagagtcggtaaaggaaaacaagccatacatattgcagcagagcggctttaacacaaggagctggctacccagctgtgggagggctagaaagcaaatgggaacgctgagtaacctaacagtagagattgcagggagcagttaccttgcctagggctgagaaactaaacgagaagattaggatttccagaagccacaagcattgaggagagatcctgtggaccactgtccaagtacggctgcagctctgaggggcccaaggagctggttatgggatcattgggaaaagttggagtctgcaatcaactgcccctaccgagaggaccctgatgagaacagcagcatgcagaaaggagcaagcctgctctgtcctcctaccttccagtcgccctcttggtcccccttttggctgtacctaacagttggaaaaaggagaacatggtttgcagggctctggcatcacttagtagaggatagaagagtgagtgtggagcagggacagtcgcttaataaagggcaaggggctgactcacaagacctgcccaactcagccagagctgttctgccaggggccagaaaggccatagggccctgacttgcactgccactgccagctgtgactctagaactttgcaaagcacctttccacttacttataataactggtagtaagtgacggccatgtcttccttagaatgtaaaatactaccaaggtatccgggctgccgtgagcagggtgaaggacagaggacagaaggccttggttctcgacattggcactggcacgggactcttgtcaatgatggcggtcacagcaggtgccgacttctgctatgccatcgaggtaagccattcccttcaggtgtgtgtcctgcatcttgcatgggaaatcccctatgctcttgcactttccccgtctgttccttcacaaacattcatggagtgctcactctgtgccaagcacagagccaggctctgagcgtatagagatgagtcagacacagttccttcctccaggagctaattttctcctctgtcagcctaggctgcacatcagaatcactaggagctttagaaaatacttacaggctgggcacagtggctcacgcctgtaatcccagcacttcgggagggtgaggcaagacaattgcttgagcccaggagtttgagaccagcctgggcaacatagtgagatcccatctctacagaaaaacttttaaatattagctgggcatggtggcatgtgcctgtgttccagctattcttgaggctgagatgggaagatctcttgagcccggaaagtcaaggctgcagtgagccatgatttggacttcatgtaagaaagcaaaaaattacttctaccttgtttaagccagttattgtgggactttgttgtttccaactaatcagtatatgaactcagttttgtaggggaaagtatttaaatacatgcccccacaccaccacactccagcctgggtgacagagtgagactttatctcaaaaaaatcaaaacgaaacaaaggctgggcacagtgtctcacccctgtaatcccagcactttgggaggccgaggcttggatcatgaggtcaggagttcaagaccagcctgaccaacatggtgaaactccatctttactaaaaatacaaaaattagccgggtgtggtgatgcgcgcctgtaatcccagctactcaggaggctgaggcgagagaatcgcttgaacccaggaggcagaggttacagtgagccgagattgcgccactgcactccagcctgggcgacagagtgagactccatctcaaaacaaaacaaaacaaaaaaaccttatgcctagtccccagccctaacagattttgatttaacttttctggggtgaggcctgagccttgggacttgggaatgtgcggcaaggttgagaaccactaccttaaatgtccctatggagtcagctctcttatgtttaccaatttgtcatttctttaataaaacattaaacagcttgagcccacagagcaagaaaaattaaaaaccaaacaaaattaaaaattaaacatgttatttttctcataaaacaaataatgcatattattataggaaatttggtaaataccaaataaaaatagtatgttgacccaaagttaagtactgttaacattttggtgtatattcttccaagttttgggggcaggcagggagcatgtatataaatactttccctacaaaattgggttcatgtagtgattgagttggaaataacaaagcctcaaaatcactgtggtttaaggtagagtagttttttgctatctttttcgtggcgtgatctctattcaccgcaacctccgcctcctgggttcaagcaattctcttttctcagcctcccaaatagctgggattacaggtatgtaccactgcacctggctaatttttatatttttagtagagatagggtttcgccatgttggccaggctggtcttgaattcctgatctcaggggatccccccacctcagcctcccaaagtgttgggattacaggtgtgaatcactgcgccctgccttgttcctcttttttaaaagtaagaataactttcccaggaatttctattatagcaaacctctccttgggtaccatcggctagaatgaggttaaatctcatttcttatctctggcaagagggattcagttactcttagctcagacaagtgcaccactgcaaaggtcagttccccacgctgcaccctcacctgatttcaggggagaggaggacacagaatggatgtcgggaggtcatcttcagtgtccactcctggtagtgttttgggtgagatcttgagcttcttgatgggctgaggagaaggaggtgtgaaggtaccagcttgcaggttcagggagaggtgactgatgagtcagaaggcagcaggggtgagggacgacactggctttggatattgtcagggtggaggcaaagtgattggtgagaactagggtttaaggccctcaaaccacatctaaaaacatcaaggcaaatcctagaaataatttgaaatagatgatgaagatttttctaggagaacatgtgtgtgtattccatgtaaatactgcgcgctaatcaattgcacaactggagctgctcacgtaagtactctttacgaaaggatacagcatttgtcccttgattatagtaaaaaatatagtattcatggtagaaaatgtgggaaatacagaaaaggatttagaaaaaaggaaaatcttatcaggaacagtctcggtatcattttgtggtttccacttcgtgtgtagggccacacgtgagtctgtttgttttacatgctagagctcttggggctgtggaatctagactggataagttgaaaacaaagagttggaggtgcttatttatgttcagggaaactcgaagagttcagggaagacttctggatgggggattcatgctgccctgggaagtggggtttgatttggcaggtggggccaggatagggaaggctcagtgatcatgagatcattgtggctggagtgttggttgttgggggaatgggggaggaagactgggaaggtaagggagggcctccaaagcagtagtttccccttatctatggtttcacttttcgtgatttcagttacctgtggtcaactgaggtccaaaaatactaaatggagccaggtgcggtggctcacgcctgtaatcccagcactttgggtggctgagacaggtggaaaccttgagtcccagagttggagaccagcctgggcaacatggcaaaaccccgcctctacaaaaagtagctgggcatggtgatctacgcctgtagtcccagctacttgggagattgaggtgggaaattgcttgagcctgggaggtggaagctgcagtgatcatgccactggactccagcctggacaatagagtgagacccttctcaaaaaaaaaaaaaagaaaaattaaatggaaaattccagaaattatttataagttgtaagttgtgtaccattctgagtattattacataattgttctatttttagttattgttaatttataaattattatttatatttattattgtgcctaatttataaattaaacctggtcataggtaagcttggaggctgaagcagctccactgtgaatgctaatcctccacgctgacttctgaccaaccccagcttcaggaatgcctctaaaatttccgctctcatgcactttgatgtaaatcctgccctcaggtcagaacaactttgatgttatcataaatacatacttaccgtaaatcctgcccttcgtcaaattccctgtggtatgtaagccctgcgtctgagccataacagtgtgggggcccagtttctcactgcccgagacaaggcttctgtttgtatgtctctataaagtgtgtctttctgagaagctggatttgccagtctttcctcagcctctcagctcccgtggcctgttggggtaggtttgcatagagctgcccaccatggaacagtatgtatgtatagcaaaaaaaaaaaaaaaaaaaaaatggtatacataagggtcagtactgtctgaggtttcaagcatccaccaagggtcttaaaatgtatcccccatggacaagaggcactgctgcaccataagaaaatagaggctgtgttctgccaacagtggggatttgggacaattttgagcccagaggatgacctacttactcacacctacagtctgctctcctctggagggcacagcacgcctcccaggttcgtgaggcaagtccctttcctggctttttggcgtcctcttgtgcggtactgacacctactgctcttactaagtagtgcagcctcctcaggatccccggcatccccgctgtgcctggcacggaatgagagtccctaatcacaagttaaagccagctgaatctcagccctttttcatgatgcacatttggagaataaagtatttaagttacatatcttaggaccagaatcaaggaatagcttgctcaccttaaaggtcagactactgtttaatttattgctcatttttccttgggtttcggctctattttctaggttttcaagcctatggctgatgctgctgtgaagattgtggagaaaaatggctttagtgataagattaaggttatcaacaagcattccaccgaggtgactgtaggtccaggtgagatttacacaccctgtgttgaaagctttgcttgctcttgtgtgagagaggaaaagggttattccagttacctggaacaaatccaggtcatagcatagaagtgggacctctctgtgtggagctctgacagtaaggacttggtttctcttgatgtttattttcctgctagttaaaactagtcaacaaggagtagactagagctagtcaggtccagcaatggagacgcaaacaaaacctacatttgctttaagcaaattggaattcttatggggctcaactcttgagtttcaactaccaataattacgccttggataaacctcattggctacgatactgccactgctcaaagctcaactctgagtttcatcaggcagaaagtacttagttcttttatttatttatttttttgagagagagtctcactctgtcgcccaggctggagtgcagtggcgctatcttgcctcactgcaagctctgcctcctgggttcacccatcctggctaacacggtgaaactctatctctactaaaaatacaaaaaattagccaggcatggtggtgggcacctgtagtcccagctactggagaggctgaggcaggagaatggcgagagtagttctgacattctgcttctgcatacaacatgaacaattttcctgtatagcattgtctcttaaggtttccagaatatgtatatgtacacacacacacacacacacacatattttttttttgagacggaatctcactgtgtcacccaggctgcattgcagtggtgcaatcttggctcactgcatcctccacctcctgggtacaagtgattctcctgcctcagcctcccaagtagcggtgattacaggtgcctgccaccacacctggctgctttttgtatttttagcagagacggggtttcaccatgttggccaggctggtcttgaacccctgacctcaggtgatccgcctgcctcagcctcccaaagtgctaggattataagcgtgagccaccatgcctggcctccagaatattttttatagtctagaactttgtttcagtctttgaaaatttcacatgccactgacacttagagaacatagttgaaagatttgcaaaggaaaaactgtggtgaagttatggataacaccatgggttttttctaattttttgtggagatagggtcttactatgttgcccaggctggactcaaactcttatgctaaagtgatcctcccatctcagcgacccaagtacctgggactacaggtgtgcactactgcacctggctttttcaccacggttttggagaatgcagtatcattctgaattgaagcttctacctaaggtcaacattattctcccatttaacaatttttttttaatggagaatctgaaacatgtacaaaagaagtgggtactatcttatttatttatttatttgagacagagtctcactctgttgcccaggctggagtgcaatggcaggatctcagctcactgcaacctctgcctcccatgttcaagcgattctcctgcttcagcctcatgagtagctgggattacaggcgtgcaccaccatgcctggctaatttttgtatttttagtggagacggggtttcaccgtgttggccaggctagtcccgaactcctgacctcaggtgaccagcctgcctcggcctccgaaagtgctgggattacaggtgtgagccaccgcgcccggcctatcttttttatttttaaaatatacaatagagtgctcaaatcattccatttacaatcaacgttattgaagtatgatttacattaaatgaatatccattttcattatggatatttgacaaatataaacacacttgtaaccaccatcaccataatgaagataatagaacatctccatcatgcccaaagagattcctcataaccctttctatcagtccccccatatcctggtcctaggcacccactcatagacttcattatagattagatttgcctgtctaggatttcaaggaagtggaatcaaagaagtgtggactcttctgtgtgtgtgctctcttttttatagcgtgatgctggtaagattcttccacactgttcatgtcttgggggtccgttcttttgtgttactgagcagcactctattagatagatgtaccataacttgtttatctctctacctgttgatggacagggatttcttggataggtctttagattcactgatcttttcttttgcagcatctaatatgctgttaagtatatttagtaaacttttcatttctctttctttgttgttcttttttttttttttttgagacaggatcttgacctgtcccccaggctggagtgcaggggtgtgagcatggcttattgcagctttgacctcctgggctcaagcagtcctcctgcttcagcctcctgtgtagctgggaccacaggctcatgccaccatgcctggctaacttaaaaaaaatttttttttgtagagatgggatctcagtttgttgcttaggctggtctcaaactcctgggctcaagcgattctcccacctcagcatcccaaagtcctaggattacaggcgtgggccgctgtgcctggcctcatttttgatattgtattttttaatctctgaaagttccacttgattctttttcataacttccatttttctcatgttcatagttttctataagcacatttattttagctttttgaacatccttatcttctgttcccaccatctttgttttttctgggtttgttctcttgactcatttttatccttattctgggtcacattttccttcttcacatgtctaaccatttttgtttggatgctgtggctatttggaattccccattgttgagtgctagacttcgttggttttgctttttaaactttggcatgcagttgggttacttgcagttcagattgatcctttcagggcttgtttaagctttctttggagtggggttagagtagctttaagtcaggccttctcaacagtagtgctgtgacgttttggcattctccaactatgtgacattttgataattctttgttgtggaccctgtcctttgcattgtaggatgtttagcagtgtccctggcctcttcccagtggatgtcagtagcactcccctcctcccaccattcttgccaactaaaaatgtctccagactgccacgtcttccttggtctcgagtgtgtaaaattgccacctgttgagaaccactgctctaaggctgtttagccagacagttactgtaacctttctggagtgtctgctgagagctctaggtgctcagcagggtttcccttgtctggctgatcagaacttgaatgtttcccaggcctctgagagctccggagattgttatcactcatgcaacctttgctcggcttcacagagtattaccctgtgtgtgtgtgaatgtattaacacagaccctagaggaaccctgtgcagcattctgaaggctttttttctgtgtaatttcctctctgattctctgcctggcaagttccagctgcttccacttccctgaactcgtttcctgtctgtttaactcagcaagactgccgtgctctgtgtcacctcttaccctatactgtggtctggaaagggtctcctggctgatagccagagcagggtaagggttacttggtttgtttcccttcttagggagcaaactgtgttgcctcttgctcaacatctgaaaacacttgtttcatatattttgcccagttttctagttgataacagccggagggtaagcctgatcccacttattccactatggccagagtggagattgattcatttatttatttttttttgagacagtctcactctgttgcctaggctggagtacagtgatgcgaacacagctcactgcagcctcgacttctgggctcaagtgatcctcctgcctcagcctcctgagtagctgggaccacaggcaggcgccaccatacccaactaatttttttgtttttttaaatttttattagaaactaagtcttgcggctgggtgcagtggcttatgcctgtaatcctagcactttgggaggccgaggctggcggatcacctgaggttgggagtagcaaccagcctgaccaacttggagaaacctgtctctactaaaaatacaaaattagtcaggtgtggtggtgcatgcctgtaatcccagctactgaggagattgaggcaggagaattgcttgaacctgggaggcaaaggttgcggtgagccgagattgcgctattgcacttcagcctgggcaacaagagcaaaattctggctcaaaaaaaaaaaaaaagaaaagaaaagaaactaggtctcgctttgtttcacaggctggtcttgaacgccaggcctcacacagtccttctgcctcagcctcccaaagtgctgggatcacagatgggagccactgtacctggcgagatcatttattcttgaaaatttatccattttgacggcagggagactgatctgcagggcagccttggccatgaagtatgctgactctgcctccaggcagcattgttcacacacacctcagcttaggccaggcccctcatatgatttcttattaaaaaaaaaaattttttttagatagagtggctctgtcgcccaggctggagtgcagtggcatgacctcggctcactgcaacctccacctcccggattcaagtgatccttccacgtcagcctcctaagtagctgatattacaggcatgcaccaccacctggctaatttttgtatttttagtagagatggggtttcactatgttggccaagctggtcttgaactcatgacctcaagcgatctgcctgccttggcctcccaaaatgctgggattacaggcatgaaccaccacgcctggccaatttcgtaatacttttcttcatagcgcttaccactgcaatcattaaatcattatgtagttatgtatttaatgtctgtatccccacccagctgaggcatcctgaggtcatgcactgcgtgggttgtattaactattccattccgttatttgctccgggcctgtcatgtaaaggagttaggtaatttttgtaaagtgagtagattgtcagttgtgcttcatccataatcccttgtaaatgtgactttgtttccgatcctcagcctgacaagtggcttcctcattgccaagttgggtggtctttcctctgcttttcctctctaaccactgccgctttggtacttctgccattccttccttcttgaaactctccctggaccttagtgacatctcttcatcttggttctcctgtgttgctttctttctgctccagatgtatactttccaaggttctgctctcagccctttttaaaagtggcatctgaagttgcctgttccccagagctgggttacatgctgaggcttgtggagagccaacccagggagcagcgtgtgttcatccgtccattttgttcatttggaaagggcttaggaagctcctggggtggctacctgcttcagactcccccaccccgtgcccttatacattagcagtcacactcaaaataccaggccctcaagaagtacttgttaaaatgcactggaccataaagcttgaattttttttttttaatttttattattttttgagacagtctcactgtatcacccaagatggagtatggtggggcaatttcagctcactacaacatctgcctcccgggttcaggcaattctcatgcctcagcctcctgagtagctgggactacaggcgcgtgctactacacccggctaatttttgtatttttagtagagacaaggtttcaccacattggccaggctggtatcgaactcctggcctcaagtgatcagcccagcttggcctctcaaagtgctggaattacaggtgtgagtcactgtgcctggctcttgatttttattttaatgaagcaatttggactataaagcattttaagttatataattggtttaaacattcaggagatagaattggcagagtgggtgatcagtgggttgtagggtgacagaaatcaataatttatctaatgtgtgttgactgttacggggcactagaccttgtgggtgctggggtacagtagtggacaggcagtcagcggtcctgctgtcctggaactagtaaatgatgcccagattcctggactatgtgactcattgattgattgaggcagaaaccctggagggaggagcaggcgtgttagctggggtgggtgggatgagttttggacagtgtattccagttggagtttgatgtgacatcagagaggatgggcagggcttctcgggagggtggtctctgtggcagaagacagaagtttcttcttaagctcctccacgtgatactgtcatggagcacaggtgagcttcataggaagtgtgcttttttttttttatcttcatcatcccgaccaccaccacatgagacagagcccattcacccgttttactgatgaggcaactgatggtcagaacggagggctcagggataggaagtgagatccaggccaggctccagcctcgagctcgaggttcacgctgtctctgttgtgctcttctatcagctgctctctttcttttttttttttttttgaaatggagtctcactctggcccagattagagtgcagtggcgtgatctcggctcactgcaacctctgcctcccaggtttaagtgattctcctgcctcagcctctcaagtagctgggattacaggcacccatcaccacgcctggctaatttttgtattcttagtagagacagggtttcaccacgttggccaggttggtttcaaacttctgacctcaggtgatctgcccatctcagcctcccaaagtgctgggattacaggcgggagccaccgcgcccggcccctgtcagctgctttcatgcttctcttttccttgtgtcatctgtgagacttgtgctctgtgtaggggaaatgagtgggctttgtcagattataattcatgaggcattaaaagtgtttacagttaattctccctgatgaatagccccttccaaagtctattttggctcttggctcattaaaaattataattgtagaagtagcagtacattactgaggtttagaaaacagttaacagaagatccctcccaaatcctactcttctctaaaatcctactgtcctaaaacaactgttatttaagagattgtttggtgacaaggcgctttcattaagggaatttgccatagtgatctggggattctaagtcatggatctcaattttggctgccagagcctaactcacagtagctggaagatcatcagagaaccttgttgtcttgctttggctttccctccctctccctgcaacctagaagtatttgacataccagcattctgtttttgcttttcaaataatttttctaatttagtggttaatagtttaattgttaatttatatctctctaattgctaatagggatgaaaaagttttcataagtttgatttctgttttgaattttctgtttatatttttacctggtttctttttgggtgtgtgttttttttgtttgtttgagacagagtctcactctgtcgcgcaggctggatcactctgtcgcgcaggctggagtacagtggcacaatttcggctcactgcaacctctgcctcccaggttcaagtgattctcatgcctcagcctcctgggtagctggggttacaggcgtgtgccatcacacctggctaatttttgtatttttagtagagatggggtttcgccatgatggccaggctggtcttgaactcctggcttcaagtgatcctcctgccttggcctcccaaagtgctaggattacaggcgtgagccaccatgcctggctaatttttgtattttttgtggaaatggggttttgtcatgtttcccaggctgatctcaaactcctgaactcaatccattgggtatttatagttttcttatcattttttgcagtctccctcccaatattaagcatacagaatagctgtaagagcagtacagtaaacacttatgatcccttaccctagatttatcaattagcgttttgtcatacatttacatatggattttttttttttcctgaaccattggcaagtcagttgcagacatcctgacacttctgaatacctcagcatgtatatgtgcttttagcgtgatggccccttaaccacttatctttcccatatttgctgtaaatatttttcctagtctgttgcttatgtccaactctgttttcttgtgtttttcagagggtgacatgccatgccgtgccaacatcctggtcacagagttgtttgacacagagctgatcg

SEQ ID NO: 13543 - DNA, 562 bp, Homo sapiens
cgcggtaaaagtggtagcagcggaggcgagcggagggtttcccgcggcgggtgaggcgctggatttctgacagtcagacttgtccacaagaactcaactggcaaggctgcttttctgtgctaaaactggggagctagtgggcaccatgaagatcttctgcagtcgggccaatccgaccacggggtctgtggagtggctggaggaggatgaacactatgattaccaccaggagattgcaagaatgtaaaatactaccaaggtatccgggctgccgtgagcagggtgaaggacagaggacagaaggccttggttctcgacattggcactggcacgggactcttgtcaatgatggcggtcacagcaggtgccgacttctgctatgccatcgaggttttcaagcctatggctgatgctgctgtgaagattgtggagaaaaatggctttagtgataagattaaggttatcaacaagcattccaccgaggtgactgtaggtccagagggtgacatgccatgccgtgccaacatcctggtcacagagttgtttgacacagagctgatcg

SEQ ID NO: 13544 - DNA, 5733 bp, Homo sapiens
catgaagatcttctgcagtcgggccaatccgaccacggggtctgtggagtggctggaggaggatgaacactatgattaccaccaggagattgcaaggtactgggttggtttacagcaggctgcagctgggtggggcacttgatctcaaagcagatgccttgggctccagtctgagcgtgggctaggctgtcacccagtgcttatgatgagggctggtgttggtcctgagcaggtctgctcagccaggtaggtatatgtagcagttaggcaaaatcatgcctgtttggagagtcagacattatgtagcagccttagcagagcctcagcatctgtttaacggagcaaagaaaacccaagcctcagtagtgttgatgaagttgaatcatttacttgccttactgaaatggtgacatgttcatcatatggttaaattcttttgaatgaaaaaaatgaaaatggttttttttttcccttagaagaaatatttaaaagtatgtgagttgttggccaggcgcagtggctcacgcctctaatcctagcactttgggaggccgaggtggccagatcacctgaggtcaggagttcgagaccagcctgaccaacatggagaaaccccgtttctactaaaaatacaaaattagctgggcatggtggctcatgcctgtaatcccagcttacttgagaggctgaggcaggagaatcacttgagcctgggaggcagaggttgtgttgagccgagatcgagccattgcactccagcctgggcaacaagagcgaaactctgtctcaaaaaaaaagtatgtgagttgttatgtagcaatcattaagtgcattcagtgtgccagcattgtgctaaggctgtggataccagatgaagaagatcctgttctcatcttcaaggaccatgcagttttgtggaagagacaggcacatacaaaattacagcacaaaagccaggcacggtggctcatgcccgtaatcccagcactttgggaggcaaagggcgggcgggcgggcggtggagggggtggtggcggctgatcacttgagggtcaggagttcgagaccagcctggccaacacggtgaaaccccgtctctataaaaaaaaattagctgggagtggtggtgggcgcctgtaatcccaggtactcgggaggctgaggcaggaaaatcacttgaactcgggaggtggaggttgcagtgagccaaggttgtgccactgcactccagcctgggtaacagagtgagactctgtctcaaaaaaaaaaaaaaaaaaattacagcacagtgagataaaggcacaagaggtcatggaagcagcaagaaccagctgaacttggggtgggaggtaatgtttgaataatttctcagttctaaaggaagagaaggtgaagtttgagcagcagggattacaggtaagctttcagatgagccagattgtggctgggtgcagtggcctacacctgtagtcccagctacttgggaggccaaggcaggaggattgcttatgcccacgagttcaacatagtaaaacactgtctcacaaacaaacaaagaccaaaaacaggctgggcacagtggctcatgcctgtaatcccagcactttgggagaccaaggcgggcggatcacctgaggtcgggagttcgagaccagcctgaccaacatggagaaaccctgtctctactaaaaatacaaaattagccaggtgtggtggcgcatgcatgcctgtaatcccagctgctcgggaggctgaggcaggagaatcacttgaacctgggaggcggaggttgccatgagccgagatcgtgccattgcattccagcctgggcaacaagagctaaactctgtctcaaaaaaaaaaaaagaaaaaaaaccacacacacacagatgggctattctggggagcagctagcagtttagtgcagctggagtgtggtacaaaagtactatggtaagagaggctgccgaaagcatacgcggggtcattttgtaaagggtggtagcaaaatgcaggaagaggaacatgagtttaagtccaagctttgccacttctttactctcttggccaagttacttctctgagccttaatataaaataatatatacttcaatatagtaatacattatctcacagtataatacaattatcttagaattgtttgatgattaaatgtaatacagtatctggtgcagaattagggcttaaaatatttacttttttttctttttttttttttgagacagagtctcgctctgtttcccaggctaaagtgcagtggcacgatctctgctcactgcaagctccgcctcctgggttcacgccattctcccgcctcagcctcttgagtagctgggactacaggtgcccgctgccacgcccggctaattttttgtatttttaatagagacggggtttcaccgtgttagccaggatgatcttgatctcctgaccttgtgatccgcccgcctcggcctcccaaagagctgggattacaggcgtgagccactgcacctgcccaggtcttaaaatatttctaaacattttggacattattttcttgttttattgttcagatggagtcttactctgttgccttggctggagtgcagtggcgcagtctcggctcactgcaatctctgcctcccaggttcaagggattctcttgcctcagcctcttaggtaactgggattacaggcatctgccaccacacctggctaatatttgtgtttttagtagagacttggtttcacctgttggccaggctggtcttgaacttctgacctcaggtgatccacctgcctctgcctcccaaagtgctgggattacaggtgtgagccacagtgtcaggcctggacgttattttctgagtgatatattaaacaggagagaaagaggattggattgcattttggaacactcactgagagcggtgtggagaggagagcatttggggatattgtagtcccagagctgcatagtcccagaggagacagctcgggggaacttgagtttggtaactcactggatatgatggagggagagagaagattcaagaagcaccaagacttctggttagaatgacaaagtggatggggcctgcaagggaggaatgggtggtgtggggaggggaacacgatggagattaggcgtttaggtttggacatccacatagagatgccaatggcagatagaattttgggtctggagacagaatttgtagttgttggaactgaaactgggagaggttgcagtctctcaagggggtgtggaatgtgaaaggtagagggctgaagaaggaatcccggaatagctgaggaggcaaagaagggcaagggagatagccagcatggaaaggaagaaagagggagtgtgtctagcaaggtcagaggcactgggaagtcccagatactgatgactgacatcagctgcaggagtgagctggtggtggttaccgagagtgatgtcagtggagtggtgggcagtaagtgtgaagaggccaggaaggtggtgagtgagatgccttttaaatagtgagcagaggtagaaaggactacatttcagctaagcatccatagctggcttcagatataaaaccttgatgtgccattaaaaaaaaaaaaaaaagaacccccttctttcagtgcaccgctcttcaaagtgtggaatgtggaccacctgtggcacaattgcctggagcacattagcccagccttctcaataagagtgagagtgtgtgtgtgtgtgtgtgtgtgtgtgtgttctgggactctgcatttcaggtaagctttctagtgattctagtgttgacccaaggctggagggcctctgttttaatgtgagctccttagctgtccccttgaattcccagaaagcgtggcagggcctgcctagttctgggtgctcatcccgaccccgcctgagggttttcagtgtgtgaattactgcagtaggaaatatggagaagtgattctcctccctttactacggtattggtgaactctttagttttccctgatgatgttaagtgaacgtgcccagtggggtacctgtcacatatacagtgggtgtatgtgagtgcttctctttccccggctgctctccctaataccgcatcagtggttatctccaggcagagatgtaggccaggttaggtcaagtattaggcagattgagtctgagtttttcctgaggaggaaaatgtgtagtgtatagcaagatcaagatgctagtggctgtggaattactgtgacagggctaactgccgagaccagctcggtcgtggagaccctaacccagtggcgctagaggaattaaagacacacacacagaaatatagagtgcagagtgggaattggggggctgacagccttcagagctgacagccacgaacagaactttacctacatatttattgacagcaagccagtgataagcattgttcctatagattatagattaaaacgggaaacaaagggatgggctctggctagttatttgcagcaggaacatgtccttaaggcacagatcactcatgctattgtttgtggttcaggaacgccttaagcgaaagccgccctgggtgggccaggtattccttgccctcattccagtaaacccacgaccttcagtgtgggcatcatagccatcaacgagcatgtcacagtgctgcagagatttgtttatgaccagttttggggcctgtttttggccagatttgggggcctgttcccagcagctaactactggagcatttttaggtctgagaacatctttctctgagacttttttctgcagcactagagaataacagcttgaaactctattaaaataaagtggccaggtgcagcgacggatgcttgtattgtagttctgctgaggcaagaggatctcttgagctaaggagttcaaggctgcagtgcccaatgattgaggctgttcatagccactgcactacagcctgggtgacataacgagaccctgtttctaaaaataaacaaaaaaataggccaggcgcagtagctcacacctgtaatcccagcactttaggaggccaaggtgggcggatcagttgaggtcaggagttcgagaacagcctggccaacatagtgaaaccccatctctaatgtaaatacaaaaattagccaggcgtggtggtgagcacctgtaatcccagctacctgggaggctgaggcatgagaatcacttgaacttgggaggcagaggttgcagtgagctgagattgcaccactgtactccagcctgggtgatggggtgagaccctgtctcaaaaaaaaaaaaataaataaagataaaagacaaccaaaaaatagtttaaaatagatgacacgtttgttctatctgtttagcaatgtgtttatatatgtgaatactcttgtgtgttgatgtgtatcatgcaaaggttactgacttttttgttttttaggtcatcttatgcagatatgctacatgacaaagacagagtaagtgtaaaaggaaactattatcttgatgtggggtgttttgaagtcttggattacaagaaggttaagaatccctgggggtcatgatgttaaatgatactgagaggcgtatggtgtagaagtcaggaaatcagttgggagactgggtcctacttctggctctatttttgttgtttaatctcccagctttatcaagatagaactgacaaataaaaatggtctatgtttatggtaatacaatgtgatgaa

SEQ ID NO: 13545 - DNA, 382 bp, Homo sapiens
catgaagatcttctgcagtcgggccaatccgaccacggggtctgtggagtggctggaggaggatgaacactatgattaccaccaggagattgcaaggtcatcttatgcagatatgctacatgacaaagacagagtaagtgtaaaaggaaactattatcttgatgtggggtgttttgaagtcttggattacaagaaggttaagaatccctgggggtcatgatgttaaatgatactgagaggcgtatggtgtagaagtcaggaaatcagttgggagactgggtcctacttctggctctatttttgttgtttaatctcccagctttatcaagatagaactgacaaataaaaatggtctatgtttatggtaatacaatgtgatgaa

SEQ ID NO: 13546 - DNA, 13817 bp, Homo sapiens
agctttccagttctgctttaggacccgccccccagcacgctcctcgacgctgcgaggtcccgccccgcgtgctggccgcggtaaaagtggtagcagcggaggcgagcggagggtttcccgcggcgggtgaggcgctgggtatgctgggaaggtggggtcgctttggggttctgtgtgcagcgagcatggtgtccttggcaccagggtttcggcagaggagcctagcgtgggcctacttggactcctccgcgtggggcagctcgggacacccgggcctgcaggagagcggggttctaggctggccccggctctgcagtgcagccgggtgcctgccactcgcggggctctgtcgcagtactcgtgcctggcgcctcccctcagccacagagaccgcagtagctccaaccatcgcacccctaactgggccacgagttctctgattgccagacctgttgtctttgccactcactgttctgagtaattggagagtcgtgtattcactacacgccaaccagagtggtcctgtaaaagcgtaagcctagtgtagatacgcttctgcttaaaactcttgagtggctcccagtgcttttagaacaaaatccaaacgcctttccgaagtcgacaaggcccagcttgattgagcagaagatgtgataggagatgaggagcggggggcttctgcaaaagtgcttcggtcgctcaggcttttggcacattttgcttatgcaacctagttctttctaccttagggccttttcttgggaaagttggggtaaggattcctgacctgtaaaaactcttccccaacttttatcccggtctgtcttgtagatctcaaatgctagtttcctcagagtccttctgtaaccttggttttctctttctacaacgctctgtgtatttcttgcattcatgtagtctgtaatttgtattactctctcattagagtctaagctcttggagggcaagggtcttctctagcttgtggtggtggctccagtccctaatatagtgcctggcacatagaaggtatttaataaattttgttattttattttttcgagacagagtctcactctgctgcctaggctgagtgcagtggtgtgatcgaggcgcactgcagccttgacctcctgggctcaagcgatcctcacctcggcctaccgagtagctgggactacaggcacgcgccactacactcgggtaatttttaattttaatatatgtatatttatatatatatatatatatatatatttttttttttaagacagggtctcactctgtcacccaggctggagttcagtggcgccatctctgctcactgcaacctctgcctcccgggctcaagtgattcccctacctcagcctcccgagtagctgggagtaactgggactacaggcacaggccaccgcgcccggctaatttttttaaaaattttttgtagagaacggggtctcactatgttgcgcaggctggtctggaactcccagactcgatatccttgcgtctcggcccctcacagtgctgggatcacaggtgtgagccaccaccgcctagcaaatacattttgaatgaatgtagtggaccatctgctctgcagtctgacggctaatacaattagggcttggcatggtggtttctatttcctccttgtaaatggccatgcaagtttacaactcttggagaatgaggaggggttcagagaatatctcctgaatctgtagtgtagactgcttctgggagagaacaaataataatggatgagggcattcagccagagaaggtgtgtagtgcccaccagaagaggttcatgccttcataaaattgttaacacaagacatagttccaggtttgtttgtttgtttgagatacagtcttgctctgttgcccaggctggagtgcagtggcgcgatcttggctcactgcaacctctgcctcccaggttcaagcaattctcctgcctcagcctcccaagtagcagggattacaggcacctgccaccatgctggctaattttttgtatttttagtagagacggggtttcgccatgttggccaggctggtctcgaactcctgacctcaggtgatccacctgctttggtctcccaaagtgctgggattataggcgtgagtcaccgtgcctgggctgttccaggttttgaaaagacactgtggtcctggttttagactcagcaacatcacagacaagaaaggaatcctatggattaaagttcttcactataagttttttttttcctccagttcaaatgggtaacgtgccaatgtagtaaaggtttgagggaggcacgtctgacacaggcacatgaacacccagtcatcacgcttatgaactacaaaacgatgactcttaaccttgaagtgacttcagaattgattccacatggaccacaggattagtatttcaggactctaccatatggatcctattgatatgtttgacacctggtccagttttacttcactaaactgattgatataatgtgcatgattgtctaagcctttctaattggatgaaatgccttctccgtccacaaccccctccttctcctcctgcctcagctgaatccaccttttaagccttccttgaacattcagtcagatatggccatttctttctctactccaacatttgttggacacagttttctaatgcacattacagattctgacagttctagatattctgtctgtaaaataaatgttagtacatgagataaagtggattatagcaatgttgttaaactgctggttgcaacccattgatgggtcctgaccagcaagtaaaagtgcagctgggtgccgtggtgcatgccggtagtctagctacttgggaggctgacgtaggaggatcgcttgagtccaggagtttaaggctgtagagtgtaatgatcatgcctgtgaatagccactgtgatccaacctggacagcagggagatcccatctcttaaaaacaataaaaatgaaatagagcatatcagagggccttgttcgtaggaagtcagtattgttttgtggaacatttagttgtatgcgtacatgcaggtatgtgtattgagtctcattttaaagtatatttcttactggggttatcagaaagtttgaaaatcattagactaggggataggtatgctgagattttagtagtagagttttacctggacaaattgtctactttgaacctgactgccggcctgagtttgttcagggaagattgtttctaatctatttgctttttgtttgtttgttttggtgacggagtcttactctgttgcccaggctggagtgcagtggtgcggtctcagctcactgcaacctccgcctcctggattcaagtgattctcctgcctcagcctcctgagtagctgggaatacagacgtgcgccaccatgtctggctaatttttgtatttttagtagagacgagggtttcgccatgttggcaaggctggtcttgaactcctgacctcaggtgatccgcctgccttggcctcccaaagtgctgggattacaggtgtgagccaccgtgcccagcctgtttctcatctatttgtgtaagaattccatgtttacttactctagataacttcaaaagaaaaaaaactctggccaataaaatgccataggaatgtttagggatatgtggagtaggcattctttctaagttttcctgaagatgcaccaatgtttaacaagaaaggaagggcagtgtagaacacctattgctttctgcatggtaagagggatgggtattgggagagcccacacctgctgaggagtgcctttagactttgagcggtggtgtttctctccctcccagaaatagatctctttggggagacaggccatacaagacgtgaatctggtgacattttacttgtttgaagcaaaatttttttagatgatggagggtttttaaaaattgcttttaaaattaaaatttgaatagataagaagtaatcactataaaaaataatgaagcataaggaatgctagtattagctgggtgtggggcactcacttgtagtcccaactactggagaggctgaggcaggaagaatgcttgagcccaggagtttgagtccagcctgggcaacataacgagaccccatcttttaaaaaaaaaaaaaaagaaaaagaatgctaatatcgtgaacatttatgttcccaccacccaatttaagaaaaagaacaatacttttgaagtccactgcgtacccctccttgatcccatctctttcccttctcttttaggagttaactatcctgattccttgctatgctttttagtgtgatccctgaagaacgtatcactccattttgcatagctataaatttcatagaaatggaatcgtattgcatgtgttgtgtgatttgctgtttttgctcatcattatattcctgggattatccatttttaggtttatgtgtgactgtaatttattgtttagatgaaagttttcctggtttgacttgctctatcttcatatttttccttaagctaagggttcagcatacgaaggcagtattggtggcacttctttaacagtaccccatctcttctcctagccttgagggctgcacctagatgaacttgtgaggctcatttgaaccttttggaagcaccgaagcctgctgaagtttccagacatctgtatgaatctgttgtagttttttaatgttatatgctgaatataaaaccaagtaactcctgctggaaacatttacaatatcgattaacaaatactatcagtggctttgacatttttgtcagtttcttgatttttttccccgcttttgtctccccttcccccctccacattttggggcattgtgctgttaatagattttttttctgttcgtttgtttatatacctcctgtttccttctgatgttaatagatttctgacagtcagacttgtccacaagaactcaactggcaaggctgcttttctgtgctaaaactggggagctagtgggcaccatgaagatcttctgcagtcgggccaatccgaccacggggtctgtggagtggctggaggaggatgaacactatgattaccaccaggagattgcaaggtactgggttggtttacagcaggctgcagctgggtggggcacttgatctcaaagcagatgccttgggctccagtctgagcgtgggctaggctgtcacccagtgcttatgatgagggctggtgttggtcctgagcaggtctgctcagccaggtaggtatatgtagcagttaggcaaaatcatgcctgtttggagagtcagacattatgtagcagccttagcagagcctcagcatctgtttaacggagcaaagaaaacccaagcctcagtagtgttgatgaagttgaatcatttacttgccttactgaaatggtgacatgttcatcatatggttaaattcttttgaatgaaaaaaatgaaaatggttttttttttcccttagaagaaatatttaaaagtatgtgagttgttggccaggcgcagtggctcacgcctctaatcctagcactttgggaggccgaggtggccagatcacctgaggtcaggagttcgagaccagcctgaccaacatggagaaaccccgtttctactaaaaatacaaaattagctgggcatggtggctcatgcctgtaatcccagcttacttgagaggctgaggcaggagaatcacttgagcctgggaggcagaggttgtgttgagccgagatcgagccattgcactccagcctgggcaacaagagcgaaactctgtctcaaaaaaaaagtatgtgagttgttatgtagcaatcattaagtgcattcagtgtgccagcattgtgctaaggctgtggataccagatgaagaagatcctgttctcatcttcaaggaccatgcagttttgtggaagagacaggcacatacaaaattacagcacaaaagccaggcacggtggctcatgcccgtaatcccagcactttgggaggcaaagggcgggcgggcgggcggtggagggggtggtggcggctgatcacttgagggtcaggagttcgagaccagcctggccaacacggtgaaaccccgtctctataaaaaaaaattagctgggagtggtggtgggcgcctgtaatcccaggtactcgggaggctgaggcaggaaaatcacttgaactcgggaggtggaggttgcagtgagccaaggttgtgccactgcactccagcctgggtaacagagtgagactctgtctcaaaaaaaaaaaaaaaaaaattacagcacagtgagataaaggcacaagaggtcatggaagcagcaagaaccagctgaacttggggtgggaggtaatgtttgaataatttctcagttctaaaggaagagaaggtgaagtttgagcagcagggattacaggtaagctttcagatgagccagattgtggctgggtgcagtggcctacacctgtagtcccagctacttgggaggccaaggcaggaggattgcttatgcccacgagttcaacatagtaaaacactgtctcacaaacaaacaaagaccaaaaacaggctgggcacagtggctcatgcctgtaatcccagcactttgggagaccaaggcgggcggatcacctgaggtcgggagttcgagaccagcctgaccaacatggagaaaccctgtctctactaaaaatacaaaattagccaggtgtggtggcgcatgcatgcctgtaatcccagctgctcgggaggctgaggcaggagaatcacttgaacctgggaggcggaggttgccatgagccgagatcgtgccattgcattccagcctgggcaacaagagctaaactctgtctcaaaaaaaaaaaaagaaaaaaaaccacacacacacagatgggctattctggggagcagctagcagtttagtgcagctggagtgtggtacaaaagtactatggtaagagaggctgccgaaagcatacgcggggtcattttgtaaagggtggtagcaaaatgcaggaagaggaacatgagtttaagtccaagctttgccacttctttactctcttggccaagttacttctctgagccttaatataaaataatatatacttcaatatagtaatacattatctcacagtataatacaattatcttagaattgtttgatgattaaatgtaatacagtatctggtgcagaattagggcttaaaatatttacttttttttctttttttttttttgagacagagtctcgctctgtttcccaggctaaagtgcagtggcacgatctctgctcactgcaagctccgcctcctgggttcacgccattctcccgcctcagcctcttgagtagctgggactacaggtgcccgctgccacgcccggctaattttttgtatttttaatagagacggggtttcaccgtgttagccaggatgatcttgatctcctgaccttgtgatccgcccgcctcggcctcccaaagagctgggattacaggcgtgagccactgcacctgcccaggtcttaaaatatttctaaacattttggacattattttcttgttttattgttcagatggagtcttactctgttgccttggctggagtgcagtggcgcagtctcggctcactgcaatctctgcctcccaggttcaagggattctcttgcctcagcctcttaggtaactgggattacaggcatctgccaccacacctggctaatatttgtgtttttagtagagacttggtttcacctgttggccaggctggtcttgaacttctgacctcaggtgatccacctgcctctgcctcccaaagtgctgggattacaggtgtgagccacagtgtcaggcctggacgttattttctgagtgatatattaaacaggagagaaagaggattggattgcattttggaacactcactgagagcggtgtggagaggagagcatttggggatattgtagtcccagagctgcatagtcccagaggagacagctcgggggaacttgagtttggtaactcactggatatgatggagggagagagaagattcaagaagcaccaagacttctggttagaatgacaaagtggatggggcctgcaagggaggaatgggtggtgtggggaggggaacacgatggagattaggcgtttaggtttggacatccacatagagatgccaatggcagatagaattttgggtctggagacagaatttgtagttgttggaactgaaactgggagaggttgcagtctctcaagggggtgtggaatgtgaaaggtagagggctgaagaaggaatcccggaatagctgaggaggcaaagaagggcaagggagatagccagcatggaaaggaagaaagagggagtgtgtctagcaaggtcagaggcactgggaagtcccagatactgatgactgacatcagctgcaggagtgagctggtggtggttaccgagagtgatgtcagtggagtggtgggcagtaagtgtgaagaggccaggaaggtggtgagtgagatgccttttaaatagtgagcagaggtagaaaggactacatttcagctaagcatccatagctggcttcagatataaaaccttgatgtgccattaaaaaaaaaaaaaaaagaacccccttctttcagtgcaccgctcttcaaagtgtggaatgtggaccacctgtggcacaattgcctggagcacattagcccagccttctcaataagagtgagagtgtgtgtgtgtgtgtgtgtgtgtgtgtgttctgggactctgcatttcaggtaagctttctagtgattctagtgttgacccaaggctggagggcctctgttttaatgtgagctccttagctgtccccttgaattcccagaaagcgtggcagggcctgcctagttctgggtgctcatcccgaccccgcctgagggttttcagtgtgtgaattactgcagtaggaaatatggagaagtgattctcctccctttactacggtattggtgaactctttagttttccctgatgatgttaagtgaacgtgcccagtggggtacctgtcacatatacagtgggtgtatgtgagtgcttctctttccccggctgctctccctaataccgcatcagtggttatctccaggcagagatgtaggccaggttaggtcaagtattaggcagattgagtctgagtttttcctgaggaggaaaatgtgtagtgtatagcaagatcaagatgctagtggctgtggaattactgtgacagggctaactgccgagaccagctcggtcgtggagaccctaacccagtggcgctagaggaattaaagacacacacacagaaatatagagtgcagagtgggaattggggggctgacagccttcagagctgacagccacgaacagaactttacctacatatttattgacagcaagccagtgataagcattgttcctatagattatagattaaaacgggaaacaaagggatgggctctggctagttatttgcagcaggaacatgtccttaaggcacagatcactcatgctattgtttgtggttcaggaacgccttaagcgaaagccgccctgggtgggccaggtattccttgccctcattccagtaaacccacgaccttcagtgtgggcatcatagccatcaacgagcatgtcacagtgctgcagagatttgtttatgaccagttttggggcctgtttttggccagatttgggggcctgttcccagcagctaactactggagcatttttaggtctgagaacatctttctctgagacttttttctgcagcactagagaataacagcttgaaactctattaaaataaagtggccaggtgcagcgacggatgcttgtattgtagttctgctgaggcaagaggatctcttgagctaaggagttcaaggctgcagtgcccaatgattgaggctgttcatagccactgcactacagcctgggtgacataacgagaccctgtttctaaaaataaacaaaaaaataggccaggcgcagtagctcacacctgtaatcccagcactttaggaggccaaggtgggcggatcagttgaggtcaggagttcgagaacagcctggccaacatagtgaaaccccatctctaatgtaaatacaaaaattagccaggcgtggtggtgagcacctgtaatcccagctacctgggaggctgaggcatgagaatcacttgaacttgggaggcagaggttgcagtgagctgagattgcaccactgtactccagcctgggtgatggggtgagaccctgtctcaaaaaaaaaaaaataaataaagataaaagacaaccaaaaaatagtttaaaatagatgacacgtttgttctatctgtttagcaatgtgtttatatatgtgaatactcttgtgtgttgatgtgtatcatgcaaaggttactgacttttttgttttttaggtcatcttatgcagatatgctacatgacaaagacagagtaagtgtaaaaggaaactattatcttgatgtggggtgttttgaagtcttggattacaagaaggttaagaatccctgggggtcatgatgttaaatgatactgagaggcgtatggtgtagaagtcaggaaatcagttgggagactgggtcctacttctggctctatttttgttgtttaatctcccagctttatcaagatagaactgacaaataaaaatggtctatgtttatggtaatacaatgtgatgaatatatgtgtatggtgtaaaatgattgaatcaagctaattaacaaatctaccgcctcatacttttttgtgtgtggtgagaacatttaagatctactcgcttagtaatttttaagtgtacattattaactatagctcacaatgccgtacagcagatctccacaacttattcatcctatctgactgaaacatcagatcctctcccttagcaggtaccattctctgggcttctgagttcaacatttttttttttttttgagacagaatctcgctctgtcactcaggctagagtacaggggcgagatctcggctcactgcagcctcagtctcccgagttcaagcgattctcctgcctcaacctgcctaagtgttgggattgtacctagtattgggataatactattattatactattatacctagtattgggattataacttgggattacaggtgcgtgccatgacacctggccttcactgtagttttaatttccatttttaattttaattttatttttttgagactgggtctctgttgcccagtgcagtggtgtgatctcggctgcactgcagcctagacttcttgggcttaagcgatcccccaacctcagccttcccagtagctgggactacaggcatgccaccatgcctggctaatttttgtatgttttgtagaggcagagtttcgctgtattgcccaggctggtcttgatcccctgaggtcaagtgatccacccgccttggtctcccaaagtgctgggattatgggcatgagctactgcgcccggccatcgtgtgcttgtttaccatgtgtatatctttgttctagtctagggttatgaacataggtgtgattcttgatagacactgccacattgccttcaaaaagggttccagattcactgtaatatcttcaaaactgggtcattaaaaagtgacagctaatttaatggcatcgttaaagtgaaggctgtgccatccctggtttacaattgaggacgctgttcatcaattttttttaacttaaaaaataaataaaacaaggccaggcacggtggctcatgcctgtaatcccagcactttgggaagccgaggcaggcagatcacggggtcaggagatcgagaccatcctggctaacatggtgaaaccccgtccctactaaaaatacaaaaaaaagccgagcgtggtggcgggcagggcctgtaatcccagctactcaggaggctgatgcgggagaatggcgtgaatctgggaggcggagcttgcagtgagccgagattgcaccactgcactccagcctgggcgacagggagactccgtctcaaaaaaaaaaattgtggtaaaaacacataacataaacggtcatactgattgtatctaagacataaatgcacttactttgacaatgaaatagttctatatttctgtgaaaaattatttcacccagactaaacatttttgtgctttacctcagaggcaacgtcatttcttttttttcttttttctttctttctttttttttttttaacaagaatgagtctccctctgttgccaggctttagtgcagtggtgtgatcttagctcactgcaacctccacctcccgagttcaagtgattctcctgccttagcctcccaagtagctggggttacaggcatgcgccaccatgcctggctaattttttgtatctttagtagagatggggtttcaccatgttggccaggttggtctccaactcctgacctcaagtgatccacccgcctcagcctcccaaagtgctgggattacagatgtgagtcactgcacccggcctggtaattctaaagaatattcagttctagatattttctaattccagtctgatttagtcttttgcctatcagtttagaagtgtgtttcttaatgtatgaaaaattttttttcttcagttgtgtttctgatattaagatttttgacttgttttgcattgtggtcagaggatatcacccttttgatgccagttctgtattagctgtctaatgttatttaacaaattaccttaaattttaatagcctcttaatatttcttactaacttggcaggtcatcagtctatttaaaagatttgcacatattttttccatcatctttagttattttcaacagaagggtcactgtgcctattgagtcagaccgttatagatgaaagatgtatgtgtttactaaagacagaagtaaaaatcttcaagatgcaaagaagttattttctgatggggaaaatactttttagtgaagctctctgagttagagtcggtaaaggaaaacaagccatacatattgcagcagagcggctttaacacaaggagctggctacccagctgtgggagggctagaaagcaaatgggaacgctgagtaacctaacagtagagattgcagggagcagttaccttgcctagggctgagaaactaaacgagaagattaggatttccagaagccacaagcattgaggagagatcctgtggaccactgtccaagtacggctgcagctctgaggggcccaaggagctggttatgggatcattgggaaaagttggagtctgcaatcaactgcccctaccgagaggaccctgatgagaacagcagcatgcagaaaggagcaagcctgctctgtcctcctaccttccagtcgccctcttggtcccccttttggctgtacctaacagttggaaaaaggagaacatggtttgcagggctctggcatcacttagtagaggatagaagagtgagtgtggagcagggacagtcgcttaataaagggcaaggggctgactcacaagacctgcccaactcagccagagctgttctgccaggggccagaaaggccatagggccctgacttgcactgccactgccagctgtgactctagaactttgcaaagcacctttccacttacttataataactggtagtaagtgacggccatgtcttccttagaatgtaaaatactaccaaggtatccgggctgccgtgagcagggtgaaggacagaggacagaaggccttggttctcgacattggcactggcacgggactcttgtcaatg

SEQ ID NO: 13547 - DNA, 584 bp, Homo sapiens
agctttccagttctgctttaggacccgccccccagcacgctcctcgacgctgcgaggtcccgccccgcgtgctggccgcggtaaaagtggtagcagcggaggcgagcggagggtttcccgcggcggagtctcactctgctgcctaggctgagtgcagtggtgtgatcgaggcgcactgcagccttgacctcctgggctcaagcgatcctcacctcggcctaccgagtagctgggactacaggcacgcgccactacactcggatttctgacagtcagacttgtccacaagaactcaactggcaaggctgcttttctgtgctaaaactggggagctagtgggcaccatgaagatcttctgcagtcgggccaatccgaccacggggtctgtggagtggctggaggaggatgaacactatgattaccaccaggagattgcaaggtcatcttatgcagatatgctacatgacaaagacagaaatgtaaaatactaccaaggtatccgggctgccgtgagcagggtgaaggacagaggacagaaggccttggttctcgacattggcactggcacgggactcttgtcaatg

SEQ ID NO: 13548 - DNA, 2313 bp, Homo sapiens
ctgtttgttcatctcctggcctagccctgaaaagaatgagagagtccgccagatgcgccccgtgtgtgactgccaggctcacctgctctggaaccggcctcggtttggagagatcaatgaccaggacagaactgatcgatacgtccaggctctgaggaccgtaagtgtccagccccttggcttgttgtggggaaaagggagaaagaagtttgtcccatgaaccccagcactttgcttatgatttgctgtttctttcctgtgtcctcttgtctatgagtggcttcagcgagcgcctcctgggtgggcactggagcagaaagcgggagagcctggggctggacttcctgagggcttgctctctgctctactgggagagcctctggctgggctcctgctggacacctttgccttgtcagacacagtcattgctgtgggtggtcacggtggattaggccaccccctcttttcatgtgttgtcacctttctaaaattttctaagatgtaaatctgatcatgtcgctctcctgcctgaaaacctttgctccctgctacctgtagcaggggactcggcttggggattacagatggggcttagagggagggtctcttgaggcccttgggggtgtgtacagaaataggtgtgaatgtgtgcattttgggggatggggggaggatccaagccatcctgagtttctctcagaggggtctgtcacccagaaaggcatccttgcctttgggcagtcaattgtgaacactcaagccttggaggctctcagctgtctgtgctctaaccagacagggaagaagcctgttgtcatggactggaaggtggcctgcaggtggtgcaggccttcagcggggcctctaggctgggttgaggggtgtctttcctgacactggggacaggtggggagatgtgagcaaggcgggcatgtttgtggctgggggtggttactgcatgaggacgcagggggatggtctgaggtctgggcaagtggagtgagaagggaagtatttctgacagcttgccagcaggaatcttctggcaaactggaggaagccctgtgctgagcttgcctgttccccgcaggtgctgaagccagacagcgtgtgcctgtgtgtcagcgatggcagcctgctctccgtgctggcccatcacctgggggtggagcaggtactgacatgcacccttgtcagcctcctgatgtgggcttgtgagttagagcattgcgtggtccgggtgcacaattctgtgatcaaggctctttgcaaaggccactgttgtgggcacagcatgctcgggtcaggggctggggggtttattgcctgtgcgtgcaggcaggcgtcaggcctcagagctggtgttcaggctgccccagggagggaatgagggcagggagggttgttcaggtgtgtcctctgtcttaggatggtcttgtcgcattttaatctttaatttcttctctgttaagtgaatatcttacaactaatagcgtggtgttccctctaggtgtttacagtcgagagttcagcagcttctcacaaactgttgagaaaagtaagtgagaattgttgttgctgaaatagtgagaggacctgtggggtctgggttgatggctttgaagtggcattggccccaggggaacaaaggagtggtggctcgcttgcacccctgtgttgtcttggttgctgcctggagagcagccagaggccttgggagctgtcactgaaatagaggcaggcatttgcactctgctttgtttttttgtgtctgaagaagtttaggcttttttcctcacttcacataagctactgttgcggtagaattaaatgtaggatgtgtttctgggacatcagtgctgagggagccagtgctcacagcctgatgggagatggcatttctctccctggccagtaactggtttgatttcctctccaaaggggaactcccttcaccagaactgcaggctcgcactgagtcctggtgtgcacatgcgggagaaatttcttttgcttttatcacattgtgctcctgatctcatccgtggtctataggatgccccccaaggagaggatttttccacaaagcagataaaagtggtgttccagaaccatttgccggaaaattcaaagcggagaatgcaactttgagagatttttttttcctgacaaacacaatactttagtatgaatacagtaattttacggttttctttctaagatcttcaaggctaaccacttggaagataaaattaacatcatagagaaacggccggaattattaacaaatgaggacctacagggcagaaaggt

SEQ ID NO: 13549 - DNA, 384 bp, Homo sapiens
ctgtttgttcatctcctggcctagccctgaaaagaatgagagagtccgccagatgcgccccgtgtgtgactgccaggctcacctgctctggaaccggcctcggtttggagagatcaatgaccaggacagaactgatcgatacgtccaggctctgaggaccgtgctgaagccagacagcgtgtgcctgtgtgtcagcgatggcagcctgctctccgtgctggcccatcacctgggggtggagcaggtgtttacagtcgagagttcagcagcttctcacaaactgttgagaaaaatcttcaaggctaaccacttggaagataaaattaacatcatagagaaacggccggaattattaacaaatgaggacctacagggcagaaaggt

SEQ ID NO: 13550 - DNA, 3650 bp, Homo sapiens
aaatgaggacctacagggcagaaaggtgagtagcgggagccttttggccacgctgggctgtgttagggtggtcagcacggcactgaagtagcccaggccccaccctgtccctggagtctcacagtgggtcctccacatgcaaccttacctcctacgagctcccaccatcaagggtgtggtgaagctttcatggagctgcccggtgagcagatggttgcactgctcttttttttttttttttttttttttttttgaaaatggggtctcgcgctgtcgtccaggctggagtgcagtggcacgatcttggcttactgcagcctcgaccttccagcctcaagcgatcctcccacctctcccgagtagctgggactgtaggcatgtgccattatgcctggctaatttttgtattttttgtagagtcagcgtttcatcatgtggcccaggctggtcttgaactcctgggctcatgcgatctgccagtctcagcctcccaaagtgtcggggttacaggcatgagccaccacacctggctgtactgctcttagctcagcctcatctctgctccttcaggtcaggacagagcagctctcttggggttcctaggagcagagcatgtcctttcctctccaccgcactcctgtcttcattccccgtccacggcttcctgctgcagtcaggcttccgggccctgaaactgcttctgccagcaacctcgtcgttactcccacggtctccctgcaggcttcatctgctctacccgcttgtccttgtgacccgggacttctgcctgtgctggggaggtcgctttcccctcaccttcctggctgctccttaccttgcactgctccgtggcactctccccgtgtcccccgcttcccctactgcatcctctctggtaatcacgttccttctcatgtgtgaatcagtgaccatcagagccggccttcactctttactattttggattcaaatctcatgtccagctgccatcctgtcacctttccttgaatatgccacaaactggactcacccaacgcggagctatcatctttcatctttcctgccagtctttttttaaataacagctttattgagatgtagttgacataccacaaaattaatgcatttcaattgtacagttgagtgatttttttaagtaaatatatggagttagccgtcacccagtctcatttagaacatttccaggcccgacatggtggcacatgtctgtaatcccagaacttcggaaggccaaggtgggaggatcgcttggacccaggagttcaagaccaatctgagtaacatagggagaccctgtctctataaaaacaaaaaaaattaaccgagtgtggtggcacgtgcctgtagtcccaggaggctgaggtgggtgaggtgggaggatcgcctgagcccaggagttggaggctgcagggagccgtgcttgtggcagagcactacagcatggctgacagagtgataccttgtctctaaaaaaaatgggaatgaaaagagaacatttctgttacctcccaaattcctgggagcctgttgatagtctgcatccccatgccccaggcctggcagccactggtctggtttgtgtctccagtatgtgcctcttctggcatatctcaaaagtgaggtacgcagtgtgtggtcttgtgagtctggctcctttcgctgagcataatgtctttgagattcacccatttcgttcttttgaaggctgtgtagcattccacggtgtggctatccattcatgtgcttatggacgtttggattgtgtccagtttttggccactttgaataaggcttctgtgaacatggattcactggtcttagagaggatgtatgtcctcagtctcttatgcagatgccttggtgtggattgctgggtcatgtggtagttacgatcgactttttaagaagctgctgaactgttggttgaagtggctgtccttttgacatccccatcggtaacatctgagggtccaggttctcggatcctcaccagcacctggcattggctttttttttttagcataaccatattaatgggagtgtggtgatgtctccacatagttttaatttgtatttgcccaatgactgatgatggtgaacatcatttcgtgtgcttgtcttgcttggtgaaatgtctattcaagccttttgcccatttaaaaaaataacagttttattgagatataattcacataccttacgattcactcagtgatttttgtatattcataaggttgtgtaaccatcaccacatcagtttaagaaccctttcattacccattggcagtcatgcaccatttgtccgcagtcccccagccctgggcacccactcttctcctttctgtctttagcttgcccattctgggcatcttgtgtgaatggaatcagacaagtgtgtggtctttcgtggctggcctctcatgtggcttcatgttttcgggctcatccatgtcgtagcctgaatcaatacctcatttctctttcttgctgaataagattccattgtgtggatagaccatgttatttatctgtttctcagctgatggacatttgggtggctcctacttttgggctgttgtgagtaatgctgctataaatattcatccacaagtcgccttttttctccctcatagatgagggcataggagatgattctgaaagccactgtgtggtgtaccggtagaccggggtcacattgaattggagtggtgggagcgggcgttcttgccatgttcctgatgctgtgtggggaggcgaggaagcactcagggcagccccttctgtctgccagcatttcctgctgcatctccatcatctctgactggccccactttggtgcctgactgcttgggcctgcccagggtcggctacctccttaccctctgccactccttccactcctcccacccctcccaccctgtagtctccgtttcttacccggactctttctgcactctcccaggtcgcctccgtccccagcacctgcaggttcccttccacacttcgtggtcctcagcagcatcttctaaatcacattccttctgattttgaaccctgatgaaaacttctagtgacatccaccacccccactgccgcctccgggatgagtccagcccctcaccctgtcctggctgccttgggctgggctggcttctgtccagctccacaccctcaccttggggggccttgctgtctcccggcctcactcttgcccctgctgcccctccctcggccgttcaggctcctcgctgtgcacgtgttcatttactcacaaatgttcacagaacatctggtcacggcactggcccactgctgggggatgctgggccaccagtccctgctcttgtggtgctcagagcctggggagggagacggagacaagccccggtaagtcctgagataaagcgtccagtgggggttgacaggatgccactctggaagccccgtctggcacgtttatttctgggctccctccatgacccccttccttgcttttttctatcacatggggtcagccccactttgtctgcttccctcttctgctctgctctcctgagcacgggactcatgtctggttgtaatctttacagcctccagggcaggtacagagcaccttgctgccttgcttg

SEQ ID NO: 13551 - DNA, 692 bp, Homo sapiens
aaatgaggacctacagggcagaaaggtcgcctccgtccccagcacctgcaggttcccttccacacttcgtggtcctcagcagcatcttctaaatcacattccttctgattttgaaccctgatgaaaacttctagtgacatccaccacccccactgccgcctccgggatgagtccagcccctcaccctgtcctggctgccttgggctgggctggcttctgtccagctccacaccctcaccttggggggccttgctgtctcccggcctcactcttgcccctgctgcccctccctcggccgttcaggctcctcgctgtgcacgtgttcatttactcacaaatgttcacagaacatctggtcacggcactggcccactgctgggggatgctgggccaccagtccctgctcttgtggtgctcagagcctggggagggagacggagacaagccccggtaagtcctgagataaagcgtccagtgggggttgacaggatgccactctggaagccccgtctggcacgtttatttctgggctccctccatgacccccttccttgcttttttctatcacatggggtcagccccactttgtctgcttccctcttctgctctgctctcctgagcacgggactcatgtctggttgtaatctttacagcctccagggcaggtacagagcaccttgctgccttgcttg

SEQ ID NO: 13552 - DNA, 3542 bp, Homo sapiens
ctctgagttagagtcggtaaaggaaaacaagccatacatattgcagcagagcggctttaacacaaggagctggctacccagctgtgggagggctagaaagcaaatgggaacgctgagtaacctaacagtagagattgcagggagcagttaccttgcctagggctgagaaactaaacgagaagattaggatttccagaagccacaagcattgaggagagatcctgtggaccactgtccaagtacggctgcagctctgaggggcccaaggagctggttatgggatcattgggaaaagttggagtctgcaatcaactgcccctaccgagaggaccctgatgagaacagcagcatgcagaaaggagcaagcctgctctgtcctcctaccttccagtcgccctcttggtcccccttttggctgtacctaacagttggaaaaaggagaacatggtttgcagggctctggcatcacttagtagaggatagaagagtgagtgtggagcagggacagtcgcttaataaagggcaaggggctgactcacaagacctgcccaactcagccagagctgttctgccaggggccagaaaggccatagggccctgacttgcactgccactgccagctgtgactctagaactttgcaaagcacctttccacttacttataataactggtagtaagtgacggccatgtcttccttagaatgtaaaatactaccaaggtatccgggctgccgtgagcagggtgaaggacagaggacagaaggccttggttctcgacattggcactggcacgggactcttgtcaatgatggcggtcacagcaggtgccgacttctgctatgccatcgaggaaaattgtgaggccgtgccccacagagccaccgtctatgcacagctggtggagtccgggaggatgtggtcgtggaacaagctatttcccatccacgtgcagaccagcctcggagagcaggtcatcgtccctcccgttgacgtggagagctgccctggcgcaccctctgtctgtgacattcagctgaaccaggtgtcaccagccgactttacagtcctcagcgatgtgctgcccatgttcagcatagacttcagcaagcaagtcagtagctcagcagcctgccatagcaggcggtttgaacctctgacatctggccgagctcaggtggttctctcgtggtgggacattgaaatggaccctgaggggaagatcaagtgcaccatggcccccttctgggcacactcagacccagaggagatgcagtggcgggaccactggatgcagtgtgtgtacttcctgccacaagaggagcctgtggtgcagggctcagcgctctatctggtagcccaccacgatgactactgcgtatggtacagcctgcagaggaccagccctgaaaagaatgagagagtccgccagatgcgccccgtgtgtgactgccaggctcacctgctctggaaccggcctcggtttggagagatcaatgaccaggacagaactgatcgatacgtccaggctctgaggaccgtctctctcctcctgggcgagccgttcttcactaccagcctgctgccgtggcacaacctctacttctggtacgtgcggaccgctgtggaccagcacctggggccaggtgccatggtgatgccccaggcagcctcgctgcacgctgtggttgtggagttcagggacctgtggcggatccggagcccctgtggtgactgcgaaggcttcgacgtgcacatcatggacgacatgattaagcgtgccctggacttcagggagagcagggaagctgagccccacccgctgtgggagtacccatgccgcagcctctccgagccctggcagatcctgacctttgacttccagcagccggtgcccctgcagcccctgtgtgccgagggcaccgtggagctcagaaggcccgggcagagccacgcagcggtgctatggatggagtaccacctgaccccggagtgcacgctcagcactggcctcctggagcctgcagaccccgaggggggctgctgctggaacccccactgcaagcaggccgtctacttcttcagccctgccccagatcccagagcactgctgggtggcccacggactgtcagctatgcagtggagtttcaccccgacacaggcgacatcatcatggagttcaggcatgcagataccccagactgaccactcttgagcaataaagtggcctgagggctggggttctgagtggctcatggctttctagcggggaaggctgaaggccctcctctcctctctgggagctgctcggcctcagggatgggaaagactgcgccgtgttgcatcttgttgcatctttgcactgctggcctctggctccagctgtggcaggaagcatgagagggtgactgaatttggagccctggaggggctgggaagacccccctgcttgtgcttctgaggtgctgagaatgctccaacacagagacatctctccccagctgggaagggagtggaagcacagggagcttgtggggctggccggtggggttgtccacgccgcccttggcgagcagtccccgtggcgggagcctgtcctgtctgtctcactctcgaggatctccgggtccctgctcttctggcttctgctaggagggtggagatgctgagttgtggctgggtctctggggcttgaagaccctggctgggcccgggctgagaggcctgggttctggccctttcacctgacaggtaacttcaagccacatccataggtgtctggcctcagtgctgcaccagctggtggcctgccaggacctgagactggacacaaggcagctgtcccagagcagttcctgagatgcaggcccaggaaagtggctgtcaggggagctgggaggcagccctgttccctgcacctccctcagattggaaagcccctcctgcaggtggggtatggcagggagcagcccctgcccagcgccgcttcaccaggaaggtcagtaggtgccgtggccttgcttctctcacacactaacccccctttggttatgtcccagctctcagaggtaacagcagacaccacgtgagagaacccagtggcctctggctcgcagcttagaaggtgaggcttgtgccaggccagccgagccgcctgtatgagcagagttccggtgtcctcggattcagggcagacttgggcagtgcctgtcctgcagttgggggcaggaactccctcccctgcccccaggcgtgcccctgaggcctggccccagcttgtcgctgaaataagtggagaacaccagccttgagcctcacagttttattttctcctcgttatccatccttcctttcagcaccagtaaggaaaaagaacacctctcttcgcaaaatattttatcaggtgtaaagacttgtttttcttctagggaagaaccgtctggatatatatttgataatgtttttaccaaaaccataggtgtgcttaccatagaaaacccctaatgtcccatgaagatacaatacagaaaaaaatacagaaatt

SEQ ID NO: 13553 - DNA, 2921 bp, Homo sapiens
gcgtttgtgccactgcctccaggctgggtgacagagcaagaccttgtctcaaaaaaagaaatctcatggacaccagaggagcgggaagcagcggtggccccgcagcagcagctatgcatcgggaggtggggcttttctgcttctgctcacctttctgctctcattttcccatagtgaacatggattgcctgtgtgtgaacacttttttaagtaaattaaaccttgtggatattttcagtttgtatcttatctgcccctcacagcagaccattgactgttcgatgcttttagaaatctccttcgtgctgagccctgcgtgctctggacccatgcgctctacgcctcctctgggcccctgctcatggcctgcccaccctggctgtccctgtcccctcttgctgatacggttctgctactctggtcctgggccagtgtctgtctctcgtgtgctaaggcagatggccgagagtggtgggtatcccacagtggggtgccaggcatttttacttctatgctttccaaatccacctgcccttccccacccttagcctggcccttccagtgccctgtcttagacctggcgccacttcacacgaccagccaggcccagggccccgggcatcctccctggcaagtcctcccatcccctgccattggtcttcgtgctcctggtgagcctccgacccaggctgtcccctgactgctgccgtcctggtttgagcccctcctgctctggccgtcctccacacggagcccacatgaacttgtagatctgagtctggccacatccccactgcaggaatgccctagctggctccccacaccacacctgcagagtggcccggctggcctgggtgccctggcctgctctcctgacttagctctatcctcaaggccccctctggcccttctcctgccggctcccatttgaccgtcacctcccctcctccaggtagctttctgcatccctcctggatgcaggtgcccccagcctgccgccaggcaccggggctgtactgtcacgcatttatccctccctgtggcccggggcccacctgtcggggccacacagctgtggtggtcaccaagtttctaggtgctgggtgttctcaccagtgatgtagatatgtggtcctcagaaggcttgagacaggcagcaccaccccatcttaaaaatccggagagcgaggctcagagccagcggtgcctggggagccactgatgagagagaagtggcagagagggggcgccgctggtctgctgggcgctcggcatctttatgggagaacgcacaccccttgtgactgcagtcagtgggagccaagccggggagcggtacctctgtctagctgccggcctgtctctgcagcccccaggcccccttctgttcgcagcgtgccctggacttcagggagagcagggaagctgagccccacccgctgtgggagtacccatgccgcagcctctccgagccctggcagatcctgacctttgacttccagcagccggtgcccctgcagcccctgtgtgccgagggcaccgtggagctcagaaggtgggtgcagagagggctggggggcagggaggggctgctgcttgcccttggagttctcacccccgtggtgagcacagctggcctgggagacgctgacacgtggagggggtattcgtcctccccacaaccttgcccttccctgtcagagtggccctgcgcgtgtggtggttcccacggtcctgtgtgtgccactggtggaggagccaggaagggctctgctccccctctacagctgaggctcccttgttggatcacagctcaggaagatgggagcttacttcctgtggtcaccgatgcaccattttcctgaaccctcctgggagctgaagcaggtcagggtcagcaagtgctgcttgcgtccagggacgggcagccctgtcctgctccggccctcaccccaccctcgcccgaggagtgacttctcctggaagcacctcccaactcggggcaggcagccaggcagggcgggcgccatcacctgagctcccagggttgctgtctggggcatcagaggggccttccggccttcagtgccaggctgtgcctcaagctcccccagaccctgcagccacaccggccctgccccatgtgtggcccggctgcagggctcgggttggctcaggtgggggcttggctgcggctcttctggctggggtttttctgaggaacgtttatgtaactgcagcactaggaactcccggcagggcaggaaggaagtggggaagaccacaggtttctggaaagccgcaggagctgcagctgttcccccgctgcctcttgtgtgactacttctgctgggcccccctctccttgacaggcccgggcagagccacgcagcggtgctatggatggagtaccacctgaccccggagtgcacgctcagcactggcctcctggagcctgcagaccccgaggtagtgcctgcgcaccgggcccagtgtgcgtgcagaccctgagagcaggcgccgcctggggaggcctccctgcccccatgctctgggtgtttctgtcacaagttcttcgggccagatgatgacccctcagtggtcctgggccatctggcccctgagcagcttctctctgctgcgagctgcctgggctggaggctggctaggaaggaggctcaggtgccagggagccctcaccatcttcctgctcttcttcctacaggggggctgctgctggaacccccactgcaagcaggccgtctacttcttcagccctgccccagatcccagagcactgctgggtggcccacggactgtcagctatgcagtggagtttcaccccgacacaggcgacatcatcatggagttcaggcatgcagataccccagactgaccactcttgagcaataaagtggcct

SEQ ID NO: 13554 - DNA, 1848 bp, Homo sapiens
gcgtttgtgccactgcctccaggctgggtgacagagcaagaccttgtctcaaaaaaagaaatctcatggacaccagaggagcgggaagcagcggtggccccgcagcagcagctatgcatcgggaggtggggcttttctgcttctgctcacctttctgctctcattttcccatagtgaacatggattgcctgtgtgtgaacacttttttaagtaaattaaaccttgtggatattttcagtttgtatcttatctgcccctcacagcagaccattgactgttcgatgcttttagaaatctccttcgtgctgagccctgcgtgctctggacccatgcgctctacgcctcctctgggcccctgctcatggcctgcccaccctggctgtccctgtcccctcttgctgatacggttctgctactctggtcctgggccagtgtctgtctctcgtgtgctaaggcagatggccgagagtggtgggtatcccacagtggggtgccaggcatttttacttctatgctttccaaatccacctgcccttccccacccttagcctggcccttccagtgccctgtcttagacctggcgccacttcacacgaccagccaggcccagggccccgggcatcctccctggcaagtcctcccatcccctgccattggtcttcgtgctcctggtgagcctccgacccaggctgtcccctgactgctgccgtcctggtttgagcccctcctgctctggccgtcctccacacggagcccacatgaacttgtagatctgagtctggccacatccccactgcaggaatgccctagctggctccccacaccacacctgcagagtggcccggctggcctgggtgccctggcctgctctcctgacttagctctatcctcaaggccccctctggcccttctcctgccggctcccatttgaccgtcacctcccctcctccaggtagctttctgcatccctcctggatgcaggtgcccccagcctgccgccaggcaccggggctgtactgtcacgcatttatccctccctgtggcccggggcccacctgtcggggccacacagctgtggtggtcaccaagtttctaggtgctgggtgttctcaccagtgatgtagatatgtggtcctcagaaggcttgagacaggcagcaccaccccatcttaaaaatccggagagcgaggctcagagccagcggtgcctggggagccactgatgagagagaagtggcagagagggggcgccgctggtctgctgggcgctcggcatctttatgggagaacgcacaccccttgtgactgcagtcagtgggagccaagccggggagcggtacctctgtctagctgccggcctgtctctgcagcccccaggcccccttctgttcgcagcgtgccctggacttcagggagagcagggaagctgagccccacccgctgtgggagtacccatgccgcagcctctccgagccctggcagatcctgacctttgacttccagcagccggtgcccctgcagcccctgtgtgccgagggcaccgtggagctcagaaggcccgggcagagccacgcagcggtgctatggatggagtaccacctgaccccggagtgcacgctcagcactggcctcctggagcctgcagaccccgaggggggctgctgctggaacccccactgcaagcaggccgtctacttcttcagccctgccccagatcccagagcactgctgggtggcccacggactgtcagctatgcagtggagtttcaccccgacacaggcgacatcatcatggagttcaggcatgcagataccccagactgaccactcttgagcaataaagtggcct

SEQ ID NO: 13555 - DNA, 2996 bp, Homo sapiens
tttgaagtccactgcgtacccctccttgatcccatctctttcccttctcttttaggagttaactatcctgattccttgctatgctttttagtgtgatccctgaagaacgtatcactccattttgcatagctataaatttcatagaaatggaatcgtattgcatgtgttgtgtgatttgctgtttttgctcatcattatattcctgggattatccatttttaggtttatgtgtgactgtaatttattgtttagatgaaagttttcctggtttgacttgctctatcttcatatttttccttaagctaagggttcagcatacgaaggcagtattggtggcacttctttaacagtaccccatctcttctcctagccttgagggctgcacctagatgaacttgtgaggctcatttgaaccttttggaagcaccgaagcctgctgaagtttccagacatctgtatgaatctgttgtagttttttaatgttatatgctgaatataaaaccaagtaactcctgctggaaacatttacaatatcgattaacaaatactatcagtggctttgacatttttgtcagtttcttgatttttttccccgcttttgtctccccttcccccctccacattttggggcattgtgctgttaatagattttttttctgttcgtttgtttatatacctcctgtttccttctgatgttaatagatttctgacagtcagacttgtccacaagaactcaactggcaaggctgcttttctgtgctaaaactggggagctagtgggcaccatgaagatcttctgcagtcgggccaatccgaccacggggtctgtggagtggctggaggaggatgaacactatgattaccaccaggagattgcaaggtcatcttatgcagatatgctacatgacaaagacagaaatgtaaaatactaccaaggtatccgggctgccgtgagcagggtgaaggacagaggacagaaggccttggttctcgacattggcactggcacgggactcttgtcaatgatggcggtcacagcaggtgccgacttctgctatgccatcgaggttttcaagcctatggctgatgctgctgtgaagattgtggagaaaaatggctttagtgataagattaaggttatcaacaagcattccaccgaggtgactgtaggtccagagggtgacatgccatgccgtgccaacatcctggtcacagagttgtttgacacagagctgatcggggagggggcgctgccctcctatgagcacgcacacaggcatctcgtggaggaaaattgtgaggccgtgccccacagagccaccgtctatgcacagctggtggagtccgggaggatgtggtcgtggaacaagctatttcccatccacgtgcagaccagcctcggagagcaggtcatcgtccctcccgttgacgtggagagctgccctggcgcaccctctgtctgtgacattcagctgaaccaggtgtcaccagccgactttacagtcctcagcgatgtgctgcccatgttcagcatagacttcagcaagcaagtcagtagctcagcagcctgccatagcaggcggtttgaacctctgacatctggccgagctcaggtggttctctcgtggtgggacattgaaatggaccctgaggggaagatcaagtgcaccatggcccccttctgggcacactcagacccagaggagatgcagtggcgggaccactggatgcagtgtgtgtacttcctgccacaagaggagcctgtggtgcagggctcagcgctctatctggtagcccaccacgatgactactgcgtatggtacagcctgcagaggaccagccctgaaaagaatgagagagtccgccagatgcgccccgtgtgtgactgccaggctcacctgctctggaaccggcctcggtttggagagatcaatgaccaggacagaactgatcgatacgtccaggctctgaggaccgtgctgaagccagacagcgtgtgcctgtgtgtcagcgatggcagcctgctctccgtgctggcccatcacctgggggtggagcaggtgtttacagtcgagagttcagcagcttctcacaaactgttgagaaaaatcttcaaggctaaccacttggaagataaaattaacatcatagagaaacggccggaattattaacaaatgaggacctacagggcagaaaggtctctctcctcctgggcgagccgttcttcactaccagcctgctgccgtggcacaacctctacttctggtacgtgcggaccgctgtggaccagcacctggggccaggtgccatggtgatgccccaggcagcctcgctgcacgctgtggttgtggagttcagggtgtgcagggaacagcaagatgtgcctcttgttcttgctgccacgcttccctgtgtcctggcgggcgggtgtggacggggctgctccttcctcacaggacctgtggcggatccggagcccctgtggtgactgcgaaggcttcgacgtgcacatcatggacgacatgattaagcgtgccctggacttcagggagagcagggaagctgagccccacccgctgtgggagtacccatgccgcagcctctccgagccctggcagatcctgacctttgacttccagcagccggtgcccctgcagcccctgtgtgccgagggcaccgtggagctcagaaggcccgggcagagccacgcagcggtgctatggatggagtaccacctgaccccggagtgcacgctcagcactggcctcctggagcctgcagaccccgaggggggctgctgctggaacccccactgcaagcaggccgtctacttcttcagccctgccccagatcccagagcactgctgggtggcccacggactgtcagctatgcagtggagtttcaccccgacacaggcgacatcatcatggagttcaggcatgcagataccccagactgaccactcttgagcaataaagtggcctgagggctggg

SEQ ID NO: 13556 - DNA, 28271 bp, Homo sapiens
aaaagtggtagcagcggaggcgagcggagggtttcccgcggcgggtgaggcgctgggtatgctgggaaggtggggtcgctttggggttctgtgtgcagcgagcatggtgtccttggcaccagggtttcggcagaggagcctagcgtgggcctacttggactcctccgcgtggggcagctcgggacacccgggcctgcaggagagcggggttctaggctggccccggctctgcagtgcagccgggtgcctgccactcgcggggctctgtcgcagtactcgtgcctggcgcctcccctcagccacagagaccgcagtagctccaaccatcgcacccctaactgggccacgagttctctgattgccagacctgttgtctttgccactcactgttctgagtaattggagagtcgtgtattcactacacgccaaccagagtggtcctgtaaaagcgtaagcctagtgtagatacgcttctgcttaaaactcttgagtggctcccagtgcttttagaacaaaatccaaacgcctttccgaagtcgacaaggcccagcttgattgagcagaagatgtgataggagatgaggagcggggggcttctgcaaaagtgcttcggtcgctcaggcttttggcacattttgcttatgcaacctagttctttctaccttagggccttttcttgggaaagttggggtaaggattcctgacctgtaaaaactcttccccaacttttatcccggtctgtcttgtagatctcaaatgctagtttcctcagagtccttctgtaaccttggttttctctttctacaacgctctgtgtatttcttgcattcatgtagtctgtaatttgtattactctctcattagagtctaagctcttggagggcaagggtcttctctagcttgtggtggtggctccagtccctaatatagtgcctggcacatagaaggtatttaataaattttgttattttattttttcgagacagagtctcactctgctgcctaggctgagtgcagtggtgtgatcgaggcgcactgcagccttgacctcctgggctcaagcgatcctcacctcggcctaccgagtagctgggactacaggcacgcgccactacactcgggtaatttttaattttaatatatgtatatttatatatatatatatatatatatatttttttttttaagacagggtctcactctgtcacccaggctggagttcagtggcgccatctctgctcactgcaacctctgcctcccgggctcaagtgattcccctacctcagcctcccgagtagctgggagtaactgggactacaggcacaggccaccgcgcccggctaatttttttaaaaattttttgtagagaacggggtctcactatgttgcgcaggctggtctggaactcccagactcgatatccttgcgtctcggcccctcacagtgctgggatcacaggtgtgagccaccaccgcctagcaaatacattttgaatgaatgtagtggaccatctgctctgcagtctgacggctaatacaattagggcttggcatggtggtttctatttcctccttgtaaatggccatgcaagtttacaactcttggagaatgaggaggggttcagagaatatctcctgaatctgtagtgtagactgcttctgggagagaacaaataataatggatgagggcattcagccagagaaggtgtgtagtgcccaccagaagaggttcatgccttcataaaattgttaacacaagacatagttccaggtttgtttgtttgtttgagatacagtcttgctctgttgcccaggctggagtgcagtggcgcgatcttggctcactgcaacctctgcctcccaggttcaagcaattctcctgcctcagcctcccaagtagcagggattacaggcacctgccaccatgctggctaattttttgtatttttagtagagacggggtttcgccatgttggccaggctggtctcgaactcctgacctcaggtgatccacctgctttggtctcccaaagtgctgggattataggcgtgagtcaccgtgcctgggctgttccaggttttgaaaagacactgtggtcctggttttagactcagcaacatcacagacaagaaaggaatcctatggattaaagttcttcactataagttttttttttcctccagttcaaatgggtaacgtgccaatgtagtaaaggtttgagggaggcacgtctgacacaggcacatgaacacccagtcatcacgcttatgaactacaaaacgatgactcttaaccttgaagtgacttcagaattgattccacatggaccacaggattagtatttcaggactctaccatatggatcctattgatatgtttgacacctggtccagttttacttcactaaactgattgatataatgtgcatgattgtctaagcctttctaattggatgaaatgccttctccgtccacaaccccctccttctcctcctgcctcagctgaatccaccttttaagccttccttgaacattcagtcagatatggccatttctttctctactccaacatttgttggacacagttttctaatgcacattacagattctgacagttctagatattctgtctgtaaaataaatgttagtacatgagataaagtggattatagcaatgttgttaaactgctggttgcaacccattgatgggtcctgaccagcaagtaaaagtgcagctgggtgccgtggtgcatgccggtagtctagctacttgggaggctgacgtaggaggatcgcttgagtccaggagtttaaggctgtagagtgtaatgatcatgcctgtgaatagccactgtgatccaacctggacagcagggagatcccatctcttaaaaacaataaaaatgaaatagagcatatcagagggccttgttcgtaggaagtcagtattgttttgtggaacatttagttgtatgcgtacatgcaggtatgtgtattgagtctcattttaaagtatatttcttactggggttatcagaaagtttgaaaatcattagactaggggataggtatgctgagattttagtagtagagttttacctggacaaattgtctactttgaacctgactgccggcctgagtttgttcagggaagattgtttctaatctatttgctttttgtttgtttgttttggtgacggagtcttactctgttgcccaggctggagtgcagtggtgcggtctcagctcactgcaacctccgcctcctggattcaagtgattctcctgcctcagcctcctgagtagctgggaatacagacgtgcgccaccatgtctggctaatttttgtatttttagtagagacgagggtttcgccatgttggcaaggctggtcttgaactcctgacctcaggtgatccgcctgccttggcctcccaaagtgctgggattacaggtgtgagccaccgtgcccagcctgtttctcatctatttgtgtaagaattccatgtttacttactctagataacttcaaaagaaaaaaaactctggccaataaaatgccataggaatgtttagggatatgtggagtaggcattctttctaagttttcctgaagatgcaccaatgtttaacaagaaaggaagggcagtgtagaacacctattgctttctgcatggtaagagggatgggtattgggagagcccacacctgctgaggagtgcctttagactttgagcggtggtgtttctctccctcccagaaatagatctctttggggagacaggccatacaagacgtgaatctggtgacattttacttgtttgaagcaaaatttttttagatgatggagggtttttaaaaattgcttttaaaattaaaatttgaatagataagaagtaatcactataaaaaataatgaagcataaggaatgctagtattagctgggtgtggggcactcacttgtagtcccaactactggagaggctgaggcaggaagaatgcttgagcccaggagtttgagtccagcctgggcaacataacgagaccccatcttttaaaaaaaaaaaaaaagaaaaagaatgctaatatcgtgaacatttatgttcccaccacccaatttaagaaaaagaacaatacttttgaagtccactgcgtacccctccttgatcccatctctttcccttctcttttaggagttaactatcctgattccttgctatgctttttagtgtgatccctgaagaacgtatcactccattttgcatagctataaatttcatagaaatggaatcgtattgcatgtgttgtgtgatttgctgtttttgctcatcattatattcctgggattatccatttttaggtttatgtgtgactgtaatttattgtttagatgaaagttttcctggtttgacttgctctatcttcatatttttccttaagctaagggttcagcatacgaaggcagtattggtggcacttctttaacagtaccccatctcttctcctagccttgagggctgcacctagatgaacttgtgaggctcatttgaaccttttggaagcaccgaagcctgctgaagtttccagacatctgtatgaatctgttgtagttttttaatgttatatgctgaatataaaaccaagtaactcctgctggaaacatttacaatatcgattaacaaatactatcagtggctttgacatttttgtcagtttcttgatttttttccccgcttttgtctccccttcccccctccacattttggggcattgtgctgttaatagattttttttctgttcgtttgtttatatacctcctgtttccttctgatgttaatagatttctgacagtcagacttgtccacaagaactcaactggcaaggctgcttttctgtgctaaaactggggagctagtgggcaccatgaagatcttctgcagtcgggccaatccgaccacggggtctgtggagtggctggaggaggatgaacactatgattaccaccaggagattgcaaggtactgggttggtttacagcaggctgcagctgggtggggcacttgatctcaaagcagatgccttgggctccagtctgagcgtgggctaggctgtcacccagtgcttatgatgagggctggtgttggtcctgagcaggtctgctcagccaggtaggtatatgtagcagttaggcaaaatcatgcctgtttggagagtcagacattatgtagcagccttagcagagcctcagcatctgtttaacggagcaaagaaaacccaagcctcagtagtgttgatgaagttgaatcatttacttgccttactgaaatggtgacatgttcatcatatggttaaattcttttgaatgaaaaaaatgaaaatggttttttttttcccttagaagaaatatttaaaagtatgtgagttgttggccaggcgcagtggctcacgcctctaatcctagcactttgggaggccgaggtggccagatcacctgaggtcaggagttcgagaccagcctgaccaacatggagaaaccccgtttctactaaaaatacaaaattagctgggcatggtggctcatgcctgtaatcccagcttacttgagaggctgaggcaggagaatcacttgagcctgggaggcagaggttgtgttgagccgagatcgagccattgcactccagcctgggcaacaagagcgaaactctgtctcaaaaaaaaagtatgtgagttgttatgtagcaatcattaagtgcattcagtgtgccagcattgtgctaaggctgtggataccagatgaagaagatcctgttctcatcttcaaggaccatgcagttttgtggaagagacaggcacatacaaaattacagcacaaaagccaggcacggtggctcatgcccgtaatcccagcactttgggaggcaaagggcgggcgggcgggcggtggagggggtggtggcggctgatcacttgagggtcaggagttcgagaccagcctggccaacacggtgaaaccccgtctctataaaaaaaaattagctgggagtggtggtgggcgcctgtaatcccaggtactcgggaggctgaggcaggaaaatcacttgaactcgggaggtggaggttgcagtgagccaaggttgtgccactgcactccagcctgggtaacagagtgagactctgtctcaaaaaaaaaaaaaaaaaaattacagcacagtgagataaaggcacaagaggtcatggaagcagcaagaaccagctgaacttggggtgggaggtaatgtttgaataatttctcagttctaaaggaagagaaggtgaagtttgagcagcagggattacaggtaagctttcagatgagccagattgtggctgggtgcagtggcctacacctgtagtcccagctacttgggaggccaaggcaggaggattgcttatgcccacgagttcaacatagtaaaacactgtctcacaaacaaacaaagaccaaaaacaggctgggcacagtggctcatgcctgtaatcccagcactttgggagaccaaggcgggcggatcacctgaggtcgggagttcgagaccagcctgaccaacatggagaaaccctgtctctactaaaaatacaaaattagccaggtgtggtggcgcatgcatgcctgtaatcccagctgctcgggaggctgaggcaggagaatcacttgaacctgggaggcggaggttgccatgagccgagatcgtgccattgcattccagcctgggcaacaagagctaaactctgtctcaaaaaaaaaaaaagaaaaaaaaccacacacacacagatgggctattctggggagcagctagcagtttagtgcagctggagtgtggtacaaaagtactatggtaagagaggctgccgaaagcatacgcggggtcattttgtaaagggtggtagcaaaatgcaggaagaggaacatgagtttaagtccaagctttgccacttctttactctcttggccaagttacttctctgagccttaatataaaataatatatacttcaatatagtaatacattatctcacagtataatacaattatcttagaattgtttgatgattaaatgtaatacagtatctggtgcagaattagggcttaaaatatttacttttttttctttttttttttttgagacagagtctcgctctgtttcccaggctaaagtgcagtggcacgatctctgctcactgcaagctccgcctcctgggttcacgccattctcccgcctcagcctcttgagtagctgggactacaggtgcccgctgccacgcccggctaattttttgtatttttaatagagacggggtttcaccgtgttagccaggatgatcttgatctcctgaccttgtgatccgcccgcctcggcctcccaaagagctgggattacaggcgtgagccactgcacctgcccaggtcttaaaatatttctaaacattttggacattattttcttgttttattgttcagatggagtcttactctgttgccttggctggagtgcagtggcgcagtctcggctcactgcaatctctgcctcccaggttcaagggattctcttgcctcagcctcttaggtaactgggattacaggcatctgccaccacacctggctaatatttgtgtttttagtagagacttggtttcacctgttggccaggctggtcttgaacttctgacctcaggtgatccacctgcctctgcctcccaaagtgctgggattacaggtgtgagccacagtgtcaggcctggacgttattttctgagtgatatattaaacaggagagaaagaggattggattgcattttggaacactcactgagagcggtgtggagaggagagcatttggggatattgtagtcccagagctgcatagtcccagaggagacagctcgggggaacttgagtttggtaactcactggatatgatggagggagagagaagattcaagaagcaccaagacttctggttagaatgacaaagtggatggggcctgcaagggaggaatgggtggtgtggggaggggaacacgatggagattaggcgtttaggtttggacatccacatagagatgccaatggcagatagaattttgggtctggagacagaatttgtagttgttggaactgaaactgggagaggttgcagtctctcaagggggtgtggaatgtgaaaggtagagggctgaagaaggaatcccggaatagctgaggaggcaaagaagggcaagggagatagccagcatggaaaggaagaaagagggagtgtgtctagcaaggtcagaggcactgggaagtcccagatactgatgactgacatcagctgcaggagtgagctggtggtggttaccgagagtgatgtcagtggagtggtgggcagtaagtgtgaagaggccaggaaggtggtgagtgagatgccttttaaatagtgagcagaggtagaaaggactacatttcagctaagcatccatagctggcttcagatataaaaccttgatgtgccattaaaaaaaaaaaaaaaagaacccccttctttcagtgcaccgctcttcaaagtgtggaatgtggaccacctgtggcacaattgcctggagcacattagcccagccttctcaataagagtgagagtgtgtgtgtgtgtgtgtgtgtgtgtgtgttctgggactctgcatttcaggtaagctttctagtgattctagtgttgacccaaggctggagggcctctgttttaatgtgagctccttagctgtccccttgaattcccagaaagcgtggcagggcctgcctagttctgggtgctcatcccgaccccgcctgagggttttcagtgtgtgaattactgcagtaggaaatatggagaagtgattctcctccctttactacggtattggtgaactctttagttttccctgatgatgttaagtgaacgtgcccagtggggtacctgtcacatatacagtgggtgtatgtgagtgcttctctttccccggctgctctccctaataccgcatcagtggttatctccaggcagagatgtaggccaggttaggtcaagtattaggcagattgagtctgagtttttcctgaggaggaaaatgtgtagtgtatagcaagatcaagatgctagtggctgtggaattactgtgacagggctaactgccgagaccagctcggtcgtggagaccctaacccagtggcgctagaggaattaaagacacacacacagaaatatagagtgcagagtgggaattggggggctgacagccttcagagctgacagccacgaacagaactttacctacatatttattgacagcaagccagtgataagcattgttcctatagattatagattaaaacgggaaacaaagggatgggctctggctagttatttgcagcaggaacatgtccttaaggcacagatcactcatgctattgtttgtggttcaggaacgccttaagcgaaagccgccctgggtgggccaggtattccttgccctcattccagtaaacccacgaccttcagtgtgggcatcatagccatcaacgagcatgtcacagtgctgcagagatttgtttatgaccagttttggggcctgtttttggccagatttgggggcctgttcccagcagctaactactggagcatttttaggtctgagaacatctttctctgagacttttttctgcagcactagagaataacagcttgaaactctattaaaataaagtggccaggtgcagcgacggatgcttgtattgtagttctgctgaggcaagaggatctcttgagctaaggagttcaaggctgcagtgcccaatgattgaggctgttcatagccactgcactacagcctgggtgacataacgagaccctgtttctaaaaataaacaaaaaaataggccaggcgcagtagctcacacctgtaatcccagcactttaggaggccaaggtgggcggatcagttgaggtcaggagttcgagaacagcctggccaacatagtgaaaccccatctctaatgtaaatacaaaaattagccaggcgtggtggtgagcacctgtaatcccagctacctgggaggctgaggcatgagaatcacttgaacttgggaggcagaggttgcagtgagctgagattgcaccactgtactccagcctgggtgatggggtgagaccctgtctcaaaaaaaaaaaaataaataaagataaaagacaaccaaaaaatagtttaaaatagatgacacgtttgttctatctgtttagcaatgtgtttatatatgtgaatactcttgtgtgttgatgtgtatcatgcaaaggttactgacttttttgttttttaggtcatcttatgcagatatgctacatgacaaagacagagtaagtgtaaaaggaaactattatcttgatgtggggtgttttgaagtcttggattacaagaaggttaagaatccctgggggtcatgatgttaaatgatactgagaggcgtatggtgtagaagtcaggaaatcagttgggagactgggtcctacttctggctctatttttgttgtttaatctcccagctttatcaagatagaactgacaaataaaaatggtctatgtttatggtaatacaatgtgatgaatatatgtgtatggtgtaaaatgattgaatcaagctaattaacaaatctaccgcctcatacttttttgtgtgtggtgagaacatttaagatctactcgcttagtaatttttaagtgtacattattaactatagctcacaatgccgtacagcagatctccacaacttattcatcctatctgactgaaacatcagatcctctcccttagcaggtaccattctctgggcttctgagttcaacatttttttttttttttgagacagaatctcgctctgtcactcaggctagagtacaggggcgagatctcggctcactgcagcctcagtctcccgagttcaagcgattctcctgcctcaacctgcctaagtgttgggattgtacctagtattgggataatactattattatactattatacctagtattgggattataacttgggattacaggtgcgtgccatgacacctggccttcactgtagttttaatttccatttttaattttaattttatttttttgagactgggtctctgttgcccagtgcagtggtgtgatctcggctgcactgcagcctagacttcttgggcttaagcgatcccccaacctcagccttcccagtagctgggactacaggcatgccaccatgcctggctaatttttgtatgttttgtagaggcagagtttcgctgtattgcccaggctggtcttgatcccctgaggtcaagtgatccacccgccttggtctcccaaagtgctgggattatgggcatgagctactgcgcccggccatcgtgtgcttgtttaccatgtgtatatctttgttctagtctagggttatgaacataggtgtgattcttgatagacactgccacattgccttcaaaaagggttccagattcactgtaatatcttcaaaactgggtcattaaaaagtgacagctaatttaatggcatcgttaaagtgaaggctgtgccatccctggtttacaattgaggacgctgttcatcaattttttttaacttaaaaaataaataaaacaaggccaggcacggtggctcatgcctgtaatcccagcactttgggaagccgaggcaggcagatcacggggtcaggagatcgagaccatcctggctaacatggtgaaaccccgtccctactaaaaatacaaaaaaaagccgagcgtggtggcgggcagggcctgtaatcccagctactcaggaggctgatgcgggagaatggcgtgaatctgggaggcggagcttgcagtgagccgagattgcaccactgcactccagcctgggcgacagggagactccgtctcaaaaaaaaaaattgtggtaaaaacacataacataaacggtcatactgattgtatctaagacataaatgcacttactttgacaatgaaatagttctatatttctgtgaaaaattatttcacccagactaaacatttttgtgctttacctcagaggcaacgtcatttcttttttttcttttttctttctttctttttttttttttaacaagaatgagtctccctctgttgccaggctttagtgcagtggtgtgatcttagctcactgcaacctccacctcccgagttcaagtgattctcctgccttagcctcccaagtagctggggttacaggcatgcgccaccatgcctggctaattttttgtatctttagtagagatggggtttcaccatgttggccaggttggtctccaactcctgacctcaagtgatccacccgcctcagcctcccaaagtgctgggattacagatgtgagtcactgcacccggcctggtaattctaaagaatattcagttctagatattttctaattccagtctgatttagtcttttgcctatcagtttagaagtgtgtttcttaatgtatgaaaaattttttttcttcagttgtgtttctgatattaagatttttgacttgttttgcattgtggtcagaggatatcacccttttgatgccagttctgtattagctgtctaatgttatttaacaaattaccttaaattttaatagcctcttaatatttcttactaacttggcaggtcatcagtctatttaaaagatttgcacatattttttccatcatctttagttattttcaacagaagggtcactgtgcctattgagtcagaccgttatagatgaaagatgtatgtgtttactaaagacagaagtaaaaatcttcaagatgcaaagaagttattttctgatggggaaaatactttttagtgaagctctctgagttagagtcggtaaaggaaaacaagccatacatattgcagcagagcggctttaacacaaggagctggctacccagctgtgggagggctagaaagcaaatgggaacgctgagtaacctaacagtagagattgcagggagcagttaccttgcctagggctgagaaactaaacgagaagattaggatttccagaagccacaagcattgaggagagatcctgtggaccactgtccaagtacggctgcagctctgaggggcccaaggagctggttatgggatcattgggaaaagttggagtctgcaatcaactgcccctaccgagaggaccctgatgagaacagcagcatgcagaaaggagcaagcctgctctgtcctcctaccttccagtcgccctcttggtcccccttttggctgtacctaacagttggaaaaaggagaacatggtttgcagggctctggcatcacttagtagaggatagaagagtgagtgtggagcagggacagtcgcttaataaagggcaaggggctgactcacaagacctgcccaactcagccagagctgttctgccaggggccagaaaggccatagggccctgacttgcactgccactgccagctgtgactctagaactttgcaaagcacctttccacttacttataataactggtagtaagtgacggccatgtcttccttagaatgtaaaatactaccaaggtatccgggctgccgtgagcagggtgaaggacagaggacagaaggccttggttctcgacattggcactggcacgggactcttgtcaatgatggcggtcacagcaggtgccgacttctgctatgccatcgaggtaagccattcccttcaggtgtgtgtcctgcatcttgcatgggaaatcccctatgctcttgcactttccccgtctgttccttcacaaacattcatggagtgctcactctgtgccaagcacagagccaggctctgagcgtatagagatgagtcagacacagttccttcctccaggagctaattttctcctctgtcagcctaggctgcacatcagaatcactaggagctttagaaaatacttacaggctgggcacagtggctcacgcctgtaatcccagcacttcgggagggtgaggcaagacaattgcttgagcccaggagtttgagaccagcctgggcaacatagtgagatcccatctctacagaaaaacttttaaatattagctgggcatggtggcatgtgcctgtgttccagctattcttgaggctgagatgggaagatctcttgagcccggaaagtcaaggctgcagtgagccatgatttggacttcatgtaagaaagcaaaaaattacttctaccttgtttaagccagttattgtgggactttgttgtttccaactaatcagtatatgaactcagttttgtaggggaaagtatttaaatacatgcccccacaccaccacactccagcctgggtgacagagtgagactttatctcaaaaaaatcaaaacgaaacaaaggctgggcacagtgtctcacccctgtaatcccagcactttgggaggccgaggcttggatcatgaggtcaggagttcaagaccagcctgaccaacatggtgaaactccatctttactaaaaatacaaaaattagccgggtgtggtgatgcgcgcctgtaatcccagctactcaggaggctgaggcgagagaatcgcttgaacccaggaggcagaggttacagtgagccgagattgcgccactgcactccagcctgggcgacagagtgagactccatctcaaaacaaaacaaaacaaaaaaaccttatgcctagtccccagccctaacagattttgatttaacttttctggggtgaggcctgagccttgggacttgggaatgtgcggcaaggttgagaaccactaccttaaatgtccctatggagtcagctctcttatgtttaccaatttgtcatttctttaataaaacattaaacagcttgagcccacagagcaagaaaaattaaaaaccaaacaaaattaaaaattaaacatgttatttttctcataaaacaaataatgcatattattataggaaatttggtaaataccaaataaaaatagtatgttgacccaaagttaagtactgttaacattttggtgtatattcttccaagttttgggggcaggcagggagcatgtatataaatactttccctacaaaattgggttcatgtagtgattgagttggaaataacaaagcctcaaaatcactgtggtttaaggtagagtagttttttgctatctttttcgtggcgtgatctctattcaccgcaacctccgcctcctgggttcaagcaattctcttttctcagcctcccaaatagctgggattacaggtatgtaccactgcacctggctaatttttatatttttagtagagatagggtttcgccatgttggccaggctggtcttgaattcctgatctcaggggatccccccacctcagcctcccaaagtgttgggattacaggtgtgaatcactgcgccctgccttgttcctcttttttaaaagtaagaataactttcccaggaatttctattatagcaaacctctccttgggtaccatcggctagaatgaggttaaatctcatttcttatctctggcaagagggattcagttactcttagctcagacaagtgcaccactgcaaaggtcagttccccacgctgcaccctcacctgatttcaggggagaggaggacacagaatggatgtcgggaggtcatcttcagtgtccactcctggtagtgttttgggtgagatcttgagcttcttgatgggctgaggagaaggaggtgtgaaggtaccagcttgcaggttcagggagaggtgactgatgagtcagaaggcagcaggggtgagggacgacactggctttggatattgtcagggtggaggcaaagtgattggtgagaactagggtttaaggccctcaaaccacatctaaaaacatcaaggcaaatcctagaaataatttgaaatagatgatgaagatttttctaggagaacatgtgtgtgtattccatgtaaatactgcgcgctaatcaattgcacaactggagctgctcacgtaagtactctttacgaaaggatacagcatttgtcccttgattatagtaaaaaatatagtattcatggtagaaaatgtgggaaatacagaaaaggatttagaaaaaaggaaaatcttatcaggaacagtctcggtatcattttgtggtttccacttcgtgtgtagggccacacgtgagtctgtttgttttacatgctagagctcttggggctgtggaatctagactggataagttgaaaacaaagagttggaggtgcttatttatgttcagggaaactcgaagagttcagggaagacttctggatgggggattcatgctgccctgggaagtggggtttgatttggcaggtggggccaggatagggaaggctcagtgatcatgagatcattgtggctggagtgttggttgttgggggaatgggggaggaagactgggaaggtaagggagggcctccaaagcagtagtttccccttatctatggtttcacttttcgtgatttcagttacctgtggtcaactgaggtccaaaaatactaaatggagccaggtgcggtggctcacgcctgtaatcccagcactttgggtggctgagacaggtggaaaccttgagtcccagagttggagaccagcctgggcaacatggcaaaaccccgcctctacaaaaagtagctgggcatggtgatctacgcctgtagtcccagctacttgggagattgaggtgggaaattgcttgagcctgggaggtggaagctgcagtgatcatgccactggactccagcctggacaatagagtgagacccttctcaaaaaaaaaaaaaagaaaaattaaatggaaaattccagaaattatttataagttgtaagttgtgtaccattctgagtattattacataattgttctatttttagttattgttaatttataaattattatttatatttattattgtgcctaatttataaattaaacctggtcataggtaagcttggaggctgaagcagctccactgtgaatgctaatcctccacgctgacttctgaccaaccccagcttcaggaatgcctctaaaatttccgctctcatgcactttgatgtaaatcctgccctcaggtcagaacaactttgatgttatcataaatacatacttaccgtaaatcctgcccttcgtcaaattccctgtggtatgtaagccctgcgtctgagccataacagtgtgggggcccagtttctcactgcccgagacaaggcttctgtttgtatgtctctataaagtgtgtctttctgagaagctggatttgccagtctttcctcagcctctcagctcccgtggcctgttggggtaggtttgcatagagctgcccaccatggaacagtatgtatgtatagcaaaaaaaaaaaaaaaaaaaaaatggtatacataagggtcagtactgtctgaggtttcaagcatccaccaagggtcttaaaatgtatcccccatggacaagaggcactgctgcaccataagaaaatagaggctgtgttctgccaacagtggggatttgggacaattttgagcccagaggatgacctacttactcacacctacagtctgctctcctctggagggcacagcacgcctcccaggttcgtgaggcaagtccctttcctggctttttggcgtcctcttgtgcggtactgacacctactgctcttactaagtagtgcagcctcctcaggatccccggcatccccgctgtgcctggcacggaatgagagtccctaatcacaagttaaagccagctgaatctcagccctttttcatgatgcacatttggagaataaagtatttaagttacatatcttaggaccagaatcaaggaatagcttgctcaccttaaaggtcagactactgtttaatttattgctcatttttccttgggtttcggctctattttctaggttttcaagcctatggctgatgctgctgtgaagattgtggagaaaaatggctttagtgataagattaaggttatcaacaagcattccaccgaggtgactgtaggtccaggtgagatttacacaccctgtgttgaaagctttgcttgctcttgtgtgagagaggaaaagggttattccagttacctggaacaaatccaggtcatagcatagaagtgggacctctctgtgtggagctctgacagtaaggacttggtttctcttgatgtttattttcctgctagttaaaactagtcaacaaggagtagactagagctagtcaggtccagcaatggagacgcaaacaaaacctacatttgctttaagcaaattggaattcttatggggctcaactcttgagtttcaactaccaataattacgccttggataaacctcattggctacgatactgccactgctcaaagctcaactctgagtttcatcaggcagaaagtacttagttcttttatttatttatttttttgagagagagtctcactctgtcgcccaggctggagtgcagtggcgctatcttgcctcactgcaagctctgcctcctgggttcacccatcctggctaacacggtgaaactctatctctactaaaaatacaaaaaattagccaggcatggtggtgggcacctgtagtcccagctactggagaggctgaggcaggagaatggcgagagtagttctgacattctgcttctgcatacaacatgaacaattttcctgtatagcattgtctcttaaggtttccagaatatgtatatgtacacacacacacacacacacacatattttttttttgagacggaatctcactgtgtcacccaggctgcattgcagtggtgcaatcttggctcactgcatcctccacctcctgggtacaagtgattctcctgcctcagcctcccaagtagcggtgattacaggtgcctgccaccacacctggctgctttttgtatttttagcagagacggggtttcaccatgttggccaggctggtcttgaacccctgacctcaggtgatccgcctgcctcagcctcccaaagtgctaggattataagcgtgagccaccatgcctggcctccagaatattttttatagtctagaactttgtttcagtctttgaaaatttcacatgccactgacacttagagaacatagttgaaagatttgcaaaggaaaaactgtggtgaagttatggataacaccatgggttttttctaattttttgtggagatagggtcttactatgttgcccaggctggactcaaactcttatgctaaagtgatcctcccatctcagcgacccaagtacctgggactacaggtgtgcactactgcacctggctttttcaccacggttttggagaatgcagtatcattctgaattgaagcttctacctaaggtcaacattattctcccatttaacaatttttttttaatggagaatctgaaacatgtacaaaagaagtgggtactatcttatttatttatttatttgagacagagtctcactctgttgcccaggctggagtgcaatggcaggatctcagctcactgcaacctctgcctcccatgttcaagcgattctcctgcttcagcctcatgagtagctgggattacaggcgtgcaccaccatgcctggctaatttttgtatttttagtggagacggggtttcaccgtgttggccaggctagtcccgaactcctgacctcaggtgaccagcctgcctcggcctccgaaagtgctgggattacaggtgtgagccaccgcgcccggcctatcttttttatttttaaaatatacaatagagtgctcaaatcattccatttacaatcaacgttattgaagtatgatttacattaaatgaatatccattttcattatggatatttgacaaatataaacacacttgtaaccaccatcaccataatgaagataatagaacatctccatcatgcccaaagagattcctcataaccctttctatcagtccccccatatcctggtcctaggcacccactcatagacttcattatagattagatttgcctgtctaggatttcaaggaagtggaatcaaagaagtgtggactcttctgtgtgtgtgctctcttttttatagcgtgatgctggtaagattcttccacactgttcatgtcttgggggtccgttcttttgtgttactgagcagcactctattagatagatgtaccataacttgtttatctctctacctgttgatggacagggatttcttggataggtctttagattcactgatcttttcttttgcagcatctaatatgctgttaagtatatttagtaaacttttcatttctctttctttgttgttcttttttttttttttttgagacaggatcttgacctgtcccccaggctggagtgcaggggtgtgagcatggcttattgcagctttgacctcctgggctcaagcagtcctcctgcttcagcctcctgtgtagctgggaccacaggctcatgccaccatgcctggctaacttaaaaaaaatttttttttgtagagatgggatctcagtttgttgcttaggctggtctcaaactcctgggctcaagcgattctcccacctcagcatcccaaagtcctaggattacaggcgtgggccgctgtgcctggcctcatttttgatattgtattttttaatctctgaaagttccacttgattctttttcataacttccatttttctcatgttcatagttttctataagcacatttattttagctttttgaacatccttatcttctgttcccaccatctttgttttttctgggtttgttctcttgactcatttttatccttattctgggtcacattttccttcttcacatgtctaaccatttttgtttggatgctgtggctatttggaattccccattgttgagtgctagacttcgttggttttgctttttaaactttggcatgcagttgggttacttgcagttcagattgatcctttcagggcttgtttaagctttctttggagtggggttagagtagctttaagtcaggccttctcaacagtagtgctgtgacgttttggcattctccaactatgtgacattttgataattctttgttgtggaccctgtcctttgcattgtaggatgtttagcagtgtccctggcctcttcccagtggatgtcagtagcactcccctcctcccaccattcttgccaactaaaaatgtctccagactgccacgtcttccttggtctcgagtgtgtaaaattgccacctgttgagaaccactgctctaaggctgtttagccagacagttactgtaacctttctggagtgtctgctgagagctctaggtgctcagcagggtttcccttgtctggctgatcagaacttgaatgtttcccaggcctctgagagctccggagattgttatcactcatgcaacctttgctcggcttcacagagtattaccctgtgtgtgtgtgaatgtattaacacagaccctagaggaaccctgtgcagcattctgaaggctttttttctgtgtaatttcctctctgattctctgcctggcaagttccagctgcttccacttccctgaactcgtttcctgtctgtttaactcagcaagactgccgtgctctgtgtcacctcttaccctatactgtggtctggaaagggtctcctggctgatagccagagcagggtaagggttacttggtttgtttcccttcttagggagcaaactgtgttgcctcttgctcaacatctgaaaacacttgtttcatatattttgcccagttttctagttgataacagccggagggtaagcctgatcccacttattccactatggccagagtggagattgattcatttatttatttttttttgagacagtctcactctgttgcctaggctggagtacagtgatgcgaacacagctcactgcagcctcgacttctgggctcaagtgatcctcctgcctcagcctcctgagtagctgggaccacaggcaggcgccaccatacccaactaatttttttgtttttttaaatttttattagaaactaagtcttgcggctgggtgcagtggcttatgcctgtaatcctagcactttgggaggccgaggctggcggatcacctgaggttgggagtagcaaccagcctgaccaacttggagaaacctgtctctactaaaaatacaaaattagtcaggtgtggtggtgcatgcctgtaatcccagctactgaggagattgaggcaggagaattgcttgaacctgggaggcaaaggttgcggtgagccgagattgcgctattgcacttcagcctgggcaacaagagcaaaattctggctcaaaaaaaaaaaaaaagaaaagaaaagaaactaggtctcgctttgtttcacaggctggtcttgaacgccaggcctcacacagtccttctgcctcagcctcccaaagtgctgggatcacagatgggagccactgtacctggcgagatcatttattcttgaaaatttatccattttgacggcagggagactgatctgcagggcagccttggccatgaagtatgctgactctgcctccaggcagcattgttcacacacacctcagcttaggccaggcccctcatatgatttcttattaaaaaaaaaaattttttttagatagagtggctctgtcgcccaggctggagtgcagtggcatgacctcggctcactgcaacctccacctcccggattcaagtgatccttccacgtcagcctcctaagtagctgatattacaggcatgcaccaccacctggctaatttttgtatttttagtagagatggggtttcactatgttggccaagctggtcttgaactcatgacctcaagcgatctgcctgccttggcctcccaaaatgctgggattacaggcatgaaccaccacgcctggccaatttcgtaatacttttcttcatagcgcttaccactgcaatcattaaatcattatgtagttatgtatttaatgtctgtatccccacccagctgaggcatcctgaggtcatgcactgcgtgggttgtattaactattccattccgttatttgctccgggcctgtcatgtaaaggagttaggtaatttttgtaaagtgagtagattgtcagttgtgcttcatccataatcccttgtaaatgtgactttgtttccgatcctcagcctgacaagtggcttcctcattgccaagttgggtggtctttcctctgcttttcctctctaaccactgccgctttggtacttctgccattccttccttcttgaaactctccctggaccttagtgacatctcttcatcttggttctcctgtgttgctttctttctgctccagatgtatactttccaaggttctgctctcagccctttttaaaagtggcatctgaagttgcctgttccccagagctgggttacatgctgaggcttgtggagagccaacccagggagcagcgtgtgttcatccgtccattttgttcatttggaaagggcttaggaagctcctggggtggctacctgcttcagactcccccaccccgtgcccttatacattagcagtcacactcaaaataccaggccctcaagaagtacttgttaaaatgcactggaccataaagcttgaattttttttttttaatttttattattttttgagacagtctcactgtatcacccaagatggagtatggtggggcaatttcagctcactacaacatctgcctcccgggttcaggcaattctcatgcctcagcctcctgagtagctgggactacaggcgcgtgctactacacccggctaatttttgtatttttagtagagacaaggtttcaccacattggccaggctggtatcgaactcctggcctcaagtgatcagcccagcttggcctctcaaagtgctggaattacaggtgtgagtcactgtgcctggctcttgatttttattttaatgaagcaatttggactataaagcattttaagttatataattggtttaaacattcaggagatagaattggcagagtgggtgatcagtgggttgtagggtgacagaaatcaataatttatctaatgtgtgttgactgttacggggcactagaccttgtgggtgctggggtacagtagtggacaggcagtcagcggtcctgctgtcctggaactagtaaatgatgcccagattcctggactatgtgactcattgattgattgaggcagaaaccctggagggaggagcaggcgtgttagctggggtgggtgggatgagttttggacagtgtattccagttggagtttgatgtgacatcagagaggatgggcagggcttctcgggagggtggtctctgtggcagaagacagaagtttcttcttaagctcctccacgtgatactgtcatggagcacaggtgagcttcataggaagtgtgcttttttttttttatcttcatcatcccgaccaccaccacatgagacagagcccattcacccgttttactgatgaggcaactgatggtcagaacggagggctcagggataggaagtgagatccaggccaggctccagcctcgagctcgaggttcacgctgtctctgttgtgctcttctatcagctgctctctttcttttttttttttttttgaaatggagtctcactctggcccagattagagtgcagtggcgtgatctcggctcactgcaacctctgcctcccaggtttaagtgattctcctgcctcagcctctcaagtagctgggattacaggcacccatcaccacgcctggctaatttttgtattcttagtagagacagggtttcaccacgttggccaggttggtttcaaacttctgacctcaggtgatctgcccatctcagcctcccaaagtgctgggattacaggcgggagccaccgcgcccggcccctgtcagctgctttcatgcttctcttttccttgtgtcatctgtgagacttgtgctctgtgtaggggaaatgagtgggctttgtcagattataattcatgaggcattaaaagtgtttacagttaattctccctgatgaatagccccttccaaagtctattttggctcttggctcattaaaaattataattgtagaagtagcagtacattactgaggtttagaaaacagttaacagaagatccctcccaaatcctactcttctctaaaatcctactgtcctaaaacaactgttatttaagagattgtttggtgacaaggcgctttcattaagggaatttgccatagtgatctggggattctaagtcatggatctcaattttggctgccagagcctaactcacagtagctggaagatcatcagagaaccttgttgtcttgctttggctttccctccctctccctgcaacctagaagtatttgacataccagcattctgtttttgcttttcaaataatttttctaatttagtggttaatagtttaattgttaatttatatctctctaattgctaatagggatgaaaaagttttcataagtttgatttctgttttgaattttctgtttatatttttacctggtttctttttgggtgtgtgttttttttgtttgtttgagacagagtctcactctgtcgcgcaggctggatcactctgtcgcgcaggctggagtacagtggcacaatttcggctcactgcaacctctgcctcccaggttcaagtgattctcatgcctcagcctcctgggtagctggggttacaggcgtgtgccatcacacctggctaatttttgtatttttagtagagatggggtttcgccatgatggccaggctggtcttgaactcctggcttcaagtgatcctcctgccttggcctcccaaagtgctaggattacaggcgtgagccaccatgcctggctaatttttgtattttttgtggaaatggggttttgtcatgtttcccaggctgatctcaaactcctgaactcaatccattgggtatttatagttttcttatcattttttgcagtctccctcccaatattaagcatacagaatagctgtaagagcagtacagtaaacacttatgatcccttaccctagatttatcaattagcgttttgtcatacatttacatatggattttttttttttcctgaaccattggcaagtcagttgcagacatcctgacacttctgaatacctcagcatgtatatgtgcttttagcgtgatggccccttaaccacttatctttcccatatttgctgtaaatatttttcctagtctgttgcttatgtccaactctgttttcttgtgtttttcagagggtgacatgccatgccgtgccaacatcctggtcacagagttgtttgacacagagctgatcggggagggggcgctgccctcctatgagcacgcacacaggcatctcgtggaggtagtagacggagggctccctcagacgtgtctgtggtctcagccagctcacatagcactcactcatgcaccgtgtcccacacagcccaagccctcagcacctctgatacacctgggacacccctccattcctgggggggctctggttctcctcacttaaaactttcatgtcccttgaatgccaaatcttaataggttagagttgaaaagcaagaaactatattcaaattcagttaagttcagcaaatattctcaggaaggcgatgcttgagctgtcagtcttgagaagtgatcaggtgttggcctggcagatggaatatttctggtagaggagagcagcacgtgctagacgtgagactgaatcggtgcggtggctccggagcctgctttggattttgtgctgtgtgggaggcaggagagatgggcttagcaactgaggctagagagctgggcaggggctagatggagtggggtttgggggccatgcccagagggtagctgtcattagaaggtggggtggcatcacaggagggtttgaagcagaggattgacagcagacttatgcaggcagatgtgtggagggcagttggggtatagggctggaggttgcgggtgggttaaaaggctgtggaatcgtccagacgctgtggtacagtgggcctcagctaaggctgtagacagaggcctgataggtggtcccaggagttggtggtcccttaggtgtagagatatcgatgctagggtttgggcacctggattggatggtggtgcttcctgttgacggggagtgcaggaagaggggtagccttgggaaggttgggaagtggtgagggcgattcttctggtttacacagagtttgagctctctaaaggtcagccaagcaaagaggcccagagatgcatggatttactcagtgaagagggcatggttgaggtcactgtggagagtgtggagggagacagtccggaccagggagtccccttgtgaggtggggcggaggaagcacagcctggggaaggcagcgggagtgagtccagttagagcagcatttgtctaccagagcaaggttgggagatgcttcgcagggaggccagttattctgctagccttttaccatgcccagagcaacccctacagcagagaatcatttggcccaagaggccagtggtgtcctggtggtgaaagccatgtgggtagcagctgtgagtgtgctcttgccgggtccctattgcctggtgcatggaggacgtggagtggatgcaagaggtaggaggagagccggacaaggagccggagccggagccacagccctaggggctgagtgtgcagcagtgcccagcggcgctagagggctgggcagctgagggggcaccgtggtccacagggctttgccacaaggaggctcttgttttggtgctgggcaggagcggcactgaagggacactgagcccagagccaggatcaccacccagcagcaggacgtgaagcatttaagagtgccaggtagccaggaacttagctgacagaagtcattttaggcacagtgtgtgttctttttgaaatgtagtaccctttttttcccttttccaagggcatagggctgaaaacagttcactattctaatagtataaggtgttgggcattactgaaccaacctaatgttaaggaataaacctcttttgatcaatgggaattactgtgggtctaagcatctgatttttgtttggttttgtttttaatataaacttaggaaaa

SEQ ID NO: 13557 - DNA, 648 bp, Homo sapiens
aaaagtggtagcagcggaggcgagcggagggtttcccgcggcgggtgaggcgctggatttctgacagtcagacttgtccacaagaactcaactggcaaggctgcttttctgtgctaaaactggggagctagtgggcaccatgaagatcttctgcagtcgggccaatccgaccacggggtctgtggagtggctggaggaggatgaacactatgattaccaccaggagattgcaaggtcatcttatgcagatatgctacatgacaaagacagaaatgtaaaatactaccaaggtatccgggctgccgtgagcagggtgaaggacagaggacagaaggccttggttctcgacattggcactggcacgggactcttgtcaatgatggcggtcacagcaggtgccgacttctgctatgccatcgaggttttcaagcctatggctgatgctgctgtgaagattgtggagaaaaatggctttagtgataagattaaggttatcaacaagcattccaccgaggtgactgtaggtccagagggtgacatgccatgccgtgccaacatcctggtcacagagttgtttgacacagagctgatcggggagggggcgctgccctcctatgagcacgcacacaggcatctcgtggaggaaaa

SEQ ID NO: 13558 - DNA, 28447 bp, Homo sapiens
gcgtgctggccgcggtaaaagtggtagcagcggaggcgagcggagggtttcccgcggcgggtgaggcgctgggtatgctgggaaggtggggtcgctttggggttctgtgtgcagcgagcatggtgtccttggcaccagggtttcggcagaggagcctagcgtgggcctacttggactcctccgcgtggggcagctcgggacacccgggcctgcaggagagcggggttctaggctggccccggctctgcagtgcagccgggtgcctgccactcgcggggctctgtcgcagtactcgtgcctggcgcctcccctcagccacagagaccgcagtagctccaaccatcgcacccctaactgggccacgagttctctgattgccagacctgttgtctttgccactcactgttctgagtaattggagagtcgtgtattcactacacgccaaccagagtggtcctgtaaaagcgtaagcctagtgtagatacgcttctgcttaaaactcttgagtggctcccagtgcttttagaacaaaatccaaacgcctttccgaagtcgacaaggcccagcttgattgagcagaagatgtgataggagatgaggagcggggggcttctgcaaaagtgcttcggtcgctcaggcttttggcacattttgcttatgcaacctagttctttctaccttagggccttttcttgggaaagttggggtaaggattcctgacctgtaaaaactcttccccaacttttatcccggtctgtcttgtagatctcaaatgctagtttcctcagagtccttctgtaaccttggttttctctttctacaacgctctgtgtatttcttgcattcatgtagtctgtaatttgtattactctctcattagagtctaagctcttggagggcaagggtcttctctagcttgtggtggtggctccagtccctaatatagtgcctggcacatagaaggtatttaataaattttgttattttattttttcgagacagagtctcactctgctgcctaggctgagtgcagtggtgtgatcgaggcgcactgcagccttgacctcctgggctcaagcgatcctcacctcggcctaccgagtagctgggactacaggcacgcgccactacactcgggtaatttttaattttaatatatgtatatttatatatatatatatatatatatatttttttttttaagacagggtctcactctgtcacccaggctggagttcagtggcgccatctctgctcactgcaacctctgcctcccgggctcaagtgattcccctacctcagcctcccgagtagctgggagtaactgggactacaggcacaggccaccgcgcccggctaatttttttaaaaattttttgtagagaacggggtctcactatgttgcgcaggctggtctggaactcccagactcgatatccttgcgtctcggcccctcacagtgctgggatcacaggtgtgagccaccaccgcctagcaaatacattttgaatgaatgtagtggaccatctgctctgcagtctgacggctaatacaattagggcttggcatggtggtttctatttcctccttgtaaatggccatgcaagtttacaactcttggagaatgaggaggggttcagagaatatctcctgaatctgtagtgtagactgcttctgggagagaacaaataataatggatgagggcattcagccagagaaggtgtgtagtgcccaccagaagaggttcatgccttcataaaattgttaacacaagacatagttccaggtttgtttgtttgtttgagatacagtcttgctctgttgcccaggctggagtgcagtggcgcgatcttggctcactgcaacctctgcctcccaggttcaagcaattctcctgcctcagcctcccaagtagcagggattacaggcacctgccaccatgctggctaattttttgtatttttagtagagacggggtttcgccatgttggccaggctggtctcgaactcctgacctcaggtgatccacctgctttggtctcccaaagtgctgggattataggcgtgagtcaccgtgcctgggctgttccaggttttgaaaagacactgtggtcctggttttagactcagcaacatcacagacaagaaaggaatcctatggattaaagttcttcactataagttttttttttcctccagttcaaatgggtaacgtgccaatgtagtaaaggtttgagggaggcacgtctgacacaggcacatgaacacccagtcatcacgcttatgaactacaaaacgatgactcttaaccttgaagtgacttcagaattgattccacatggaccacaggattagtatttcaggactctaccatatggatcctattgatatgtttgacacctggtccagttttacttcactaaactgattgatataatgtgcatgattgtctaagcctttctaattggatgaaatgccttctccgtccacaaccccctccttctcctcctgcctcagctgaatccaccttttaagccttccttgaacattcagtcagatatggccatttctttctctactccaacatttgttggacacagttttctaatgcacattacagattctgacagttctagatattctgtctgtaaaataaatgttagtacatgagataaagtggattatagcaatgttgttaaactgctggttgcaacccattgatgggtcctgaccagcaagtaaaagtgcagctgggtgccgtggtgcatgccggtagtctagctacttgggaggctgacgtaggaggatcgcttgagtccaggagtttaaggctgtagagtgtaatgatcatgcctgtgaatagccactgtgatccaacctggacagcagggagatcccatctcttaaaaacaataaaaatgaaatagagcatatcagagggccttgttcgtaggaagtcagtattgttttgtggaacatttagttgtatgcgtacatgcaggtatgtgtattgagtctcattttaaagtatatttcttactggggttatcagaaagtttgaaaatcattagactaggggataggtatgctgagattttagtagtagagttttacctggacaaattgtctactttgaacctgactgccggcctgagtttgttcagggaagattgtttctaatctatttgctttttgtttgtttgttttggtgacggagtcttactctgttgcccaggctggagtgcagtggtgcggtctcagctcactgcaacctccgcctcctggattcaagtgattctcctgcctcagcctcctgagtagctgggaatacagacgtgcgccaccatgtctggctaatttttgtatttttagtagagacgagggtttcgccatgttggcaaggctggtcttgaactcctgacctcaggtgatccgcctgccttggcctcccaaagtgctgggattacaggtgtgagccaccgtgcccagcctgtttctcatctatttgtgtaagaattccatgtttacttactctagataacttcaaaagaaaaaaaactctggccaataaaatgccataggaatgtttagggatatgtggagtaggcattctttctaagttttcctgaagatgcaccaatgtttaacaagaaaggaagggcagtgtagaacacctattgctttctgcatggtaagagggatgggtattgggagagcccacacctgctgaggagtgcctttagactttgagcggtggtgtttctctccctcccagaaatagatctctttggggagacaggccatacaagacgtgaatctggtgacattttacttgtttgaagcaaaatttttttagatgatggagggtttttaaaaattgcttttaaaattaaaatttgaatagataagaagtaatcactataaaaaataatgaagcataaggaatgctagtattagctgggtgtggggcactcacttgtagtcccaactactggagaggctgaggcaggaagaatgcttgagcccaggagtttgagtccagcctgggcaacataacgagaccccatcttttaaaaaaaaaaaaaaagaaaaagaatgctaatatcgtgaacatttatgttcccaccacccaatttaagaaaaagaacaatacttttgaagtccactgcgtacccctccttgatcccatctctttcccttctcttttaggagttaactatcctgattccttgctatgctttttagtgtgatccctgaagaacgtatcactccattttgcatagctataaatttcatagaaatggaatcgtattgcatgtgttgtgtgatttgctgtttttgctcatcattatattcctgggattatccatttttaggtttatgtgtgactgtaatttattgtttagatgaaagttttcctggtttgacttgctctatcttcatatttttccttaagctaagggttcagcatacgaaggcagtattggtggcacttctttaacagtaccccatctcttctcctagccttgagggctgcacctagatgaacttgtgaggctcatttgaaccttttggaagcaccgaagcctgctgaagtttccagacatctgtatgaatctgttgtagttttttaatgttatatgctgaatataaaaccaagtaactcctgctggaaacatttacaatatcgattaacaaatactatcagtggctttgacatttttgtcagtttcttgatttttttccccgcttttgtctccccttcccccctccacattttggggcattgtgctgttaatagattttttttctgttcgtttgtttatatacctcctgtttccttctgatgttaatagatttctgacagtcagacttgtccacaagaactcaactggcaaggctgcttttctgtgctaaaactggggagctagtgggcaccatgaagatcttctgcagtcgggccaatccgaccacggggtctgtggagtggctggaggaggatgaacactatgattaccaccaggagattgcaaggtactgggttggtttacagcaggctgcagctgggtggggcacttgatctcaaagcagatgccttgggctccagtctgagcgtgggctaggctgtcacccagtgcttatgatgagggctggtgttggtcctgagcaggtctgctcagccaggtaggtatatgtagcagttaggcaaaatcatgcctgtttggagagtcagacattatgtagcagccttagcagagcctcagcatctgtttaacggagcaaagaaaacccaagcctcagtagtgttgatgaagttgaatcatttacttgccttactgaaatggtgacatgttcatcatatggttaaattcttttgaatgaaaaaaatgaaaatggttttttttttcccttagaagaaatatttaaaagtatgtgagttgttggccaggcgcagtggctcacgcctctaatcctagcactttgggaggccgaggtggccagatcacctgaggtcaggagttcgagaccagcctgaccaacatggagaaaccccgtttctactaaaaatacaaaattagctgggcatggtggctcatgcctgtaatcccagcttacttgagaggctgaggcaggagaatcacttgagcctgggaggcagaggttgtgttgagccgagatcgagccattgcactccagcctgggcaacaagagcgaaactctgtctcaaaaaaaaagtatgtgagttgttatgtagcaatcattaagtgcattcagtgtgccagcattgtgctaaggctgtggataccagatgaagaagatcctgttctcatcttcaaggaccatgcagttttgtggaagagacaggcacatacaaaattacagcacaaaagccaggcacggtggctcatgcccgtaatcccagcactttgggaggcaaagggcgggcgggcgggcggtggagggggtggtggcggctgatcacttgagggtcaggagttcgagaccagcctggccaacacggtgaaaccccgtctctataaaaaaaaattagctgggagtggtggtgggcgcctgtaatcccaggtactcgggaggctgaggcaggaaaatcacttgaactcgggaggtggaggttgcagtgagccaaggttgtgccactgcactccagcctgggtaacagagtgagactctgtctcaaaaaaaaaaaaaaaaaaattacagcacagtgagataaaggcacaagaggtcatggaagcagcaagaaccagctgaacttggggtgggaggtaatgtttgaataatttctcagttctaaaggaagagaaggtgaagtttgagcagcagggattacaggtaagctttcagatgagccagattgtggctgggtgcagtggcctacacctgtagtcccagctacttgggaggccaaggcaggaggattgcttatgcccacgagttcaacatagtaaaacactgtctcacaaacaaacaaagaccaaaaacaggctgggcacagtggctcatgcctgtaatcccagcactttgggagaccaaggcgggcggatcacctgaggtcgggagttcgagaccagcctgaccaacatggagaaaccctgtctctactaaaaatacaaaattagccaggtgtggtggcgcatgcatgcctgtaatcccagctgctcgggaggctgaggcaggagaatcacttgaacctgggaggcggaggttgccatgagccgagatcgtgccattgcattccagcctgggcaacaagagctaaactctgtctcaaaaaaaaaaaaagaaaaaaaaccacacacacacagatgggctattctggggagcagctagcagtttagtgcagctggagtgtggtacaaaagtactatggtaagagaggctgccgaaagcatacgcggggtcattttgtaaagggtggtagcaaaatgcaggaagaggaacatgagtttaagtccaagctttgccacttctttactctcttggccaagttacttctctgagccttaatataaaataatatatacttcaatatagtaatacattatctcacagtataatacaattatcttagaattgtttgatgattaaatgtaatacagtatctggtgcagaattagggcttaaaatatttacttttttttctttttttttttttgagacagagtctcgctctgtttcccaggctaaagtgcagtggcacgatctctgctcactgcaagctccgcctcctgggttcacgccattctcccgcctcagcctcttgagtagctgggactacaggtgcccgctgccacgcccggctaattttttgtatttttaatagagacggggtttcaccgtgttagccaggatgatcttgatctcctgaccttgtgatccgcccgcctcggcctcccaaagagctgggattacaggcgtgagccactgcacctgcccaggtcttaaaatatttctaaacattttggacattattttcttgttttattgttcagatggagtcttactctgttgccttggctggagtgcagtggcgcagtctcggctcactgcaatctctgcctcccaggttcaagggattctcttgcctcagcctcttaggtaactgggattacaggcatctgccaccacacctggctaatatttgtgtttttagtagagacttggtttcacctgttggccaggctggtcttgaacttctgacctcaggtgatccacctgcctctgcctcccaaagtgctgggattacaggtgtgagccacagtgtcaggcctggacgttattttctgagtgatatattaaacaggagagaaagaggattggattgcattttggaacactcactgagagcggtgtggagaggagagcatttggggatattgtagtcccagagctgcatagtcccagaggagacagctcgggggaacttgagtttggtaactcactggatatgatggagggagagagaagattcaagaagcaccaagacttctggttagaatgacaaagtggatggggcctgcaagggaggaatgggtggtgtggggaggggaacacgatggagattaggcgtttaggtttggacatccacatagagatgccaatggcagatagaattttgggtctggagacagaatttgtagttgttggaactgaaactgggagaggttgcagtctctcaagggggtgtggaatgtgaaaggtagagggctgaagaaggaatcccggaatagctgaggaggcaaagaagggcaagggagatagccagcatggaaaggaagaaagagggagtgtgtctagcaaggtcagaggcactgggaagtcccagatactgatgactgacatcagctgcaggagtgagctggtggtggttaccgagagtgatgtcagtggagtggtgggcagtaagtgtgaagaggccaggaaggtggtgagtgagatgccttttaaatagtgagcagaggtagaaaggactacatttcagctaagcatccatagctggcttcagatataaaaccttgatgtgccattaaaaaaaaaaaaaaaagaacccccttctttcagtgcaccgctcttcaaagtgtggaatgtggaccacctgtggcacaattgcctggagcacattagcccagccttctcaataagagtgagagtgtgtgtgtgtgtgtgtgtgtgtgtgtgttctgggactctgcatttcaggtaagctttctagtgattctagtgttgacccaaggctggagggcctctgttttaatgtgagctccttagctgtccccttgaattcccagaaagcgtggcagggcctgcctagttctgggtgctcatcccgaccccgcctgagggttttcagtgtgtgaattactgcagtaggaaatatggagaagtgattctcctccctttactacggtattggtgaactctttagttttccctgatgatgttaagtgaacgtgcccagtggggtacctgtcacatatacagtgggtgtatgtgagtgcttctctttccccggctgctctccctaataccgcatcagtggttatctccaggcagagatgtaggccaggttaggtcaagtattaggcagattgagtctgagtttttcctgaggaggaaaatgtgtagtgtatagcaagatcaagatgctagtggctgtggaattactgtgacagggctaactgccgagaccagctcggtcgtggagaccctaacccagtggcgctagaggaattaaagacacacacacagaaatatagagtgcagagtgggaattggggggctgacagccttcagagctgacagccacgaacagaactttacctacatatttattgacagcaagccagtgataagcattgttcctatagattatagattaaaacgggaaacaaagggatgggctctggctagttatttgcagcaggaacatgtccttaaggcacagatcactcatgctattgtttgtggttcaggaacgccttaagcgaaagccgccctgggtgggccaggtattccttgccctcattccagtaaacccacgaccttcagtgtgggcatcatagccatcaacgagcatgtcacagtgctgcagagatttgtttatgaccagttttggggcctgtttttggccagatttgggggcctgttcccagcagctaactactggagcatttttaggtctgagaacatctttctctgagacttttttctgcagcactagagaataacagcttgaaactctattaaaataaagtggccaggtgcagcgacggatgcttgtattgtagttctgctgaggcaagaggatctcttgagctaaggagttcaaggctgcagtgcccaatgattgaggctgttcatagccactgcactacagcctgggtgacataacgagaccctgtttctaaaaataaacaaaaaaataggccaggcgcagtagctcacacctgtaatcccagcactttaggaggccaaggtgggcggatcagttgaggtcaggagttcgagaacagcctggccaacatagtgaaaccccatctctaatgtaaatacaaaaattagccaggcgtggtggtgagcacctgtaatcccagctacctgggaggctgaggcatgagaatcacttgaacttgggaggcagaggttgcagtgagctgagattgcaccactgtactccagcctgggtgatggggtgagaccctgtctcaaaaaaaaaaaaataaataaagataaaagacaaccaaaaaatagtttaaaatagatgacacgtttgttctatctgtttagcaatgtgtttatatatgtgaatactcttgtgtgttgatgtgtatcatgcaaaggttactgacttttttgttttttaggtcatcttatgcagatatgctacatgacaaagacagagtaagtgtaaaaggaaactattatcttgatgtggggtgttttgaagtcttggattacaagaaggttaagaatccctgggggtcatgatgttaaatgatactgagaggcgtatggtgtagaagtcaggaaatcagttgggagactgggtcctacttctggctctatttttgttgtttaatctcccagctttatcaagatagaactgacaaataaaaatggtctatgtttatggtaatacaatgtgatgaatatatgtgtatggtgtaaaatgattgaatcaagctaattaacaaatctaccgcctcatacttttttgtgtgtggtgagaacatttaagatctactcgcttagtaatttttaagtgtacattattaactatagctcacaatgccgtacagcagatctccacaacttattcatcctatctgactgaaacatcagatcctctcccttagcaggtaccattctctgggcttctgagttcaacatttttttttttttttgagacagaatctcgctctgtcactcaggctagagtacaggggcgagatctcggctcactgcagcctcagtctcccgagttcaagcgattctcctgcctcaacctgcctaagtgttgggattgtacctagtattgggataatactattattatactattatacctagtattgggattataacttgggattacaggtgcgtgccatgacacctggccttcactgtagttttaatttccatttttaattttaattttatttttttgagactgggtctctgttgcccagtgcagtggtgtgatctcggctgcactgcagcctagacttcttgggcttaagcgatcccccaacctcagccttcccagtagctgggactacaggcatgccaccatgcctggctaatttttgtatgttttgtagaggcagagtttcgctgtattgcccaggctggtcttgatcccctgaggtcaagtgatccacccgccttggtctcccaaagtgctgggattatgggcatgagctactgcgcccggccatcgtgtgcttgtttaccatgtgtatatctttgttctagtctagggttatgaacataggtgtgattcttgatagacactgccacattgccttcaaaaagggttccagattcactgtaatatcttcaaaactgggtcattaaaaagtgacagctaatttaatggcatcgttaaagtgaaggctgtgccatccctggtttacaattgaggacgctgttcatcaattttttttaacttaaaaaataaataaaacaaggccaggcacggtggctcatgcctgtaatcccagcactttgggaagccgaggcaggcagatcacggggtcaggagatcgagaccatcctggctaacatggtgaaaccccgtccctactaaaaatacaaaaaaaagccgagcgtggtggcgggcagggcctgtaatcccagctactcaggaggctgatgcgggagaatggcgtgaatctgggaggcggagcttgcagtgagccgagattgcaccactgcactccagcctgggcgacagggagactccgtctcaaaaaaaaaaattgtggtaaaaacacataacataaacggtcatactgattgtatctaagacataaatgcacttactttgacaatgaaatagttctatatttctgtgaaaaattatttcacccagactaaacatttttgtgctttacctcagaggcaacgtcatttcttttttttcttttttctttctttctttttttttttttaacaagaatgagtctccctctgttgccaggctttagtgcagtggtgtgatcttagctcactgcaacctccacctcccgagttcaagtgattctcctgccttagcctcccaagtagctggggttacaggcatgcgccaccatgcctggctaattttttgtatctttagtagagatggggtttcaccatgttggccaggttggtctccaactcctgacctcaagtgatccacccgcctcagcctcccaaagtgctgggattacagatgtgagtcactgcacccggcctggtaattctaaagaatattcagttctagatattttctaattccagtctgatttagtcttttgcctatcagtttagaagtgtgtttcttaatgtatgaaaaattttttttcttcagttgtgtttctgatattaagatttttgacttgttttgcattgtggtcagaggatatcacccttttgatgccagttctgtattagctgtctaatgttatttaacaaattaccttaaattttaatagcctcttaatatttcttactaacttggcaggtcatcagtctatttaaaagatttgcacatattttttccatcatctttagttattttcaacagaagggtcactgtgcctattgagtcagaccgttatagatgaaagatgtatgtgtttactaaagacagaagtaaaaatcttcaagatgcaaagaagttattttctgatggggaaaatactttttagtgaagctctctgagttagagtcggtaaaggaaaacaagccatacatattgcagcagagcggctttaacacaaggagctggctacccagctgtgggagggctagaaagcaaatgggaacgctgagtaacctaacagtagagattgcagggagcagttaccttgcctagggctgagaaactaaacgagaagattaggatttccagaagccacaagcattgaggagagatcctgtggaccactgtccaagtacggctgcagctctgaggggcccaaggagctggttatgggatcattgggaaaagttggagtctgcaatcaactgcccctaccgagaggaccctgatgagaacagcagcatgcagaaaggagcaagcctgctctgtcctcctaccttccagtcgccctcttggtcccccttttggctgtacctaacagttggaaaaaggagaacatggtttgcagggctctggcatcacttagtagaggatagaagagtgagtgtggagcagggacagtcgcttaataaagggcaaggggctgactcacaagacctgcccaactcagccagagctgttctgccaggggccagaaaggccatagggccctgacttgcactgccactgccagctgtgactctagaactttgcaaagcacctttccacttacttataataactggtagtaagtgacggccatgtcttccttagaatgtaaaatactaccaaggtatccgggctgccgtgagcagggtgaaggacagaggacagaaggccttggttctcgacattggcactggcacgggactcttgtcaatgatggcggtcacagcaggtgccgacttctgctatgccatcgaggtaagccattcccttcaggtgtgtgtcctgcatcttgcatgggaaatcccctatgctcttgcactttccccgtctgttccttcacaaacattcatggagtgctcactctgtgccaagcacagagccaggctctgagcgtatagagatgagtcagacacagttccttcctccaggagctaattttctcctctgtcagcctaggctgcacatcagaatcactaggagctttagaaaatacttacaggctgggcacagtggctcacgcctgtaatcccagcacttcgggagggtgaggcaagacaattgcttgagcccaggagtttgagaccagcctgggcaacatagtgagatcccatctctacagaaaaacttttaaatattagctgggcatggtggcatgtgcctgtgttccagctattcttgaggctgagatgggaagatctcttgagcccggaaagtcaaggctgcagtgagccatgatttggacttcatgtaagaaagcaaaaaattacttctaccttgtttaagccagttattgtgggactttgttgtttccaactaatcagtatatgaactcagttttgtaggggaaagtatttaaatacatgcccccacaccaccacactccagcctgggtgacagagtgagactttatctcaaaaaaatcaaaacgaaacaaaggctgggcacagtgtctcacccctgtaatcccagcactttgggaggccgaggcttggatcatgaggtcaggagttcaagaccagcctgaccaacatggtgaaactccatctttactaaaaatacaaaaattagccgggtgtggtgatgcgcgcctgtaatcccagctactcaggaggctgaggcgagagaatcgcttgaacccaggaggcagaggttacagtgagccgagattgcgccactgcactccagcctgggcgacagagtgagactccatctcaaaacaaaacaaaacaaaaaaaccttatgcctagtccccagccctaacagattttgatttaacttttctggggtgaggcctgagccttgggacttgggaatgtgcggcaaggttgagaaccactaccttaaatgtccctatggagtcagctctcttatgtttaccaatttgtcatttctttaataaaacattaaacagcttgagcccacagagcaagaaaaattaaaaaccaaacaaaattaaaaattaaacatgttatttttctcataaaacaaataatgcatattattataggaaatttggtaaataccaaataaaaatagtatgttgacccaaagttaagtactgttaacattttggtgtatattcttccaagttttgggggcaggcagggagcatgtatataaatactttccctacaaaattgggttcatgtagtgattgagttggaaataacaaagcctcaaaatcactgtggtttaaggtagagtagttttttgctatctttttcgtggcgtgatctctattcaccgcaacctccgcctcctgggttcaagcaattctcttttctcagcctcccaaatagctgggattacaggtatgtaccactgcacctggctaatttttatatttttagtagagatagggtttcgccatgttggccaggctggtcttgaattcctgatctcaggggatccccccacctcagcctcccaaagtgttgggattacaggtgtgaatcactgcgccctgccttgttcctcttttttaaaagtaagaataactttcccaggaatttctattatagcaaacctctccttgggtaccatcggctagaatgaggttaaatctcatttcttatctctggcaagagggattcagttactcttagctcagacaagtgcaccactgcaaaggtcagttccccacgctgcaccctcacctgatttcaggggagaggaggacacagaatggatgtcgggaggtcatcttcagtgtccactcctggtagtgttttgggtgagatcttgagcttcttgatgggctgaggagaaggaggtgtgaaggtaccagcttgcaggttcagggagaggtgactgatgagtcagaaggcagcaggggtgagggacgacactggctttggatattgtcagggtggaggcaaagtgattggtgagaactagggtttaaggccctcaaaccacatctaaaaacatcaaggcaaatcctagaaataatttgaaatagatgatgaagatttttctaggagaacatgtgtgtgtattccatgtaaatactgcgcgctaatcaattgcacaactggagctgctcacgtaagtactctttacgaaaggatacagcatttgtcccttgattatagtaaaaaatatagtattcatggtagaaaatgtgggaaatacagaaaaggatttagaaaaaaggaaaatcttatcaggaacagtctcggtatcattttgtggtttccacttcgtgtgtagggccacacgtgagtctgtttgttttacatgctagagctcttggggctgtggaatctagactggataagttgaaaacaaagagttggaggtgcttatttatgttcagggaaactcgaagagttcagggaagacttctggatgggggattcatgctgccctgggaagtggggtttgatttggcaggtggggccaggatagggaaggctcagtgatcatgagatcattgtggctggagtgttggttgttgggggaatgggggaggaagactgggaaggtaagggagggcctccaaagcagtagtttccccttatctatggtttcacttttcgtgatttcagttacctgtggtcaactgaggtccaaaaatactaaatggagccaggtgcggtggctcacgcctgtaatcccagcactttgggtggctgagacaggtggaaaccttgagtcccagagttggagaccagcctgggcaacatggcaaaaccccgcctctacaaaaagtagctgggcatggtgatctacgcctgtagtcccagctacttgggagattgaggtgggaaattgcttgagcctgggaggtggaagctgcagtgatcatgccactggactccagcctggacaatagagtgagacccttctcaaaaaaaaaaaaaagaaaaattaaatggaaaattccagaaattatttataagttgtaagttgtgtaccattctgagtattattacataattgttctatttttagttattgttaatttataaattattatttatatttattattgtgcctaatttataaattaaacctggtcataggtaagcttggaggctgaagcagctccactgtgaatgctaatcctccacgctgacttctgaccaaccccagcttcaggaatgcctctaaaatttccgctctcatgcactttgatgtaaatcctgccctcaggtcagaacaactttgatgttatcataaatacatacttaccgtaaatcctgcccttcgtcaaattccctgtggtatgtaagccctgcgtctgagccataacagtgtgggggcccagtttctcactgcccgagacaaggcttctgtttgtatgtctctataaagtgtgtctttctgagaagctggatttgccagtctttcctcagcctctcagctcccgtggcctgttggggtaggtttgcatagagctgcccaccatggaacagtatgtatgtatagcaaaaaaaaaaaaaaaaaaaaaatggtatacataagggtcagtactgtctgaggtttcaagcatccaccaagggtcttaaaatgtatcccccatggacaagaggcactgctgcaccataagaaaatagaggctgtgttctgccaacagtggggatttgggacaattttgagcccagaggatgacctacttactcacacctacagtctgctctcctctggagggcacagcacgcctcccaggttcgtgaggcaagtccctttcctggctttttggcgtcctcttgtgcggtactgacacctactgctcttactaagtagtgcagcctcctcaggatccccggcatccccgctgtgcctggcacggaatgagagtccctaatcacaagttaaagccagctgaatctcagccctttttcatgatgcacatttggagaataaagtatttaagttacatatcttaggaccagaatcaaggaatagcttgctcaccttaaaggtcagactactgtttaatttattgctcatttttccttgggtttcggctctattttctaggttttcaagcctatggctgatgctgctgtgaagattgtggagaaaaatggctttagtgataagattaaggttatcaacaagcattccaccgaggtgactgtaggtccaggtgagatttacacaccctgtgttgaaagctttgcttgctcttgtgtgagagaggaaaagggttattccagttacctggaacaaatccaggtcatagcatagaagtgggacctctctgtgtggagctctgacagtaaggacttggtttctcttgatgtttattttcctgctagttaaaactagtcaacaaggagtagactagagctagtcaggtccagcaatggagacgcaaacaaaacctacatttgctttaagcaaattggaattcttatggggctcaactcttgagtttcaactaccaataattacgccttggataaacctcattggctacgatactgccactgctcaaagctcaactctgagtttcatcaggcagaaagtacttagttcttttatttatttatttttttgagagagagtctcactctgtcgcccaggctggagtgcagtggcgctatcttgcctcactgcaagctctgcctcctgggttcacccatcctggctaacacggtgaaactctatctctactaaaaatacaaaaaattagccaggcatggtggtgggcacctgtagtcccagctactggagaggctgaggcaggagaatggcgagagtagttctgacattctgcttctgcatacaacatgaacaattttcctgtatagcattgtctcttaaggtttccagaatatgtatatgtacacacacacacacacacacacatattttttttttgagacggaatctcactgtgtcacccaggctgcattgcagtggtgcaatcttggctcactgcatcctccacctcctgggtacaagtgattctcctgcctcagcctcccaagtagcggtgattacaggtgcctgccaccacacctggctgctttttgtatttttagcagagacggggtttcaccatgttggccaggctggtcttgaacccctgacctcaggtgatccgcctgcctcagcctcccaaagtgctaggattataagcgtgagccaccatgcctggcctccagaatattttttatagtctagaactttgtttcagtctttgaaaatttcacatgccactgacacttagagaacatagttgaaagatttgcaaaggaaaaactgtggtgaagttatggataacaccatgggttttttctaattttttgtggagatagggtcttactatgttgcccaggctggactcaaactcttatgctaaagtgatcctcccatctcagcgacccaagtacctgggactacaggtgtgcactactgcacctggctttttcaccacggttttggagaatgcagtatcattctgaattgaagcttctacctaaggtcaacattattctcccatttaacaatttttttttaatggagaatctgaaacatgtacaaaagaagtgggtactatcttatttatttatttatttgagacagagtctcactctgttgcccaggctggagtgcaatggcaggatctcagctcactgcaacctctgcctcccatgttcaagcgattctcctgcttcagcctcatgagtagctgggattacaggcgtgcaccaccatgcctggctaatttttgtatttttagtggagacggggtttcaccgtgttggccaggctagtcccgaactcctgacctcaggtgaccagcctgcctcggcctccgaaagtgctgggattacaggtgtgagccaccgcgcccggcctatcttttttatttttaaaatatacaatagagtgctcaaatcattccatttacaatcaacgttattgaagtatgatttacattaaatgaatatccattttcattatggatatttgacaaatataaacacacttgtaaccaccatcaccataatgaagataatagaacatctccatcatgcccaaagagattcctcataaccctttctatcagtccccccatatcctggtcctaggcacccactcatagacttcattatagattagatttgcctgtctaggatttcaaggaagtggaatcaaagaagtgtggactcttctgtgtgtgtgctctcttttttatagcgtgatgctggtaagattcttccacactgttcatgtcttgggggtccgttcttttgtgttactgagcagcactctattagatagatgtaccataacttgtttatctctctacctgttgatggacagggatttcttggataggtctttagattcactgatcttttcttttgcagcatctaatatgctgttaagtatatttagtaaacttttcatttctctttctttgttgttcttttttttttttttttgagacaggatcttgacctgtcccccaggctggagtgcaggggtgtgagcatggcttattgcagctttgacctcctgggctcaagcagtcctcctgcttcagcctcctgtgtagctgggaccacaggctcatgccaccatgcctggctaacttaaaaaaaatttttttttgtagagatgggatctcagtttgttgcttaggctggtctcaaactcctgggctcaagcgattctcccacctcagcatcccaaagtcctaggattacaggcgtgggccgctgtgcctggcctcatttttgatattgtattttttaatctctgaaagttccacttgattctttttcataacttccatttttctcatgttcatagttttctataagcacatttattttagctttttgaacatccttatcttctgttcccaccatctttgttttttctgggtttgttctcttgactcatttttatccttattctgggtcacattttccttcttcacatgtctaaccatttttgtttggatgctgtggctatttggaattccccattgttgagtgctagacttcgttggttttgctttttaaactttggcatgcagttgggttacttgcagttcagattgatcctttcagggcttgtttaagctttctttggagtggggttagagtagctttaagtcaggccttctcaacagtagtgctgtgacgttttggcattctccaactatgtgacattttgataattctttgttgtggaccctgtcctttgcattgtaggatgtttagcagtgtccctggcctcttcccagtggatgtcagtagcactcccctcctcccaccattcttgccaactaaaaatgtctccagactgccacgtcttccttggtctcgagtgtgtaaaattgccacctgttgagaaccactgctctaaggctgtttagccagacagttactgtaacctttctggagtgtctgctgagagctctaggtgctcagcagggtttcccttgtctggctgatcagaacttgaatgtttcccaggcctctgagagctccggagattgttatcactcatgcaacctttgctcggcttcacagagtattaccctgtgtgtgtgtgaatgtattaacacagaccctagaggaaccctgtgcagcattctgaaggctttttttctgtgtaatttcctctctgattctctgcctggcaagttccagctgcttccacttccctgaactcgtttcctgtctgtttaactcagcaagactgccgtgctctgtgtcacctcttaccctatactgtggtctggaaagggtctcctggctgatagccagagcagggtaagggttacttggtttgtttcccttcttagggagcaaactgtgttgcctcttgctcaacatctgaaaacacttgtttcatatattttgcccagttttctagttgataacagccggagggtaagcctgatcccacttattccactatggccagagtggagattgattcatttatttatttttttttgagacagtctcactctgttgcctaggctggagtacagtgatgcgaacacagctcactgcagcctcgacttctgggctcaagtgatcctcctgcctcagcctcctgagtagctgggaccacaggcaggcgccaccatacccaactaatttttttgtttttttaaatttttattagaaactaagtcttgcggctgggtgcagtggcttatgcctgtaatcctagcactttgggaggccgaggctggcggatcacctgaggttgggagtagcaaccagcctgaccaacttggagaaacctgtctctactaaaaatacaaaattagtcaggtgtggtggtgcatgcctgtaatcccagctactgaggagattgaggcaggagaattgcttgaacctgggaggcaaaggttgcggtgagccgagattgcgctattgcacttcagcctgggcaacaagagcaaaattctggctcaaaaaaaaaaaaaaagaaaagaaaagaaactaggtctcgctttgtttcacaggctggtcttgaacgccaggcctcacacagtccttctgcctcagcctcccaaagtgctgggatcacagatgggagccactgtacctggcgagatcatttattcttgaaaatttatccattttgacggcagggagactgatctgcagggcagccttggccatgaagtatgctgactctgcctccaggcagcattgttcacacacacctcagcttaggccaggcccctcatatgatttcttattaaaaaaaaaaattttttttagatagagtggctctgtcgcccaggctggagtgcagtggcatgacctcggctcactgcaacctccacctcccggattcaagtgatccttccacgtcagcctcctaagtagctgatattacaggcatgcaccaccacctggctaatttttgtatttttagtagagatggggtttcactatgttggccaagctggtcttgaactcatgacctcaagcgatctgcctgccttggcctcccaaaatgctgggattacaggcatgaaccaccacgcctggccaatttcgtaatacttttcttcatagcgcttaccactgcaatcattaaatcattatgtagttatgtatttaatgtctgtatccccacccagctgaggcatcctgaggtcatgcactgcgtgggttgtattaactattccattccgttatttgctccgggcctgtcatgtaaaggagttaggtaatttttgtaaagtgagtagattgtcagttgtgcttcatccataatcccttgtaaatgtgactttgtttccgatcctcagcctgacaagtggcttcctcattgccaagttgggtggtctttcctctgcttttcctctctaaccactgccgctttggtacttctgccattccttccttcttgaaactctccctggaccttagtgacatctcttcatcttggttctcctgtgttgctttctttctgctccagatgtatactttccaaggttctgctctcagccctttttaaaagtggcatctgaagttgcctgttccccagagctgggttacatgctgaggcttgtggagagccaacccagggagcagcgtgtgttcatccgtccattttgttcatttggaaagggcttaggaagctcctggggtggctacctgcttcagactcccccaccccgtgcccttatacattagcagtcacactcaaaataccaggccctcaagaagtacttgttaaaatgcactggaccataaagcttgaattttttttttttaatttttattattttttgagacagtctcactgtatcacccaagatggagtatggtggggcaatttcagctcactacaacatctgcctcccgggttcaggcaattctcatgcctcagcctcctgagtagctgggactacaggcgcgtgctactacacccggctaatttttgtatttttagtagagacaaggtttcaccacattggccaggctggtatcgaactcctggcctcaagtgatcagcccagcttggcctctcaaagtgctggaattacaggtgtgagtcactgtgcctggctcttgatttttattttaatgaagcaatttggactataaagcattttaagttatataattggtttaaacattcaggagatagaattggcagagtgggtgatcagtgggttgtagggtgacagaaatcaataatttatctaatgtgtgttgactgttacggggcactagaccttgtgggtgctggggtacagtagtggacaggcagtcagcggtcctgctgtcctggaactagtaaatgatgcccagattcctggactatgtgactcattgattgattgaggcagaaaccctggagggaggagcaggcgtgttagctggggtgggtgggatgagttttggacagtgtattccagttggagtttgatgtgacatcagagaggatgggcagggcttctcgggagggtggtctctgtggcagaagacagaagtttcttcttaagctcctccacgtgatactgtcatggagcacaggtgagcttcataggaagtgtgcttttttttttttatcttcatcatcccgaccaccaccacatgagacagagcccattcacccgttttactgatgaggcaactgatggtcagaacggagggctcagggataggaagtgagatccaggccaggctccagcctcgagctcgaggttcacgctgtctctgttgtgctcttctatcagctgctctctttcttttttttttttttttgaaatggagtctcactctggcccagattagagtgcagtggcgtgatctcggctcactgcaacctctgcctcccaggtttaagtgattctcctgcctcagcctctcaagtagctgggattacaggcacccatcaccacgcctggctaatttttgtattcttagtagagacagggtttcaccacgttggccaggttggtttcaaacttctgacctcaggtgatctgcccatctcagcctcccaaagtgctgggattacaggcgggagccaccgcgcccggcccctgtcagctgctttcatgcttctcttttccttgtgtcatctgtgagacttgtgctctgtgtaggggaaatgagtgggctttgtcagattataattcatgaggcattaaaagtgtttacagttaattctccctgatgaatagccccttccaaagtctattttggctcttggctcattaaaaattataattgtagaagtagcagtacattactgaggtttagaaaacagttaacagaagatccctcccaaatcctactcttctctaaaatcctactgtcctaaaacaactgttatttaagagattgtttggtgacaaggcgctttcattaagggaatttgccatagtgatctggggattctaagtcatggatctcaattttggctgccagagcctaactcacagtagctggaagatcatcagagaaccttgttgtcttgctttggctttccctccctctccctgcaacctagaagtatttgacataccagcattctgtttttgcttttcaaataatttttctaatttagtggttaatagtttaattgttaatttatatctctctaattgctaatagggatgaaaaagttttcataagtttgatttctgttttgaattttctgtttatatttttacctggtttctttttgggtgtgtgttttttttgtttgtttgagacagagtctcactctgtcgcgcaggctggatcactctgtcgcgcaggctggagtacagtggcacaatttcggctcactgcaacctctgcctcccaggttcaagtgattctcatgcctcagcctcctgggtagctggggttacaggcgtgtgccatcacacctggctaatttttgtatttttagtagagatggggtttcgccatgatggccaggctggtcttgaactcctggcttcaagtgatcctcctgccttggcctcccaaagtgctaggattacaggcgtgagccaccatgcctggctaatttttgtattttttgtggaaatggggttttgtcatgtttcccaggctgatctcaaactcctgaactcaatccattgggtatttatagttttcttatcattttttgcagtctccctcccaatattaagcatacagaatagctgtaagagcagtacagtaaacacttatgatcccttaccctagatttatcaattagcgttttgtcatacatttacatatggattttttttttttcctgaaccattggcaagtcagttgcagacatcctgacacttctgaatacctcagcatgtatatgtgcttttagcgtgatggccccttaaccacttatctttcccatatttgctgtaaatatttttcctagtctgttgcttatgtccaactctgttttcttgtgtttttcagagggtgacatgccatgccgtgccaacatcctggtcacagagttgtttgacacagagctgatcggggagggggcgctgccctcctatgagcacgcacacaggcatctcgtggaggtagtagacggagggctccctcagacgtgtctgtggtctcagccagctcacatagcactcactcatgcaccgtgtcccacacagcccaagccctcagcacctctgatacacctgggacacccctccattcctgggggggctctggttctcctcacttaaaactttcatgtcccttgaatgccaaatcttaataggttagagttgaaaagcaagaaactatattcaaattcagttaagttcagcaaatattctcaggaaggcgatgcttgagctgtcagtcttgagaagtgatcaggtgttggcctggcagatggaatatttctggtagaggagagcagcacgtgctagacgtgagactgaatcggtgcggtggctccggagcctgctttggattttgtgctgtgtgggaggcaggagagatgggcttagcaactgaggctagagagctgggcaggggctagatggagtggggtttgggggccatgcccagagggtagctgtcattagaaggtggggtggcatcacaggagggtttgaagcagaggattgacagcagacttatgcaggcagatgtgtggagggcagttggggtatagggctggaggttgcgggtgggttaaaaggctgtggaatcgtccagacgctgtggtacagtgggcctcagctaaggctgtagacagaggcctgataggtggtcccaggagttggtggtcccttaggtgtagagatatcgatgctagggtttgggcacctggattggatggtggtgcttcctgttgacggggagtgcaggaagaggggtagccttgggaaggttgggaagtggtgagggcgattcttctggtttacacagagtttgagctctctaaaggtcagccaagcaaagaggcccagagatgcatggatttactcagtgaagagggcatggttgaggtcactgtggagagtgtggagggagacagtccggaccagggagtccccttgtgaggtggggcggaggaagcacagcctggggaaggcagcgggagtgagtccagttagagcagcatttgtctaccagagcaaggttgggagatgcttcgcagggaggccagttattctgctagccttttaccatgcccagagcaacccctacagcagagaatcatttggcccaagaggccagtggtgtcctggtggtgaaagccatgtgggtagcagctgtgagtgtgctcttgccgggtccctattgcctggtgcatggaggacgtggagtggatgcaagaggtaggaggagagccggacaaggagccggagccggagccacagccctaggggctgagtgtgcagcagtgcccagcggcgctagagggctgggcagctgagggggcaccgtggtccacagggctttgccacaaggaggctcttgttttggtgctgggcaggagcggcactgaagggacactgagcccagagccaggatcaccacccagcagcaggacgtgaagcatttaagagtgccaggtagccaggaacttagctgacagaagtcattttaggcacagtgtgtgttctttttgaaatgtagtaccctttttttcccttttccaagggcatagggctgaaaacagttcactattctaatagtataaggtgttgggcattactgaaccaacctaatgttaaggaataaacctcttttgatcaatgggaattactgtgggtctaagcatctgatttttgtttggttttgtttttaatataaacttaggaaaattgtgaggccgtgccccacagagccaccgtctatgcacagctggtggagtccgggaggatgtggtcgtggaacaagctatttcccatccacgtgcagaccagcctcggagagcaggtcatcgtccctcccgttgacgtggagagctgccctggcgcaccc

SEQ ID NO: 13559 - DNA, 959 bp, Homo sapiens
gcgtgctggccgcggtaaaagtggtagcagcggaggcgagcggagggtttcccgcggcgggtgaggcgctgggtatgctgggaaggtggggtcgctttggggttctgtgtgcagcgagcatggtgtccttggcaccagggtttcggcagaggagcctagcgtgggcctacttggactcctccgcgtggggcagctcgggacacccggatttctgacagtcagacttgtccacaagaactcaactggcaaggctgcttttctgtgctaaaactggggagctagtgggcaccatgaagatcttctgcagtcgggccaatccgaccacggggtctgtggagtggctggaggaggatgaacactatgattaccaccaggagattgcaaggtcatcttatgcagatatgctacatgacaaagacagaaatgtaaaatactaccaaggtatccgggctgccgtgagcagggtgaaggacagaggacagaaggccttggttctcgacattggcactggcacgggactcttgtcaatgatggcggtcacagcaggtgccgacttctgctatgccatcgaggttttcaagcctatggctgatgctgctgtgaagattgtggagaaaaatggctttagtgataagattaaggttatcaacaagcattccaccgaggtgactgtaggtccagagggtgacatgccatgccgtgccaacatcctggtcacagagttgtttgacacagagctgatcggggagggggcgctgccctcctatgagcacgcacacaggcatctcgtggaggaaaattgtgaggccgtgccccacagagccaccgtctatgcacagctggtggagtccgggaggatgtggtcgtggaacaagctatttcccatccacgtgcagaccagcctcggagagcaggtcatcgtccctcccgttgacgtggagagctgccctggcgcaccc

SEQ ID NO: 13560 - DNA, 8793 bp, Homo sapiens
aatatttatatttcctctgtcttttaaaactgaacaccgaggtgggttttgtggtgggtggtgaacggacaggtttgggcctcgatcccccacccgaccctagcacccacaggtgggggtgccccctctgctgatgcgcctcctccctcagcaccatggacctgctggactggagcagcctcatcgacagcaggaccaagctgtccaagcacttggtagtccccaacgcacaggtaacacctccgctcctcagtgaggcccagctcagcagggcgctgcgctaagaagggaattcagcctgccacgtgtgtctcttgttgcctaccctgggaacttaacatgaccaaaatcactgcacactatggccccacagaccccctgtggtccagggggaagaagacaagcccactagtgtccacagagtgcttggcgggacagagacccacgcggagccttaagacaccacaaggagagggggtctgggggccttccccaagtcatctgtcttgtgcatcaggtcaccccaaacttcagaggcctgaaacggcagcagccactctgcttctgcctcatggttctggggttgacagggctcagctgggcagtcctcccctggggtctcctgggtagctgtactcacagagtggtggcgctgggacctgggggaggcacccattcacatgtctgggagttggtgctggctgtggcttgggctttttcccaacatggcagctgggctctaagggccagtgtcacctgagacgtgagagccaggcagaagctgggtgaccttttcctgcctcgcctcagaagtcacacggtgtcttttctggcaagttctgtttgttagaagcatgtcaccaggccagcctgtatacagcggggagaggaatgagactcatctgcctgtgggaggggggcccaggacctggcagactgcttgaaaccacagcttaaactgggattcaaagaaagaacagaagcaccttcagaaaacatcctgcagaggcagctttccatgacacatctagccccagtccactaagggcccagcctcaaacttagagcccccgacccagagcctcggggcgcagtgcgtacagtgtggctgtgcaccaaggccaccagctgttggagactttagcatggtgtagcaagggatagagtggtactgtttgtgcccagtgaggcaaggctgctggggccagcaaaggggtgagcgggaggccctgcgggatgggtccccacggcctctgagcaccagcaacttgaaggcctcatcctggtggttgccctggtccctggctacgtgtcagcacgtgctgcacaactgccctgtctgcctgtagccaggggtcttcctcctgggccctctgcctgctccgggtggagcccttctgtttgacgattgggtgatcagtgttcacttgttcaatgtcacatgggagttgcagggggctctcccacaacggtggggcctctgtgggaactggggagtacacacttcggagtgcaggcctggactgagcctggggcccactgacatgggcactgagctccctcgtggtacccctaggccccgcatagggcagtgcactggctgcgttggaggttcaggggcactgtgctgcttgtccaggtggccctccctcccagccctgcacagacgggtgagagggttcctgtgggctgggaatactgagagaggtttagcctgggcctcagggtggcactttcccgcccttgctgtggcctgaccgcgtgttgcacccccagacaggacagctggagcccctgctgtcccggttcactgaggaggaggagctacagatgaccaggatgctacagcggatggatgtcctggccaaggtgagctgtcccgctcgggcagagggtacctgggactcgtggagaagagggcacctgcctcacttgagcaacagttgctcccactctcccaccccctgcgcctctcagaaagccacagagatgggcgtgcggctgatggtggatgccgagcagacctacttccagccggccatcagccgcctgacgctggagatgcagcggaagttcaatgtggagaagccgctcatcttcaacacataccagtgctacctcaaggcaagcccccgctcagcccctccctgcctgccctggggcttggagaccccacaggaggggctcctctcatctgagctccctggcatttggctggttttacactcagcacccaccagggagctcatgggatggaggagggagtgggccgtgcccccaaggggttgttggggtcttctgcagcacagctcacccagcgggccccagggtccaggaaagagccccttaggtggtggccacagccaggcctgcagaggaggctgaggccagggtgactgcctcagagtagcaagaaagacccgctgcccgcaacctctcccctggttctcagaaccagccaagagtgtctaaggagcaggaggaagacaacaatctttatgagggtccactagatgtacccgacaccccaaacttggaaggtgtcacatgaccatttcctccagcgtgttttcagttcagcgcccctaagaacctcctgaaagctttgggccctccccggaaagactcacccaggatgtcacatgtattcagggagcccaccctagcctttgggccccaaactgctcagggatgttagcaggtccagagctctcaggggtgagccggatgcccagaggacacagggtggcatggggaggggtccaggcaggagcatgcagtatgcacccctcccggtcggcctgggagtctggagcacatgatggctgctggcgcctgggctgcacccacagggccgtccacaggccacacaggaagttgcagacgtccccactgccattgctccttggggacagaggttggaggcccatcctcacccacacctgctccaggtgccctgagctgcacctccccaggcagctgctgcccagccctggtgactgcacctgggcccaggaaggccccatcctgctgtcacttgggcttgcccaggctccctgtgacttttggccctggccccacaggatgcctatgacaatgtgaccctggacgtggagctggctcgccgtgagggctggtgttttggggccaagctggtgcggggcgcatacctggcccaggagcgagcccgtgcggcagagatcggctatgaggaccccatcaaccccacgtacgaggccaccaacgccatgtaccacaggtgcgcagctctcccacccctctgtcttctcagggcagggcgccaagaaaccaggcctgagggagaggcttggagactgaacttgtcagccacatgtgtccccaggtcagaactggtatttcctcagcttttatgtcatgtgttactttttcaaaagcattaaggttattcttttataaatatagaaaagcctattgaacaaagcaaaattggccacagttccctgagcttgctcctgcagacacttagatccagagatgtgcatgaacacccggtcctccccaccctgcaggctcagcctgtttgcttttcagttcacacagtgggatcgcccatcagctgttctgcacctgcttttactgctctagtttcttggtgatcttttcatgtagcacaggctggccaaccatgggcttttcctcttagaggcgtgtgtgcatgctgcaaattcagagagaccccaagtgtctcctggttggctccagctcccctcctgcagccgctgtgcatgtcgtgccacagcgcacacatctccgccattgttttttgcgttgtagcgtgtcctctgcccgatgtgtttttcatttcgcgttccatctgggtcctcttgtgtgggcttgcagagtggtgctgtcaacagccagcatggagtgcccggggctatgtgtccagcatctttgatcttattggtttttagtctggttattgtaatggactcgctggacataccgtcaccctctgtggtacacacgggccgtcaggggttttgtgtctgaggatgcagctgtcctaggttgctggaaatggaattgctgggtcagagagaacgtgcgtgtggtcaagcctgctgagtgacctcgctgcaggagggccgtactgctcgggcttcctggtgcaccgggatgcccacccccactgtgccctacagggacctgcttcccttttatttccttgcagggccaggggtgcactgtacgatccctccccagaagcaaagctgtgtctgtcatgaggctcatgggcatgtttgggctggtccccagagtcacagcacgtttgatgcagggactctgcccccacagctggttctgcgtgaattgtctggtcccagacatcgcttttgcttggttgctggtctttctttttcatgaggtgctgggaggggcagatgctgctcctgttcctcctgatcctgtggatacccttggaaagagccagctcaatggatggatctgggtctgccctcggcctcctctctgtgcagctggtaatgagaggtgcaggcagccacaggcctggaactgggctcacatggcactctccacaggtgcctggactacgtgttggaggagctgaagcacaacgccaaggccaaggtgatggtggcctcccacaatgaggacacagtgcgctttgcactgcgcaggtaggtgtgccccaccctgcaccgaaaccccaacctgagccgttgtctcctccggctggggagaggtggcagcagcgcagagctcagggtgggcagagcgacctgctgggtggtcgggcatttgtggggaaaggctggtgaaatgagctggagggtggcttcagtgggcaggcccaggcccgctggcgttctggacatcggactgtgagagcacaatggctttttgcagttacgttggtttttaaaattaacttttttctttttttgagatagaatctcgctctgtcacctatgctggagtgcagtggcgtggtctcggctcactgcaacctccgcttcccaagttcaagcaattcttcatgcctcagcctcccaagtagctgggattacaggcatgtgccaccacgcctggctaatgttttgtatttttagcagagacagggtttcaccgtgttggccagactggtctcaaactcctggcctcaagtgatcctcccttcttggcctcccaaagtgctgggattacaagcatcagccactgtacccagacttttaaaaattaacatctgacttattaaacttcacaattaaaaaactaaatttcatcagggtattcggatggctcctgaaaggtacaaatgcagtgttggaggccagtccctcaggaggcctccacagtgccacctcattaatacgcccttaacattttaactacatctggaatgtaacggtttgttttctctttaaacatttgtcccatggagcacaacttcggtagaattctaacaagtcaaatgcagaagttaggtgaagtcagttcttggatactcctgtactgtcaccctggtcttatctcatgccttagtccaagctatgcacacaatggggtcctaggtccccctcccctcccagattccgccttcccagggatgggaccccctagaaccctcgggggcctgggcagtggcctcgctggctctcgccttcctaggagctgagcaggagctccactctcagcagggcagggtgccccagatccagggcttgtggcacgagggggctccccaagaagctgtgaagccacagggccaggcttggggccagggctgcagccaacaggacacatcctggtgctgctcgggagctgactcacggctctgaaatcattcagtgatgtccacattcagcctttgtttacgatgctgctactttttcatggcctgaaattgcagcacacccatttttgtgccctgatcctctgctaattgtcatagatgtgtcggtgatgggacagactcactttctccacacgcacaggcctggtggccagcactgcccagcactcgggagctggtgggggttcctctcagcttgtaatcaggactcccagcctctgggtggactctcaatgctggtggactcacagcctgactagacacatcaccatccaactccgaaaggacagcctgccctcagcagggcttcctctctccagcttccgcccggcacctgtctgtccctactatcttgctgtggcagtggcttccccagtggacacagcttccccctcccctgagtggcagccgggctctctcctcttggccccaagggccctgtgccaggctcccccagtaccacgctcacatccctgcctgagaggctggacccctgcaggcttcagctctgcccctgctgtgggtggttggggagctctggggagctggggtcccctcccatgggtaagtggttctagactatggcagctgctctgtcctgtgctgggcccagactgccacaccacccaccctcaaacaatcggagttggctttggccaaggaacaaaccagccccaaacttagaggctggaacagtggcatgttctgtaggccaggggtgggctggctcagctgatgcttctgctgctggctgtgcctgtgtccctcctgcgtctgtgatctggggccggtggggcctaatgagctcattcatggctggggcagtaaaggagactgcatcccgggtccagcgtcccacaggccagcccaggcttgagcacgtggtgggctcaggcttccagaaggcctggagagggcaagcctctgcttgtgtcacctttggtacctccctgctggccaaagtgcctcacgaggccaagcccagatgccaggtggagtgagccactgtcctgtgctgggaggagccgcagtcacatggcagaggctgtgcacaccagcaggggagggggcagccagcagtggcacccggctctcgggttcatgtcctggggttgaggaagacacaagatggaagccagggcgatgtggcagagatgggtgcctgctttagactgggtggtcccgggtgatgcgtgagcagcaggcggaactcaccccagggtggggaccccagtgctttgcagaccagcgaagtcgggatacctggatatagtaagctggagatgaaacttgagaactgccactgcgtggatatttcagaccctgagaatctttgtaagacgctatacggggtggtgtgaagacaggacagagtggaggccccaccccagtatctgagcagtgctaatagatatataatgcaagccacatctgtaatttaaaatttagtagctacgttaaaggaaaaagataaaatgaatttcaagaataattttaattaacccaaaatattcaaaatattacttcaaattgtattccagttgcttttagaaaagcaacgcggcatcgtgcattatttttctacaaagtctcctaaatcccgtgtgtatttgacatttgcaacacatctcgattcagagcagccgccttccgaggactcgggggctggtggcagctgtgtgggacacagcagctgtggggatggggcagggcagcagcccacagagggcgagggcaggggccggagaccagtcataccacagaaccctggaggggcttgaggaagggatggcaggagagctgaggagcttctctgccctgtggggcaggctgctgggtgggtcagggcccgaggaagggctgcacctccaagaagggagctagaggagaggtgagagaggagaggggagggaaagcaggtgggaggccttgttggccaagggctgaggcctccccagggagacgagtagggcagcccagcagagtcctgctgggaagaggcctcactggggcagggccaggcagagcccataccccagccccaccttgcaggggatgaagtctggagagtgcagatggggcacctgggatggcaggacaggctcagagctgggacaggagccctgtatccctgcactggggacagtgtcctggaactggccctcagttcctggcttcacctgcacaggatggaggagctgggcctgcatcctgctgaccaccgggtgtactttggacagctgctaggcatgtgtgaccagatcagcttcccgctgggtgagtggggccctccctggtgcgatggggtacggtgctgggcctgggcctcatggtgtatctgcccccatgcaggccaggccggctaccccgtgtacaagtacgtgccctatggccccgtgatggaggtgctgccctacttgtcccgccgtgccctggagaacagcagcctcatgaagggcacccatcgggagcggcagctgctgtggctggagctcttgaggcggctccgaactggcaacctcttccatcgccctgcctagcacccgccagcacacccttagcctccagcaccccccgcccccgcccaggccatcaccacagctgcagccaaccccatcctcacacagattcaccttttttcaccccacacttgcagagctgctggaggtgaggtcaggtgcctcccagccctgcccagagtatgggcactcaggtgtgggccgaacctgatacctgcctgggacagccactggaaacttttgggaactctcctcgaatgtgtgggcccaaggcccccacctctgtgacccccatgtccttggacctagaggattgtccaccttctgccaaggccagcccacacagcccgagccccttggggagcagtggccgggctggggaggcctgcctggtcaataaaccactgttcctgc

SEQ ID NO: 13561 - DNA, 2961 bp, Homo sapiens
aatatttatatttcctctgtcttttaaaactgaacaccgaggtgggttttgtggtgggtggtgaacggacaggtttgggcctcgatcccccacccgaccctagcacccacaggtgggggtgccccctctgctgatgcgcctcctccctcagcaccatggacctgctggactggagcagcctcatcgacagcaggaccaagctgtccaagcacttggtagtccccaacgcacaggtaacacctccgctcctcagtgaggcccagctcagcagggcgctgcgctaagaagggaattcagcctgccacgtgtgtctcttgttgcctaccctgggaacttaacatgaccaaaatcactgcacactatggccccacagaccccctgtggtccagggggaagaagacaagcccactagtgtccacagagtgcttggcgggacagagacccacgcggagccttaagacaccacaaggagagggggtctgggggccttccccaagtcatctgtcttgtgcatcaggtcaccccaaacttcagaggcctgaaacggcagcagccactctgcttctgcctcatggttctggggttgacagggctcagctgggcagtcctcccctggggtctcctgggtagctgtactcacagagtggtggcgctgggacctgggggaggcacccattcacatgtctgggagttggtgctggctgtggcttgggctttttcccaacatggcagctgggctctaagggccagtgtcacctgagacgtgagagccaggcagaagctgggtgaccttttcctgcctcgcctcagaagtcacacggtgtcttttctggcaagttctgtttgttagaagcatgtcaccaggccagcctgtatacagcggggagaggaatgagactcatctgcctgtgggaggggggcccaggacctggcagactgcttgaaaccacagcttaaactgggattcaaagaaagaacagaagcaccttcagaaaacatcctgcagaggcagctttccatgacacatctagccccagtccactaagggcccagcctcaaacttagagcccccgacccagagcctcggggcgcagtgcgtacagtgtggctgtgcaccaaggccaccagctgttggagactttagcatggtgtagcaagggatagagtggtactgtttgtgcccagtgaggcaaggctgctggggccagcaaaggggtgagcgggaggccctgcgggatgggtccccacggcctctgagcaccagcaacttgaaggcctcatcctggtggttgccctggtccctggctacgtgtcagcacgtgctgcacaactgccctgtctgcctgtagccaggggtcttcctcctgggccctctgcctgctccgggtggagcccttctgtttgacgattgggtgatcagtgttcacttgttcaatgtcacatgggagttgcagggggctctcccacaacggtggggcctctgtgggaactggggagtacacacttcggagtgcaggcctggactgagcctggggcccactgacatgggcactgagctccctcgtggtacccctaggccccgcatagggcagtgcactggctgcgttggaggttcaggggcactgtgctgcttgtccaggtggccctccctcccagccctgcacagacgggtgagagggttcctgtgggctgggaatactgagagaggtttagcctgggcctcagggtggcactttcccgcccttgctgtggcctgaccgcgtgttgcacccccagacaggacagctggagcccctgctgtcccggttcactgaggaggaggagctacagatgaccaggatgctacagcggatggatgtcctggccaagaaagccacagagatgggcgtgcggctgatggtggatgccgagcagacctacttccagccggccatcagccgcctgacgctggagatgcagcggaagttcaatgtggagaagccgctcatcttcaacacataccagtgctacctcaaggatgcctatgacaatgtgaccctggacgtggagctggctcgccgtgagggctggtgttttggggccaagctggtgcggggcgcatacctggcccaggagcgagcccgtgcggcagagatcggctatgaggaccccatcaaccccacgtacgaggccaccaacgccatgtaccacaggtgcctggactacgtgttggaggagctgaagcacaacgccaaggccaaggtgatggtggcctcccacaatgaggacacagtgcgctttgcactgcgcaggatggaggagctgggcctgcatcctgctgaccaccgggtgtactttggacagctgctaggcatgtgtgaccagatcagcttcccgctgggccaggccggctaccccgtgtacaagtacgtgccctatggccccgtgatggaggtgctgccctacttgtcccgccgtgccctggagaacagcagcctcatgaagggcacccatcgggagcggcagctgctgtggctggagctcttgaggcggctccgaactggcaacctcttccatcgccctgcctagcacccgccagcacacccttagcctccagcaccccccgcccccgcccaggccatcaccacagctgcagccaaccccatcctcacacagattcaccttttttcaccccacacttgcagagctgctggaggtgaggtcaggtgcctcccagccctgcccagagtatgggcactcaggtgtgggccgaacctgatacctgcctgggacagccactggaaacttttgggaactctcctcgaatgtgtgggcccaaggcccccacctctgtgacccccatgtccttggacctagaggattgtccaccttctgccaaggccagcccacacagcccgagccccttggggagcagtggccgggctggggaggcctgcctggtcaataaaccactgttcctgc

SEQ ID NO: 13562 - DNA, 23670 bp, Homo sapiens
gctgaagtgccagggtgcttgtgaagtctaagcccttgtctggcatttgtcaggaatatagggtgaggcctctgggaccgagcggggcggggcggggcggggcggggcggggcgggaccaacagcgcacacttaagcggcccgggcgggtaccgccgtcccgccatggctctgaggcgcgccctgcccgcgctgcgcccctgcattccccgcttcgtcccgctgtccacggcgccggcctcccgcgagcagcccgcagcgggcccagcggccgtgccaggaggtgggtcggccacggcagtgcggccgccggtgcccgccgtggacttcggcaacgcgcaggaggcgtaccgcagccggcgaacctgggagctggcgcggagcctgctggtgctgcgcttgtgcgcctggcccgcgctgctggcgcgccacgagcaggtgcgcggggtgcaggcgggggcgcgggggcttctgccggtcccgggagcctttacggagcttcctggcctgaaacgggtgcctcccaagcatctcctggagcaagggaagccaggaagggaggcgtttcctgcagtccctctcggacctcgcaaattttcctatttgtcgatgtctaccaactaaaaacaatggtcgttttcatatttacgatatataccacttgtgggaatacagagttatcacttggaatttaaaatggagtattcttcatgttgagacaagagaatcctggtgtagggctcatagcctggaaccccggaattcaaaccccgggacccagcagcttcccagacacggccactctgagaacactgttggggaaaaatgggaagcccctcaaacgcccagctttgaactcacccatggtagctttaaaaagtgtcagggcttttggtggcggtggtggggggcaacaagcagaacactgttttagccgcatcagcctaggggtactagagatgacggttatctccaggtgaccctgggaagagtttgcaaggttccgctttttggcgccagggtatctggtggtgttgatttctcaggtgagactgtacagaggtcgggggctgcacccctggcctcaacaggaggcgggggaaggcgggggacggtgtcagatgagaagcaccgagccacagttgagcttaggtgaggcctcggcgggtgcgaggtgagggcagggatccacgaactcagagtcagatgctgttggcccgaatcccatggggagcgccaaggtcagcctaggacccgtggtggcgggagtgcggaggatggtggaggaagaaggagctgaactggacagatggagggctctgggagggcattgctgtgtgtgcacacaaggatgtcttaaggtcaagttttggtcatagagagccccggccaaggagacaggagggcgagaagggacatcccaggtagaggaactggcaaggtgagggacggcgatgtggaggctttggggagtgcccacatctaaggggcatcccaaaagaggagccagtgctggtggtgctgcaataggaggaggaggcagcagggcagaaatgccaggggagggagtggccagccacaggtccctgcccagggcaaggacgggcatgctaggtggcagctggggccagtcgtgcagaagccatgcccaccttgtggccgggatggagtggggactaggaaggcaccaggtcaggtttctgtaggcacagccctaagcatggctgggatggggagggggctaggaaggcaccaggtcaggtttctgtaggcacagccctaaggtttcttgtctagattcaagacaagttgttgcacagagaagccagcagagctgggtgtggggtttggtgcccagtctgctgcggggaatgccaggtgctgttccgtgactgtgggaggaaactgttggctccgctgtcccttgggtgccttcttgaggcaagtgccagggctcagggatggtgctgtgagtacctggaagaggcagggcatccagaggtgacctctcccaggctcccctagggtcccacctgtgccctgggaagtccctcagtggggtctgtactgttgtcttgctagtggtcccatgggtgtcggcagcctcagcactggaagaaggcagaggccaggtcctgggcttgtgagctgctcactagaacctggtcctgtgagcgggccagaggggagttccttccctcaccctctgggctgtggggagattccttctgctgagccagcacaggtctgtgaggcacccgggcagtgaggccacatctgccacaggcgtgtcaggttgtagtagctgatctttgagctgctgccttggatggggacagcagtggggcccgcccttgcctgaaagccagacttattgaggagggtttaggaaagtcccaggatttccatgacaacagcactgaggttgggtgtgcgccctcacagaagggacaggacccgtggtgacagtggttccctgagtggggggaggggagagaaccggctctaccagtgttactctgcacacatttggttgagtctttcacagggggtacaagtgtatgtgttactggtgcaggtttctaaatcctcgaaggatctcctcacctgaagaagatgtggggctgccctggtctcaggtagtgccatgcggggacatcagtgacaccaggatggtgttaaagtggttgctttgctgtggagtcagctttaaaattacaagccctaggctcatgcctaggcatggtggctcatgcctgtaattctagcacttaaggaggtcaaggcaggaggatcatttaaggctaggagttcaagaccagcctgagcaacatcgtgaaaccctgtctctacaaaatatttttaaaagttagctggggccaggtgcggtggctcatgcctgtcatcccagcactttgggtggccgaggcgggtggatcacctgaagtcaggagtttgagaccagcctggccaacatggagaaaccccatctctactaaaaatataaaaattagctgggcatggtggtgtgcgcctgtaatctctgctacttgggaggctgaggcgggagaatcgcttgaacctgggaggtggaggttgcagtgagccgagattgtgctactgcactccagcctgggcaacaagagcaaaactctgcctcaaaaaaaagaaaaaataaaagttagctgagtgtggtggtgcatgcctgtagtcccaactactctggaggccgagataggagtgtcgcttgagcccaggagtgagaccctgcctctaaaaataaataaataaaaaacttgccagccctgcctgtgtgcttctgcagccctgtgcagggagcttccaccctcagcccgggcccagtcccccagccccccatctttgtgaataagcatccctggagtcagtgcagcctgggctcccgccccttcatttagtgctggccgtgcggaggcgagcagttaggtagagggagactgcgtggccccgtgcggcagtcgacagttgcccaccctccctcctgttgttttctgatggttctctcagagcggatgtggataagcccagtgatggtgttcaggtccccagttctgccccgcctgccacttgggtgatctttgatatgtttcagacccatcctgttctcccaactatccctgggtgctgccagcaggaatgaggcctggctcaggctcagtgggagacggagaacatgtcagcctgttcattttccagtttctaatcctcttgataaaagaacaaaatgccttaaagtcagattctgcttggaggctgcaggaaggcaggggtgagtgcctgggaaaccctggtccttggggctgccccatggcgtgcccaggggtgatggtcaggaggcgtctccatggggcaccaatgttcagggtaaggctgtggggctatgtctgcctgtgggcaggcgtgtgggtgctcagggctggcttgggtgtaagtgtttgactcgctaatggttttgcttagactagaagttgttcctgaaactacggtctcaagagatgctccccacataaaaggagttctagtatccattgggtttgagaaaccccaggctcttcctgtgttggggctgagtcggcaggggcagcagacacaacgcggaggtgtgcttctgagcatcacactcggccctcctctccaagtagcctctcgttgtccctgtcctttctgccctggctgtcccccgtgctggagctcccacagttgtccatgccatctcctcgccttggcaagccccactcctggatctgggttagtaaacacccctgccctaccctgcaggcactgccccatccccctgtcctgagtcataggcagagtccctccttcccctttggggttcctttaccaccaggatgtgagatcctggtcggtttcctttggttgtttccagtctataaaaggtgcttggtgcatggcagcttgggacatctgaatgagcgacgtggtgaaatatgattggaggagacagacagttcccgggcagcatctgtcagagtggctggtcagccccagatgaccctgcagagcgcatgggtcctggggtgggagtcatctcacaggcccctgtggactgtcatctagctcattgtccttgttgccagggcatgcctccctccagctgggcgcagactcagcctgagtttcacacgtttgttatttagcatccattcgggggctggcctcatgccagtcacactgtttaagggacttgggataagagggaacaaaacattgaaaaatctgggcactcaagtactagaaagtcaagttagatcctcctcttccgcagcagaactaccaaggtgtggatacagaggatggtctcaaaatgccggctgtcatccccagggaggctggccattctcctttttatccaccaagcagtggtcaggcacccactgtgtgctgctggagtgactcatgggtggggccctgaaggggcagagtccaggtgggaacagtgtcctcaggccaagcaggcagcacctcctgtggtctctctgccctggatgggaactggagtgatggacagggtggagaagcaagcggctttagctggtcttcaccatgaaactgaccctgaaagcccagtcgccaagagaccatatcgaggccccatggctggggtgaagtgtggtcggggatgagcagcggtgccttgctgggaaaggagagttcaggcagcccaggacagcggcttccctttgcctttcagctgctgtatgtttccaggaaacttctaggacagaggctattcaacaagctcatgaagatgaccttctatgggcattttgtagccggggaggaccaggagtccatccagcccctgcttcggcactacagggccttcggtgtcagcgccatcctggactatggagtggaggaggacctgagccccgaggaggcagagcacaaggagatggagtaaggcctgcccggtgtctgcgggctttctgatcatgaccctggagcacccagtgggagcaggtgggatgtatccagctgctgggcttcagcctcagctgggcagaggccaaggctaggagagcttggtcagcccaactaccgatgaccctcctgggctctgcctggagttcttgcatttttgtttcatgcggtggacagctctgggctttcatgggaggcctggtgtgcgtgaggcctgaggaagcagagtacagaatggcccttggccctatctagtccaccgcctggaggagcacaggcaccagcatatgaaccaagcactctgcaaagaatggttggtctcgcctggatctcacatgagccagggactgctccaggaagtggagggaaacgtggtcttgttgttctgtcctgatgccctgcccaggagggcgggtcagggtggtaccaactgccctctacactcactgcccagggaaggggccttgtatcagcttagtggcctccaggagctgactccaggccggcctgctacactgctcctggcttcaattcccttctccactgacaatggggcaggggccaggcctgggaggttccacaactgcagggcaggctgaggccaggcaagggtcgggcagtgggacctgcctgcgggtcaggaatccctgcaaaagagaggctgtagcagagcctcctccatcaggtcagcaagtttgtgtaaacagccaggtagcacagactctcagtcgggccacaccctccctgccacaacggcttcactctgcctcagtagggccatagtaattagaatttcatataattttcttgtgtcacaaaatattattcttgttttgatttctttcaaccagtttttttaaagtagggtcttgctctgttgcccaggctagagtgcagtggtgccattgttcactgcagccaaccttctgggctcaagtgatcctcccatctgagccccctaagtagctgggaccacaggcacgcaccaccatacctggctaagttttaatttttttttgtaaagatgggatctccctatgtcttcctatgtatttgggtcccctgcaccctgacagcagccgggcctgacccacataaggcttgggacagtccctctgtggacctggtcaggccttggtggttgttcctgcccctcccctggtggctggcctgggaaggggagggaaaggcagtcacatgaggcctccagccctgggaacggaatgtctgaggcttgcctcagcatgtcggctgccagctgcctggagaggattggccaggggagcccagcccctgccttgcgattggctgttttgaaggtggggtactacagccccagcaccccactgtgttcctagcaggccccgtgggccttgcagctgcctgagctcttggctgcagcctttgctgagctgcctgttgaataaccaatggcctgtgtgttctcagaaggagtctgggtggggacttggtttcacaatgggattttcctctcaggcgcctctggtatgaaaagactcctttcccagggtggtcctgcctggcttcctccctgccctgcaggctgagtgtctggaggtggactggcctgcactctgccagggggctgggcacctgtgtccttaggagcttgagtcctttgccctgcaagggattcacctgtcttgctgctggtggctgctgtctgcaggggtcctgctccagctctgggaagtgaacagggttccctcctgtcctcacaggggtgcatgctgaggacacctaccgagctcagctgctttgtgctttcagaggggcctgagccatgggggtagggctgggtctgcaagcactggtctgatgtccacactgcagcatggcctgcttggccaggagtgaccagtcacgcagaccctagtgcagggaactgcttagagatctgccttcctaacctaccctcctgtcacaagggccatgggctctactctggggagagacactgaggccaccgccccaaattaaggccatggcaagtggtgctggccgtgagaggcccagggaggatggaggcgtctgagtgcatggcaaagtgagtcccagcagtgctcccgagaaagaaagaggaggtgggagcctggaggtgcaggagggcaatgcccacccggggggggggtggaccatgcttcccagaggccagggccccacccaaccccaggagaggagtcccagggatccccgaagcaggctgagggcttggggatggggaaggggccaaggcatcttcctgatgattgggctgtgagggaacacctagggggtggatgggggcattggtctggctgtgcaggcccagggctggctggaggcaggatatgtgtgcagtgagtgtcctgagcgaggggctggggaggcagagggttggggagctggggaggggggtacaggtaggaagcggcttgccaggcttccctccaggagagagttggacaagggcggggtgtggacccccatgctctgcttgtttcaataggcatcacgtccccagggacagccacccagagctgaggtggaggctgagggggtggtcagggtcttcctgctgtctctgaagaccccctggggacacgtgcttgtcctcctctgccctatgtccccttgtcgctcttccctcctctgttgtcccaggtcgtgcccatgtgtgcgatcatgtgcccttcaacagactatgccctgggcatgatgaggggtgggactgggggagcacgaggcaggtcctggctttaaggaggcattgggatgtggtccccaccctgatcagggccccacatccactggttcacccttcctcctctaacaccccacagctgccagtgccatgtgcccccctcttccctgtggtgccttgagccaggacgtggcaacgtcccaggtggcgaaagccagatttcctgtgtggcacccgcagttctgaatcagctgctcccagggtgctttcttcctcttctccagtggaaataggacccctgacctgcctgggaaccaccatttgtgtctccttgtgacttatccatgatgcctgttggagagtgtggccctgtccttgctgcgtagccatccactctgagacctggctgcccctctggccactgcacgtgctgtgtggtcatcttggccactgcttggctgtgtcagcctggtctgtgctctggaagttcacggagaggagcagcggtagcctatggtgttctgcctctgagtgtgtcagagcaggagagggagcagccctggcttccccagcctctcctgccaggcccacctcagaggatgaacacagcagctgtgggaatgctgagcgggaactcatctgcctggggacctgtcagataatgatcctgtttcatgaaggtgagctgcctcacaggcagacacctgtgtggttaagtcccgtgttatccaaactgtgggctgtgtggtttcaggatgggaccttctcttcagggtcatggaggcccctgaggccctgtccccactgtctgctgttacttgccatgagggtttctgccctgggcagggccctggctgccaccccggccttaacatagacagtgagtcccccttggggatggcttttcctggctgtacctaagccttggcgtgaaggtcttagggctgatctcatgactggtcttgaggtgcccaagccaggggcccaggagctccctgtctcaggcaggggttcacgtgctgcctgcctgttccctagtcacatggtgacattccaccctcttctgtcacatctctgtcagcataaggtggccagagcatatctgcctgccagctcccatcactgggctgcagcctcaggggccctggcagcacatgtggagtccctggcccatgtggggctgcccaggagtgggtgggagggaaggcctcctggcgggggctcctggcccagggcttgctccttgagcagccaggtggaaagtgggcagctgaggccccttgacatggaggcctctgggatgcggctcactgaccactgctctgcctttccccttcccggcatctgagggggaccctctcctttcctgtgagtgtgggcagagctgcccctgagggtccgagcgcctctggggagcttcaggaaggctctgggtgctgttggtcatgcagctgagctctctccgtggtcactgacttgatcaggtttgaatataaagtcaggtgaccctcagagctgctccgggggccagggagaccatggtcgctttgtcacagcagacttaacggccgcagcaactcttgctagcctggatgacacagcactgaaaccaagtgccagaagcagattgtggctgtggggaggaggaggaagaagaggaggctctggcaggggtgcagggctggtgggggaggggagccaggtaccctagagaagggaggggccagggggaatgggggtgctggccaggcggggatggagaggcttctgcaggaaggacaggggcttggctgagcagagtgtggccagcctagcgggggacagcctgcatcctggcctcactggtcttgaggtgcccaagccaggggcccaggactttgggcattactaggaaatgatgggaaccctgggtggggtggcgtgaaacaagatgagatggtaagatctgctttcactttaaaggaacatttctggttgttgcttggaaaagaagtgtcggggcaagaatgctacaggagggccggcctggaggacagggcgggactgcagggctggctgtgcgggggcaggagcctgtgcttgcatcagagctgcctgggagaccctggctctggggtggaggcctgagtaagggggcctcgctggggatttggggacctctgtgtgctggtgccttcccgcctccgttcctctcagccctgactggctctgtcttggaaccaggtaactacctttatttgagaacctgctgcaagccctgggctgttctgagagctcaggaatatcgttctgatttctccacccacaaggagccccgggcttcctgagcccttgggacacagcagccccataaactgctgcccctcccaggcccaagtgttccaccccaggctaggggtggggctggggctgcaccttggaatctaccctccaccggggttgtggtggggccctccgtgcagcctcagtgggaacgtgcctgtcacctgaggctcaggtggcgtgaccctgacctttgctctccccctccttcccacaggtcctgcacctcagctgcggagagggatggcagtggtgagtgagaggctgccgcgcaggaacagactccctcccgactccgcacaccccttggtggctcaggagagtctaggctggggcacaagtgggccttggggtgacgtcggagcccgggctcctccctatgtccagggcacctgccctgtcgctctgggctctgacatactcgcaagtgtctggggagacgccctgctcctttttcatggcctcctggtggacctaggcctttgttaaggagactgccgtcctggcctcatgaggaggcttagccagggggatgcagcactccaggtggaagagccgcggtgtagacaggagggtgggcttggggatgggaaccatggggcagtgcagtgccagggccaggctggcaaggccactatgcttggagccctcctgagggcaggggccctgggctattggtgtgtgggtgctgggggtgggtgtttggagctgtgctcaggccgtgcattcgctattccaggcacgaataagcgggacaagcaataccaggcccactgggccttcggggaccgcaggaatggtgtcatcagtgcccgcacctacttctacgccaatgaggccaagtgcgacagccacatggagacattcttgcgctgcatcgaagcctcaggtggggccccctctttgctggctatacccctgccatgtcccagcctgagcggacccctgggctcatggaggtgccggtgggtgaacactaagctggggcaggagccagagggctgggttctgaccacacttgggtccctcactgttcagccccttcctgaggggccccactgcctcccagaaggcatctcctctcctgccccagctccctgttccctgatcccgcctcatgccccccacccttctccctggctcagggccaggatcgggagctgcaggaagttggtccatgtcagctgccgagccacacttagcccagggtggaggttccattcagggagctggtgccgcatcttctgtccttccctgacacagcctctgggggccagcggtgggggcagcaggtgtttccagggatagagaagccagaggtcagcaaggcccaatgtccttcagtgttagaaacatccgacctgcacagccccatgctggccccagcagccctccgtcaggggcagcgggtcccaggcctgtttatgtttttgtttgtttgcttcaaatgagactggatcttgctctgtcacccaggctggagtgctcacgcctctaatcccagcaatttgggaggccaaggcgggtggattgcctgagctcagttcaagaccagcctgggcaacatggtgaaactccgtctccactaaaatacaaaaaattagccgggcgtggcagcaggcgcttgtaatcccagctacttgggaggctgagacaggagaatcacttgaatccaggaggcggaggttgcagtgagccaagattgcgccactgcactccagcctgggcgacagagtgagactccatctcaaaaaaaaaaaaaaaaaatgaggtctcactatgttgccctggttggcctggaactcctgggctcaagtgatccctccaccttggcctcccaaagtgctgggattacaggcacacactaccacacccagctaattttcatattttttgtagagatggtgtttcaccatgttgcccaggctggtctcaaactcctggcctcaagcgaaccttacactttggcctcccaaagtgctgggattataggtgcatgccgctgcacctggcacttctgagcagtgcttggaagccgcctcctgatgggggctgagggtcagagtggccagctgaatgctgggccatcagggtgaggggcgtcttctcctcgtccattgcctgttctcccagggcaggtggaaggggaaggccctgcattggggtggcgtgaaacaagatgagatggtaagatctgctttcactttaaaggaacatttctggttgttgcttggaaagaagtgtcaggggcaagaatgctgcaggagggctggcctggaggacagggtgggactgcgggctggctgcacgggggcaggagcctgcgcttgcgtcagaggttcctgagagactcggtctctggggcagaggcctgagcaaggggacctcgctggggtgtctctgtcttagccacgctcggtgtttctgggtcctgtgacccacgtgtgagcagcctgtggtgctggtggcacagggaaggaaaccgaggcagggagcctgtgggggctgcttggcaggggacaggcagctcctgtgcccactgctgtcccacacctgcatggaaacagaaaccccgccacggagccccctcccatctccacagggcctctagagcgccatgtgcaaggacttcatgggcggggtggggtggggtcaggagcctgctgtgggctggccaggccctggccctccctgtcgcaccctgcgctgcctccatgcacctctcagggctgtcatggcttttcctgtggcttctgacaggtagagtcagcgatgacggcttcatagccattaagctcacagcactggggagaccccagtttctggtaagtgctagaaccttccacctgcagagtctggtgctgtgcgagatctcagggcagctgtgggcatccaccaaaaacacaggtgcccatgccttagaggcctgagctggccacaggggctgtgtgggggactggggtgggcaggggcgtgtgcagatggcattcaggcctgcgtttgcagctgcagttctcagaggtgctggccaagtggaggtgcttctttcaccaaatggctgtggagcaagggcaggcgggcctggctgccatggacaccaagctggaggtggcggtgctgcaggtggggcagccttccccttccccactcctgtggcttgtgagggggtgggcaccgtggggtcacacggggcatggtgggcagtggtcggaggtggttttgggaactcacccagggcatgtggctcactctgcagctgctggggttggcctggtggggaggaggaggtcagagggactctgaacagagaggggagatgctggcaggagggctggagacccagccctgcagggcgtgggcgtgcatcagcagcggggtgggaatagacctgtctatgcagtagaaacaaaccagacatggatcctgttcttactaacgatgtaataaagccagaaacagcaccagaggccaatgggtggggggaaggataaaatatgagtgaatggggctgatccaggccttctcacttctcaaggaaagtgtcgcaaagttgggcatcgcatccagggctgagattgaggactggttcacggcagagaccctgggagtgtctgggtgagagcagcccccaggctgagaggacacgagcatcagccatggttccagccaagccccagtgacgtctcccagtcctggctgccctgcctgagagggtgggccctgggatgacagtgctgaaggaactgcttttcacacagcaggacttgatggcttcaggagtccctgaggctggggctgggctgggcaggggagacacagggccagcacagaccccatagagggctctttatagaattatctgggtccagagcaaaggtggcactctcagccctccctggagtccacgccggcaggtgaaggatcagagccccatgccccatccttggagccaggggctgggacccagatcaccaggagcctccagttgaagtggggaggtgactggggtggtgcagtagtgagccatcccctcacacactgccagccttgcccactgtgtcctccctggccgcccggagctgtgtccgcctcctgcctggctgcctgtgctcggcccctccacaagcccaaaacagcctagggtactcagtgttttcagagccgcctagatgcaggactgtttgtgttttggttttaaatttatttaattaatttattttttatagagaccaggtctcaccatgttgcccaggctggtttcaaacccctgggctcaagtgacctgcccgccgcagcccccaaagtgctgggattataagtttgagcccccgcatgccactggttttaaatttttaaacagaaaacaatatttatatttcctctgtcttttaaaactgaacaccgaggtgggttttgtggtgggtggtgaacggacaggtttgggcctcgatcccccacccgaccctagcacccacaggtgggggtgccccctctgctgatgcgcctcctccctcagcaccatggacctgctggactggagcagcctcatcgacagcaggaccaagctgtccaagcacttggtagtccccaacgcacaggtaacacctccgctcctcagtgaggcccagctcagcagggcgctgcgctaagaagggaattcagcctgccacgtgtgtctcttgttgcctaccctgggaacttaacatgaccaaaatcactgcacactatggccccacagaccccctgtggtccagggggaagaagacaagcccactagtgtccacagagtgcttggcgggacagagacccacgcggagccttaagacaccacaaggagagggggtctgggggccttccccaagtcatctgtcttgtgcatcaggtcaccccaaacttcagaggcctgaaacggcagcagccactctgcttctgcctcatggttctggggttgacagggctcagctgggcagtcctcccctggggtctcctgggtagctgtactcacagagtggtggcgctgggacctgggggaggcacccattcacatgtctgggagttggtgctggctgtggcttgggctttttcccaacatggcagctgggctctaagggccagtgtcacctgagacgtgagagccaggcagaagctgggtgaccttttcctgcctcgcctcagaagtcacacggtgtcttttctggcaagttctgtttgttagaagcatgtcaccaggccagcctgtatacagcggggagaggaatgagactcatctgcctgtgggaggggggcccaggacctggcagactgcttgaaaccacagcttaaactgggattcaaagaaagaacagaagcaccttcagaaaacatcctgcagaggcagctttccatgacacatctagccccagtccactaagggcccagcctcaaacttagagcccccgacccagagcctcggggcgcagtgcgtacagtgtggctgtgcaccaaggccaccagctgttggagactttagcatggtgtagcaagggatagagtggtactgtttgtgcccagtgaggcaaggctgctggggccagcaaaggggtgagcgggaggccctgcgggatgggtccccacggcctctgagcaccagcaacttgaaggcctcatcctggtggttgccctggtccctggctacgtgtcagcacgtgctgcacaactgccctgtctgcctgtagccaggggtcttcctcctgggccctctgcctgctccgggtggagcccttctgtttgacgattgggtgatcagtgttcacttgttcaatgtcacatgggagttgcagggggctctcccacaacggtggggcctctgtgggaactggggagtacacacttcggagtgcaggcctggactgagcctggggcccactgacatgggcactgagctccctcgtggtacccctaggccccgcatagggcagtgcactggctgcgttggaggttcaggggcactgtgctgcttgtccaggtggccctccctcccagccctgcacagacgggtgagagggttcctgtgggctgggaatactgagagaggtttagcctgggcctcagggtggcactttcccgcccttgctgtggcctgaccgcgtgttgcacccccagacaggacagctggagcccctgctgtcccggttcactgaggaggaggagctacagatgaccaggatgctacagcggatggatgtcctggccaaggtgagctgtcccgctcgggcagagggtacctgggactcgtggagaagagggcacctgcctcacttgagcaacagttgctcccactctcccaccccctgcgcctctcagaaagccacagagatgggcgtgcggctgatggtggatgccgagcagacctacttccagccggccatcagccgcctgacgctggagatgcagcggaagttcaatgtggagaagccgctcatcttcaacacataccagtgctacctcaaggcaagcccccgctcagcccctccctgcctgccctggggcttggagaccccacaggaggggctcctctcatctgagctccctggcatttggctggttttacactcagcacccaccagggagctcatgggatggaggagggagtgggccgtgcccccaaggggttgttggggtcttctgcagcacagctcacccagcgggccccagggtccaggaaagagccccttaggtggtggccacagccaggcctgcagaggaggctgaggccagggtgactgcctcagagtagcaagaaagacccgctgcccgcaacctctcccctggttctcagaaccagccaagagtgtctaaggagcaggaggaagacaacaatctttatgagggtccactagatgtacccgacaccccaaacttggaaggtgtcacatgaccatttcctccagcgtgttttcagttcagcgcccctaagaacctcctgaaagctttgggccctccccggaaagactcacccaggatgtcacatgtattcagggagcccaccctagcctttgggccccaaactgctcagggatgttagcaggtccagagctctcaggggtgagccggatgcccagaggacacagggtggcatggggaggggtccaggcaggagcatgcagtatgcacccctcccggtcggcctgggagtctggagcacatgatggctgctggcgcctgggctgcacccacagggccgtccacaggccacacaggaagttgcagacgtccccactgccattgctccttggggacagaggttggaggcccatcctcacccacacctgctccaggtgccctgagctgcacctccccaggcagctgctgcccagccctggtgactgcacctgggcccaggaaggccccatcctgctgtcacttgggcttgcccaggctccctgtgacttttggccctggccccacaggatgcctatgacaatgtgaccctggacgtggagctggctcgccgtgagggctggtgttttggggccaagctggtgcggggcgcatacctggcccaggagcgagcccgtgcggcagagatcggctatgaggaccccatcaaccccacgtacgaggccaccaacgccatgtaccacaggtgcgcagctctcccacccctctgtcttctcagggcagggcgccaagaaaccaggcctgagggagaggcttggagactgaacttgtcagccacatgtgtccccaggtcagaactggtatttcctcagcttttatgtcatgtgttactttttcaaaagcattaaggttattcttttataaatatagaaaagcctattgaacaaagcaaaattggccacagttccctgagcttgctcctgcagacacttagatccagagatgtgcatgaacacccggtcctccccaccctgcaggctcagcctgtttgcttttcagttcacacagtgggatcgcccatcagctgttctgcacctgcttttactgctctagtttcttggtgatcttttcatgtagcacaggctggccaaccatgggcttttcctcttagaggcgtgtgtgcatgctgcaaattcagagagaccccaagtgtctcctggttggctccagctcccctcctgcagccgctgtgcatgtcgtgccacagcgcacacatctccgccattgttttttgcgttgtagcgtgtcctctgcccgatgtgtttttcatttcgcgttccatctgggtcctcttgtgtgggcttgcagagtggtgctgtcaacagccagcatggagtgcccggggctatgtgtccagcatctttgatcttattggtttttagtctggttattgtaatggactcgctggacataccgtcaccctctgtggtacacacgggccgtcaggggttttgtgtctgaggatgcagctgtcctaggttgctggaaatggaattgctgggtcagagagaacgtgcgtgtggtcaagcctgctgagtgacctcgctgcaggagggccgtactgctcgggcttcctggtgcaccgggatgcccacccccactgtgccctacagggacctgcttcccttttatttccttgcagggccaggggtgcactgtacgatccctccccagaagcaaagctgtgtctgtcatgaggctcatgggcatgtttgggctggtccccagagtcacagcacgtttgatgcagggactctgcccccacagctggttctgcgtgaattgtctggtcccagacatcgcttttgcttggttgctggtctttctttttcatgaggtgctgggaggggcagatgctgctcctgttcctcctgatcctgtggatacccttggaaagagccagctcaatggatggatctgggtctgccctcggcctcctctctgtgcagctggtaatgagaggtgcaggcagccacaggcctggaactgggctcacatggcactctccacaggtgcctggactacgtgttggaggagctgaagcacaacgccaaggccaaggtgatggtggcctcccacaatgaggacacagtgcgctttgcactgcgcaggtaggtgtgccccaccctgcaccgaaaccccaacctgagccgttgtctcctccggctggggagaggtggcagcagcgcagagctcagggtgggcagagcgacctgctgggtggtcgggcatttgtggggaaaggctggtgaaatgagctggagggtggcttcagtgggcaggcccaggcccgctggcgttctggacatcggactgtgagagcacaatggctttttgcagttacgttggtttttaaaattaacttttttctttttttgagatagaatctcgctctgtcacctatgctggagtgcagtggcgtggtctcggctcactgcaacctccgcttcccaagttcaagcaattcttcatgcctcagcctcccaagtagctgggattacaggcatgtgccaccacgcctggctaatgttttgtatttttagcagagacagggtttcaccgtgttggccagactggtctcaaactcctggcctcaagtgatcctcccttcttggcctcccaaagtgctgggattacaagcatcagccactgtacccagacttttaaaaattaacatctgacttattaaacttcacaattaaaaaactaaatttcatcagggtattcggatggctcctgaaaggtacaaatgcagtgttggaggccagtccctcaggaggcctccacagtgccacctcattaatacgcccttaacattttaactacatctggaatgtaacggtttgttttctctttaaacatttgtcccatggagcacaacttcggtagaattctaacaagtcaaatgcagaagttaggtgaagtcagttcttggatactcctgtactgtcaccctggtcttatctcatgccttagtccaagctatgcacacaatggggtcctaggtccccctcccctcccagattccgccttcccagggatgggaccccctagaaccctcgggggcctgggcagtggcctcgctggctctcgccttcctaggagctgagcaggagctccactctcagcagggcagggtgccccagatccagggcttgtggcacgagggggctccccaagaagctgtgaagccacagggccaggcttggggccagggctgcagccaacaggacacatcctggtgctgctcgggagctgactcacggctctgaaatcattcagtgatgtccacattcagcctttgtttacgatgctgctactttttcatggcctgaaattgcagcacacccatttttgtgccctgatcctctgctaattgtcatagatgtgtcggtgatgggacagactcactttctccacacgcacaggcctggtggccagcactgcccagcactcgggagctggtgggggttcctctcagcttgtaatcaggactcccagcctctgggtggactctcaatgctggtggactcacagcctgactagacacatcaccatccaactccgaaaggacagcctgccctcagcagggcttcctctctccagcttccgcccggcacctgtctgtccctactatcttgctgtggcagtggcttccccagtggacacagcttccccctcccctgagtggcagccgggctctctcctcttggccccaagggccctgtgccaggctcccccagtaccacgctcacatccctgcctgagaggctggacccctgcaggcttcagctctgcccctgctgtgggtggttggggagctctggggagctggggtcccctcccatgggtaagtggttctagactatggcagctgctctgtcctgtgctgggcccagactgccacaccacccaccctcaaacaatcggagttggctttggccaaggaacaaaccagccccaaacttagaggctggaacagtggcatgttctgtaggccaggggtgggctggctcagctgatgcttctgctgctggctgtgcctgtgtccctcctgcgtctgtgatctggggccggtggggcctaatgagctcattcatggctggggcagtaaaggagactgcatcccgggtccagcgtcccacaggccagcccaggcttgagcacgtggtgggctcaggcttccagaaggcctggagagggcaagcctctgcttgtgtcacctttggtacctccctgctggccaaagtgcctcacgaggccaagcccagatgccaggtggagtgagccactgtcctgtgctgggaggagccgcagtcacatggcagaggctgtgcacaccagcaggggagggggcagccagcagtggcacccggctctcgggttcatgtcctggggttgaggaagacacaagatggaagccagggcgatgtggcagagatgggtgcctgctttagactgggtggtcccgggtgatgcgtgagcagcaggcggaactcaccccagggtggggaccccagtgctttgcagaccagcgaagtcgggatacctggatatagtaagctggagatgaaacttgagaactgccactgcgtggatatttcagaccctgagaatctttgtaagacgctatacggggtggtgtgaagacaggacagagtggaggccccaccccagtatctgagcagtgctaatagatatataatgcaagccacatctgtaatttaaaatttagtagctacgttaaaggaaaaagataaaatgaatttcaagaataattttaattaacccaaaatattcaaaatattacttcaaattgtattccagttgcttttagaaaagcaacgcggcatcgtgcattatttttctacaaagtctcctaaatcccgtgtgtatttgacatttgcaacacatctcgattcagagcagccgccttccgaggactcgggggctggtggcagctgtgtgggacacagcagctgtggggatggggcagggcagcagcccacagagggcgagggcaggggccggagaccagtcataccacagaaccctggaggggcttgaggaagggatggcaggagagctgaggagcttctctgccctgtggggcaggctgctgggtgggtcagggcccgaggaagggctgcacctccaagaagggagctagaggagaggtgagagaggagaggggagggaaagcaggtgggaggccttgttggccaagggctgaggcctccccagggagacgagtagggcagcccagcagagtcctgctgggaagaggcctcactggggcagggccaggcagagcccataccccagccccaccttgcaggggatgaagtctggagagtgcagatggggcacctgggatggcaggacaggctcagagctgggacaggagccctgtatccctgcactggggacagtgtcctggaactggccctcagttcctggcttcacctgcacaggatggaggagctgggcctgcatcctgctgaccaccgggtgtactttggacagctgctaggcatgtgtgaccagatcagcttcccgctgggtgagtggggccctccctggtgcgatggggtacggtgctgggcctgggcctcatggtgtatctgcccccatgcaggccaggccggctaccccgtgtacaagtacgtgccctatggccccgtgatggaggtgctgccctacttgtcccgccgtgccctggagaacagcagcctcatgaagggcacccatcgggagcggcagctgctgtggctggagctcttgaggcggctccgaactggcaacctcttccatcgccctgcctagcacccgccagcacacccttagcctccagcaccccccgcccccgcccaggccatcaccacagctgcagccaaccccatcctcacacagattcaccttttttcaccccacacttgcagagctgctggaggtgaggtcaggtgcctcccagccctgcccagagtatgggcactcaggtgtgggccgaacctgatacctgcctgggacagccactggaaacttttgggaactctcctcgaatgtgtgggcccaaggcccccacctctgtgacccccatgtccttggacctagaggattgtccaccttctgccaaggccagcccacacagcccgagccccttggggagcagtggccgggctggggaggcctgcctggtcaataaaccactgttcctgc

SEQ ID NO: 13563 - DNA, 1985 bp, Homo sapiens
gctgaagtgccagggtgcttgtgaagtctaagcccttgtctggcatttgtcaggaatataggctgctgtatgtttccaggaaacttctaggacagaggctattcaacaagctcatgaagatgaccttctatgggcattttgtagccggggaggaccaggagtccatccagcccctgcttcggcactacagggccttcggtgtcagcgccatcctggactatggagtggaggaggacctgagccccgaggaggcagagcacaaggagatggagtcctgcacctcagctgcggagagggatggcagtggcacgaataagcgggacaagcaataccaggcccactgggccttcggggaccgcaggaatggtgtcatcagtgcccgcacctacttctacgccaatgaggccaagtgcgacagccacatggagacattcttgcgctgcatcgaagcctcaggtagagtcagcgatgacggcttcatagccattaagctcacagcactggggagaccccagtttctgctgcagttctcagaggtgctggccaagtggaggtgcttctttcaccaaatggctgtggagcaagggcaggcgggcctggctgccatggacaccaagctggaggtggcggtgctgcaggaaagtgtcgcaaagttgggcatcgcatccagggctgagattgaggactggttcacggcagagaccctgggagtgtctggcaccatggacctgctggactggagcagcctcatcgacagcaggaccaagctgtccaagcacttggtagtccccaacgcacagacaggacagctggagcccctgctgtcccggttcactgaggaggaggagctacagatgaccaggatgctacagcggatggatgtcctggccaagaaagccacagagatgggcgtgcggctgatggtggatgccgagcagacctacttccagccggccatcagccgcctgacgctggagatgcagcggaagttcaatgtggagaagccgctcatcttcaacacataccagtgctacctcaaggatgcctatgacaatgtgaccctggacgtggagctggctcgccgtgagggctggtgttttggggccaagctggtgcggggcgcatacctggcccaggagcgagcccgtgcggcagagatcggctatgaggaccccatcaaccccacgtacgaggccaccaacgccatgtaccacaggtgcctggactacgtgttggaggagctgaagcacaacgccaaggccaaggtgatggtggcctcccacaatgaggacacagtgcgctttgcactgcgcaggatggaggagctgggcctgcatcctgctgaccaccgggtgtactttggacagctgctaggcatgtgtgaccagatcagcttcccgctgggccaggccggctaccccgtgtacaagtacgtgccctatggccccgtgatggaggtgctgccctacttgtcccgccgtgccctggagaacagcagcctcatgaagggcacccatcgggagcggcagctgctgtggctggagctcttgaggcggctccgaactggcaacctcttccatcgccctgcctagcacccgccagcacacccttagcctccagcaccccccgcccccgcccaggccatcaccacagctgcagccaaccccatcctcacacagattcaccttttttcaccccacacttgcagagctgctggaggtgaggtcaggtgcctcccagccctgcccagagtatgggcactcaggtgtgggccgaacctgatacctgcctgggacagccactggaaacttttgggaactctcctcgaatgtgtgggcccaaggcccccacctctgtgacccccatgtccttggacctagaggattgtccaccttctgccaaggccagcccacacagcccgagccccttggggagcagtggccgggctggggaggcctgcctggtcaataaaccactgttcctgc

SEQ ID NO: 13564 - DNA, 23772 bp, Homo sapiens
ggtctcactctgttgctgtcttcacggagagcaggagcagaggctttgagaagccagtgggccttggcctcagccctgccggcagagggtccccaccatgcagctgaagtgccagggtgcttgtgaagtctaagcccttgtctggcatttgtcaggaatatagggtgaggcctctgggaccgagcggggcggggcggggcggggcggggcggggcgggaccaacagcgcacacttaagcggcccgggcgggtaccgccgtcccgccatggctctgaggcgcgccctgcccgcgctgcgcccctgcattccccgcttcgtcccgctgtccacggcgccggcctcccgcgagcagcccgcagcgggcccagcggccgtgccaggaggtgggtcggccacggcagtgcggccgccggtgcccgccgtggacttcggcaacgcgcaggaggcgtaccgcagccggcgaacctgggagctggcgcggagcctgctggtgctgcgcttgtgcgcctggcccgcgctgctggcgcgccacgagcaggtgcgcggggtgcaggcgggggcgcgggggcttctgccggtcccgggagcctttacggagcttcctggcctgaaacgggtgcctcccaagcatctcctggagcaagggaagccaggaagggaggcgtttcctgcagtccctctcggacctcgcaaattttcctatttgtcgatgtctaccaactaaaaacaatggtcgttttcatatttacgatatataccacttgtgggaatacagagttatcacttggaatttaaaatggagtattcttcatgttgagacaagagaatcctggtgtagggctcatagcctggaaccccggaattcaaaccccgggacccagcagcttcccagacacggccactctgagaacactgttggggaaaaatgggaagcccctcaaacgcccagctttgaactcacccatggtagctttaaaaagtgtcagggcttttggtggcggtggtggggggcaacaagcagaacactgttttagccgcatcagcctaggggtactagagatgacggttatctccaggtgaccctgggaagagtttgcaaggttccgctttttggcgccagggtatctggtggtgttgatttctcaggtgagactgtacagaggtcgggggctgcacccctggcctcaacaggaggcgggggaaggcgggggacggtgtcagatgagaagcaccgagccacagttgagcttaggtgaggcctcggcgggtgcgaggtgagggcagggatccacgaactcagagtcagatgctgttggcccgaatcccatggggagcgccaaggtcagcctaggacccgtggtggcgggagtgcggaggatggtggaggaagaaggagctgaactggacagatggagggctctgggagggcattgctgtgtgtgcacacaaggatgtcttaaggtcaagttttggtcatagagagccccggccaaggagacaggagggcgagaagggacatcccaggtagaggaactggcaaggtgagggacggcgatgtggaggctttggggagtgcccacatctaaggggcatcccaaaagaggagccagtgctggtggtgctgcaataggaggaggaggcagcagggcagaaatgccaggggagggagtggccagccacaggtccctgcccagggcaaggacgggcatgctaggtggcagctggggccagtcgtgcagaagccatgcccaccttgtggccgggatggagtggggactaggaaggcaccaggtcaggtttctgtaggcacagccctaagcatggctgggatggggagggggctaggaaggcaccaggtcaggtttctgtaggcacagccctaaggtttcttgtctagattcaagacaagttgttgcacagagaagccagcagagctgggtgtggggtttggtgcccagtctgctgcggggaatgccaggtgctgttccgtgactgtgggaggaaactgttggctccgctgtcccttgggtgccttcttgaggcaagtgccagggctcagggatggtgctgtgagtacctggaagaggcagggcatccagaggtgacctctcccaggctcccctagggtcccacctgtgccctgggaagtccctcagtggggtctgtactgttgtcttgctagtggtcccatgggtgtcggcagcctcagcactggaagaaggcagaggccaggtcctgggcttgtgagctgctcactagaacctggtcctgtgagcgggccagaggggagttccttccctcaccctctgggctgtggggagattccttctgctgagccagcacaggtctgtgaggcacccgggcagtgaggccacatctgccacaggcgtgtcaggttgtagtagctgatctttgagctgctgccttggatggggacagcagtggggcccgcccttgcctgaaagccagacttattgaggagggtttaggaaagtcccaggatttccatgacaacagcactgaggttgggtgtgcgccctcacagaagggacaggacccgtggtgacagtggttccctgagtggggggaggggagagaaccggctctaccagtgttactctgcacacatttggttgagtctttcacagggggtacaagtgtatgtgttactggtgcaggtttctaaatcctcgaaggatctcctcacctgaagaagatgtggggctgccctggtctcaggtagtgccatgcggggacatcagtgacaccaggatggtgttaaagtggttgctttgctgtggagtcagctttaaaattacaagccctaggctcatgcctaggcatggtggctcatgcctgtaattctagcacttaaggaggtcaaggcaggaggatcatttaaggctaggagttcaagaccagcctgagcaacatcgtgaaaccctgtctctacaaaatatttttaaaagttagctggggccaggtgcggtggctcatgcctgtcatcccagcactttgggtggccgaggcgggtggatcacctgaagtcaggagtttgagaccagcctggccaacatggagaaaccccatctctactaaaaatataaaaattagctgggcatggtggtgtgcgcctgtaatctctgctacttgggaggctgaggcgggagaatcgcttgaacctgggaggtggaggttgcagtgagccgagattgtgctactgcactccagcctgggcaacaagagcaaaactctgcctcaaaaaaaagaaaaaataaaagttagctgagtgtggtggtgcatgcctgtagtcccaactactctggaggccgagataggagtgtcgcttgagcccaggagtgagaccctgcctctaaaaataaataaataaaaaacttgccagccctgcctgtgtgcttctgcagccctgtgcagggagcttccaccctcagcccgggcccagtcccccagccccccatctttgtgaataagcatccctggagtcagtgcagcctgggctcccgccccttcatttagtgctggccgtgcggaggcgagcagttaggtagagggagactgcgtggccccgtgcggcagtcgacagttgcccaccctccctcctgttgttttctgatggttctctcagagcggatgtggataagcccagtgatggtgttcaggtccccagttctgccccgcctgccacttgggtgatctttgatatgtttcagacccatcctgttctcccaactatccctgggtgctgccagcaggaatgaggcctggctcaggctcagtgggagacggagaacatgtcagcctgttcattttccagtttctaatcctcttgataaaagaacaaaatgccttaaagtcagattctgcttggaggctgcaggaaggcaggggtgagtgcctgggaaaccctggtccttggggctgccccatggcgtgcccaggggtgatggtcaggaggcgtctccatggggcaccaatgttcagggtaaggctgtggggctatgtctgcctgtgggcaggcgtgtgggtgctcagggctggcttgggtgtaagtgtttgactcgctaatggttttgcttagactagaagttgttcctgaaactacggtctcaagagatgctccccacataaaaggagttctagtatccattgggtttgagaaaccccaggctcttcctgtgttggggctgagtcggcaggggcagcagacacaacgcggaggtgtgcttctgagcatcacactcggccctcctctccaagtagcctctcgttgtccctgtcctttctgccctggctgtcccccgtgctggagctcccacagttgtccatgccatctcctcgccttggcaagccccactcctggatctgggttagtaaacacccctgccctaccctgcaggcactgccccatccccctgtcctgagtcataggcagagtccctccttcccctttggggttcctttaccaccaggatgtgagatcctggtcggtttcctttggttgtttccagtctataaaaggtgcttggtgcatggcagcttgggacatctgaatgagcgacgtggtgaaatatgattggaggagacagacagttcccgggcagcatctgtcagagtggctggtcagccccagatgaccctgcagagcgcatgggtcctggggtgggagtcatctcacaggcccctgtggactgtcatctagctcattgtccttgttgccagggcatgcctccctccagctgggcgcagactcagcctgagtttcacacgtttgttatttagcatccattcgggggctggcctcatgccagtcacactgtttaagggacttgggataagagggaacaaaacattgaaaaatctgggcactcaagtactagaaagtcaagttagatcctcctcttccgcagcagaactaccaaggtgtggatacagaggatggtctcaaaatgccggctgtcatccccagggaggctggccattctcctttttatccaccaagcagtggtcaggcacccactgtgtgctgctggagtgactcatgggtggggccctgaaggggcagagtccaggtgggaacagtgtcctcaggccaagcaggcagcacctcctgtggtctctctgccctggatgggaactggagtgatggacagggtggagaagcaagcggctttagctggtcttcaccatgaaactgaccctgaaagcccagtcgccaagagaccatatcgaggccccatggctggggtgaagtgtggtcggggatgagcagcggtgccttgctgggaaaggagagttcaggcagcccaggacagcggcttccctttgcctttcagctgctgtatgtttccaggaaacttctaggacagaggctattcaacaagctcatgaagatgaccttctatgggcattttgtagccggggaggaccaggagtccatccagcccctgcttcggcactacagggccttcggtgtcagcgccatcctggactatggagtggaggaggacctgagccccgaggaggcagagcacaaggagatggagtaaggcctgcccggtgtctgcgggctttctgatcatgaccctggagcacccagtgggagcaggtgggatgtatccagctgctgggcttcagcctcagctgggcagaggccaaggctaggagagcttggtcagcccaactaccgatgaccctcctgggctctgcctggagttcttgcatttttgtttcatgcggtggacagctctgggctttcatgggaggcctggtgtgcgtgaggcctgaggaagcagagtacagaatggcccttggccctatctagtccaccgcctggaggagcacaggcaccagcatatgaaccaagcactctgcaaagaatggttggtctcgcctggatctcacatgagccagggactgctccaggaagtggagggaaacgtggtcttgttgttctgtcctgatgccctgcccaggagggcgggtcagggtggtaccaactgccctctacactcactgcccagggaaggggccttgtatcagcttagtggcctccaggagctgactccaggccggcctgctacactgctcctggcttcaattcccttctccactgacaatggggcaggggccaggcctgggaggttccacaactgcagggcaggctgaggccaggcaagggtcgggcagtgggacctgcctgcgggtcaggaatccctgcaaaagagaggctgtagcagagcctcctccatcaggtcagcaagtttgtgtaaacagccaggtagcacagactctcagtcgggccacaccctccctgccacaacggcttcactctgcctcagtagggccatagtaattagaatttcatataattttcttgtgtcacaaaatattattcttgttttgatttctttcaaccagtttttttaaagtagggtcttgctctgttgcccaggctagagtgcagtggtgccattgttcactgcagccaaccttctgggctcaagtgatcctcccatctgagccccctaagtagctgggaccacaggcacgcaccaccatacctggctaagttttaatttttttttgtaaagatgggatctccctatgtcttcctatgtatttgggtcccctgcaccctgacagcagccgggcctgacccacataaggcttgggacagtccctctgtggacctggtcaggccttggtggttgttcctgcccctcccctggtggctggcctgggaaggggagggaaaggcagtcacatgaggcctccagccctgggaacggaatgtctgaggcttgcctcagcatgtcggctgccagctgcctggagaggattggccaggggagcccagcccctgccttgcgattggctgttttgaaggtggggtactacagccccagcaccccactgtgttcctagcaggccccgtgggccttgcagctgcctgagctcttggctgcagcctttgctgagctgcctgttgaataaccaatggcctgtgtgttctcagaaggagtctgggtggggacttggtttcacaatgggattttcctctcaggcgcctctggtatgaaaagactcctttcccagggtggtcctgcctggcttcctccctgccctgcaggctgagtgtctggaggtggactggcctgcactctgccagggggctgggcacctgtgtccttaggagcttgagtcctttgccctgcaagggattcacctgtcttgctgctggtggctgctgtctgcaggggtcctgctccagctctgggaagtgaacagggttccctcctgtcctcacaggggtgcatgctgaggacacctaccgagctcagctgctttgtgctttcagaggggcctgagccatgggggtagggctgggtctgcaagcactggtctgatgtccacactgcagcatggcctgcttggccaggagtgaccagtcacgcagaccctagtgcagggaactgcttagagatctgccttcctaacctaccctcctgtcacaagggccatgggctctactctggggagagacactgaggccaccgccccaaattaaggccatggcaagtggtgctggccgtgagaggcccagggaggatggaggcgtctgagtgcatggcaaagtgagtcccagcagtgctcccgagaaagaaagaggaggtgggagcctggaggtgcaggagggcaatgcccacccggggggggggtggaccatgcttcccagaggccagggccccacccaaccccaggagaggagtcccagggatccccgaagcaggctgagggcttggggatggggaaggggccaaggcatcttcctgatgattgggctgtgagggaacacctagggggtggatgggggcattggtctggctgtgcaggcccagggctggctggaggcaggatatgtgtgcagtgagtgtcctgagcgaggggctggggaggcagagggttggggagctggggaggggggtacaggtaggaagcggcttgccaggcttccctccaggagagagttggacaagggcggggtgtggacccccatgctctgcttgtttcaataggcatcacgtccccagggacagccacccagagctgaggtggaggctgagggggtggtcagggtcttcctgctgtctctgaagaccccctggggacacgtgcttgtcctcctctgccctatgtccccttgtcgctcttccctcctctgttgtcccaggtcgtgcccatgtgtgcgatcatgtgcccttcaacagactatgccctgggcatgatgaggggtgggactgggggagcacgaggcaggtcctggctttaaggaggcattgggatgtggtccccaccctgatcagggccccacatccactggttcacccttcctcctctaacaccccacagctgccagtgccatgtgcccccctcttccctgtggtgccttgagccaggacgtggcaacgtcccaggtggcgaaagccagatttcctgtgtggcacccgcagttctgaatcagctgctcccagggtgctttcttcctcttctccagtggaaataggacccctgacctgcctgggaaccaccatttgtgtctccttgtgacttatccatgatgcctgttggagagtgtggccctgtccttgctgcgtagccatccactctgagacctggctgcccctctggccactgcacgtgctgtgtggtcatcttggccactgcttggctgtgtcagcctggtctgtgctctggaagttcacggagaggagcagcggtagcctatggtgttctgcctctgagtgtgtcagagcaggagagggagcagccctggcttccccagcctctcctgccaggcccacctcagaggatgaacacagcagctgtgggaatgctgagcgggaactcatctgcctggggacctgtcagataatgatcctgtttcatgaaggtgagctgcctcacaggcagacacctgtgtggttaagtcccgtgttatccaaactgtgggctgtgtggtttcaggatgggaccttctcttcagggtcatggaggcccctgaggccctgtccccactgtctgctgttacttgccatgagggtttctgccctgggcagggccctggctgccaccccggccttaacatagacagtgagtcccccttggggatggcttttcctggctgtacctaagccttggcgtgaaggtcttagggctgatctcatgactggtcttgaggtgcccaagccaggggcccaggagctccctgtctcaggcaggggttcacgtgctgcctgcctgttccctagtcacatggtgacattccaccctcttctgtcacatctctgtcagcataaggtggccagagcatatctgcctgccagctcccatcactgggctgcagcctcaggggccctggcagcacatgtggagtccctggcccatgtggggctgcccaggagtgggtgggagggaaggcctcctggcgggggctcctggcccagggcttgctccttgagcagccaggtggaaagtgggcagctgaggccccttgacatggaggcctctgggatgcggctcactgaccactgctctgcctttccccttcccggcatctgagggggaccctctcctttcctgtgagtgtgggcagagctgcccctgagggtccgagcgcctctggggagcttcaggaaggctctgggtgctgttggtcatgcagctgagctctctccgtggtcactgacttgatcaggtttgaatataaagtcaggtgaccctcagagctgctccgggggccagggagaccatggtcgctttgtcacagcagacttaacggccgcagcaactcttgctagcctggatgacacagcactgaaaccaagtgccagaagcagattgtggctgtggggaggaggaggaagaagaggaggctctggcaggggtgcagggctggtgggggaggggagccaggtaccctagagaagggaggggccagggggaatgggggtgctggccaggcggggatggagaggcttctgcaggaaggacaggggcttggctgagcagagtgtggccagcctagcgggggacagcctgcatcctggcctcactggtcttgaggtgcccaagccaggggcccaggactttgggcattactaggaaatgatgggaaccctgggtggggtggcgtgaaacaagatgagatggtaagatctgctttcactttaaaggaacatttctggttgttgcttggaaaagaagtgtcggggcaagaatgctacaggagggccggcctggaggacagggcgggactgcagggctggctgtgcgggggcaggagcctgtgcttgcatcagagctgcctgggagaccctggctctggggtggaggcctgagtaagggggcctcgctggggatttggggacctctgtgtgctggtgccttcccgcctccgttcctctcagccctgactggctctgtcttggaaccaggtaactacctttatttgagaacctgctgcaagccctgggctgttctgagagctcaggaatatcgttctgatttctccacccacaaggagccccgggcttcctgagcccttgggacacagcagccccataaactgctgcccctcccaggcccaagtgttccaccccaggctaggggtggggctggggctgcaccttggaatctaccctccaccggggttgtggtggggccctccgtgcagcctcagtgggaacgtgcctgtcacctgaggctcaggtggcgtgaccctgacctttgctctccccctccttcccacaggtcctgcacctcagctgcggagagggatggcagtggtgagtgagaggctgccgcgcaggaacagactccctcccgactccgcacaccccttggtggctcaggagagtctaggctggggcacaagtgggccttggggtgacgtcggagcccgggctcctccctatgtccagggcacctgccctgtcgctctgggctctgacatactcgcaagtgtctggggagacgccctgctcctttttcatggcctcctggtggacctaggcctttgttaaggagactgccgtcctggcctcatgaggaggcttagccagggggatgcagcactccaggtggaagagccgcggtgtagacaggagggtgggcttggggatgggaaccatggggcagtgcagtgccagggccaggctggcaaggccactatgcttggagccctcctgagggcaggggccctgggctattggtgtgtgggtgctgggggtgggtgtttggagctgtgctcaggccgtgcattcgctattccaggcacgaataagcgggacaagcaataccaggcccactgggccttcggggaccgcaggaatggtgtcatcagtgcccgcacctacttctacgccaatgaggccaagtgcgacagccacatggagacattcttgcgctgcatcgaagcctcaggtggggccccctctttgctggctatacccctgccatgtcccagcctgagcggacccctgggctcatggaggtgccggtgggtgaacactaagctggggcaggagccagagggctgggttctgaccacacttgggtccctcactgttcagccccttcctgaggggccccactgcctcccagaaggcatctcctctcctgccccagctccctgttccctgatcccgcctcatgccccccacccttctccctggctcagggccaggatcgggagctgcaggaagttggtccatgtcagctgccgagccacacttagcccagggtggaggttccattcagggagctggtgccgcatcttctgtccttccctgacacagcctctgggggccagcggtgggggcagcaggtgtttccagggatagagaagccagaggtcagcaaggcccaatgtccttcagtgttagaaacatccgacctgcacagccccatgctggccccagcagccctccgtcaggggcagcgggtcccaggcctgtttatgtttttgtttgtttgcttcaaatgagactggatcttgctctgtcacccaggctggagtgctcacgcctctaatcccagcaatttgggaggccaaggcgggtggattgcctgagctcagttcaagaccagcctgggcaacatggtgaaactccgtctccactaaaatacaaaaaattagccgggcgtggcagcaggcgcttgtaatcccagctacttgggaggctgagacaggagaatcacttgaatccaggaggcggaggttgcagtgagccaagattgcgccactgcactccagcctgggcgacagagtgagactccatctcaaaaaaaaaaaaaaaaaatgaggtctcactatgttgccctggttggcctggaactcctgggctcaagtgatccctccaccttggcctcccaaagtgctgggattacaggcacacactaccacacccagctaattttcatattttttgtagagatggtgtttcaccatgttgcccaggctggtctcaaactcctggcctcaagcgaaccttacactttggcctcccaaagtgctgggattataggtgcatgccgctgcacctggcacttctgagcagtgcttggaagccgcctcctgatgggggctgagggtcagagtggccagctgaatgctgggccatcagggtgaggggcgtcttctcctcgtccattgcctgttctcccagggcaggtggaaggggaaggccctgcattggggtggcgtgaaacaagatgagatggtaagatctgctttcactttaaaggaacatttctggttgttgcttggaaagaagtgtcaggggcaagaatgctgcaggagggctggcctggaggacagggtgggactgcgggctggctgcacgggggcaggagcctgcgcttgcgtcagaggttcctgagagactcggtctctggggcagaggcctgagcaaggggacctcgctggggtgtctctgtcttagccacgctcggtgtttctgggtcctgtgacccacgtgtgagcagcctgtggtgctggtggcacagggaaggaaaccgaggcagggagcctgtgggggctgcttggcaggggacaggcagctcctgtgcccactgctgtcccacacctgcatggaaacagaaaccccgccacggagccccctcccatctccacagggcctctagagcgccatgtgcaaggacttcatgggcggggtggggtggggtcaggagcctgctgtgggctggccaggccctggccctccctgtcgcaccctgcgctgcctccatgcacctctcagggctgtcatggcttttcctgtggcttctgacaggtagagtcagcgatgacggcttcatagccattaagctcacagcactggggagaccccagtttctggtaagtgctagaaccttccacctgcagagtctggtgctgtgcgagatctcagggcagctgtgggcatccaccaaaaacacaggtgcccatgccttagaggcctgagctggccacaggggctgtgtgggggactggggtgggcaggggcgtgtgcagatggcattcaggcctgcgtttgcagctgcagttctcagaggtgctggccaagtggaggtgcttctttcaccaaatggctgtggagcaagggcaggcgggcctggctgccatggacaccaagctggaggtggcggtgctgcaggtggggcagccttccccttccccactcctgtggcttgtgagggggtgggcaccgtggggtcacacggggcatggtgggcagtggtcggaggtggttttgggaactcacccagggcatgtggctcactctgcagctgctggggttggcctggtggggaggaggaggtcagagggactctgaacagagaggggagatgctggcaggagggctggagacccagccctgcagggcgtgggcgtgcatcagcagcggggtgggaatagacctgtctatgcagtagaaacaaaccagacatggatcctgttcttactaacgatgtaataaagccagaaacagcaccagaggccaatgggtggggggaaggataaaatatgagtgaatggggctgatccaggccttctcacttctcaaggaaagtgtcgcaaagttgggcatcgcatccagggctgagattgaggactggttcacggcagagaccctgggagtgtctgggtgagagcagcccccaggctgagaggacacgagcatcagccatggttccagccaagccccagtgacgtctcccagtcctggctgccctgcctgagagggtgggccctgggatgacagtgctgaaggaactgcttttcacacagcaggacttgatggcttcaggagtccctgaggctggggctgggctgggcaggggagacacagggccagcacagaccccatagagggctctttatagaattatctgggtccagagcaaaggtggcactctcagccctccctggagtccacgccggcaggtgaaggatcagagccccatgccccatccttggagccaggggctgggacccagatcaccaggagcctccagttgaagtggggaggtgactggggtggtgcagtagtgagccatcccctcacacactgccagccttgcccactgtgtcctccctggccgcccggagctgtgtccgcctcctgcctggctgcctgtgctcggcccctccacaagcccaaaacagcctagggtactcagtgttttcagagccgcctagatgcaggactgtttgtgttttggttttaaatttatttaattaatttattttttatagagaccaggtctcaccatgttgcccaggctggtttcaaacccctgggctcaagtgacctgcccgccgcagcccccaaagtgctgggattataagtttgagcccccgcatgccactggttttaaatttttaaacagaaaacaatatttatatttcctctgtcttttaaaactgaacaccgaggtgggttttgtggtgggtggtgaacggacaggtttgggcctcgatcccccacccgaccctagcacccacaggtgggggtgccccctctgctgatgcgcctcctccctcagcaccatggacctgctggactggagcagcctcatcgacagcaggaccaagctgtccaagcacttggtagtccccaacgcacaggtaacacctccgctcctcagtgaggcccagctcagcagggcgctgcgctaagaagggaattcagcctgccacgtgtgtctcttgttgcctaccctgggaacttaacatgaccaaaatcactgcacactatggccccacagaccccctgtggtccagggggaagaagacaagcccactagtgtccacagagtgcttggcgggacagagacccacgcggagccttaagacaccacaaggagagggggtctgggggccttccccaagtcatctgtcttgtgcatcaggtcaccccaaacttcagaggcctgaaacggcagcagccactctgcttctgcctcatggttctggggttgacagggctcagctgggcagtcctcccctggggtctcctgggtagctgtactcacagagtggtggcgctgggacctgggggaggcacccattcacatgtctgggagttggtgctggctgtggcttgggctttttcccaacatggcagctgggctctaagggccagtgtcacctgagacgtgagagccaggcagaagctgggtgaccttttcctgcctcgcctcagaagtcacacggtgtcttttctggcaagttctgtttgttagaagcatgtcaccaggccagcctgtatacagcggggagaggaatgagactcatctgcctgtgggaggggggcccaggacctggcagactgcttgaaaccacagcttaaactgggattcaaagaaagaacagaagcaccttcagaaaacatcctgcagaggcagctttccatgacacatctagccccagtccactaagggcccagcctcaaacttagagcccccgacccagagcctcggggcgcagtgcgtacagtgtggctgtgcaccaaggccaccagctgttggagactttagcatggtgtagcaagggatagagtggtactgtttgtgcccagtgaggcaaggctgctggggccagcaaaggggtgagcgggaggccctgcgggatgggtccccacggcctctgagcaccagcaacttgaaggcctcatcctggtggttgccctggtccctggctacgtgtcagcacgtgctgcacaactgccctgtctgcctgtagccaggggtcttcctcctgggccctctgcctgctccgggtggagcccttctgtttgacgattgggtgatcagtgttcacttgttcaatgtcacatgggagttgcagggggctctcccacaacggtggggcctctgtgggaactggggagtacacacttcggagtgcaggcctggactgagcctggggcccactgacatgggcactgagctccctcgtggtacccctaggccccgcatagggcagtgcactggctgcgttggaggttcaggggcactgtgctgcttgtccaggtggccctccctcccagccctgcacagacgggtgagagggttcctgtgggctgggaatactgagagaggtttagcctgggcctcagggtggcactttcccgcccttgctgtggcctgaccgcgtgttgcacccccagacaggacagctggagcccctgctgtcccggttcactgaggaggaggagctacagatgaccaggatgctacagcggatggatgtcctggccaaggtgagctgtcccgctcgggcagagggtacctgggactcgtggagaagagggcacctgcctcacttgagcaacagttgctcccactctcccaccccctgcgcctctcagaaagccacagagatgggcgtgcggctgatggtggatgccgagcagacctacttccagccggccatcagccgcctgacgctggagatgcagcggaagttcaatgtggagaagccgctcatcttcaacacataccagtgctacctcaaggcaagcccccgctcagcccctccctgcctgccctggggcttggagaccccacaggaggggctcctctcatctgagctccctggcatttggctggttttacactcagcacccaccagggagctcatgggatggaggagggagtgggccgtgcccccaaggggttgttggggtcttctgcagcacagctcacccagcgggccccagggtccaggaaagagccccttaggtggtggccacagccaggcctgcagaggaggctgaggccagggtgactgcctcagagtagcaagaaagacccgctgcccgcaacctctcccctggttctcagaaccagccaagagtgtctaaggagcaggaggaagacaacaatctttatgagggtccactagatgtacccgacaccccaaacttggaaggtgtcacatgaccatttcctccagcgtgttttcagttcagcgcccctaagaacctcctgaaagctttgggccctccccggaaagactcacccaggatgtcacatgtattcagggagcccaccctagcctttgggccccaaactgctcagggatgttagcaggtccagagctctcaggggtgagccggatgcccagaggacacagggtggcatggggaggggtccaggcaggagcatgcagtatgcacccctcccggtcggcctgggagtctggagcacatgatggctgctggcgcctgggctgcacccacagggccgtccacaggccacacaggaagttgcagacgtccccactgccattgctccttggggacagaggttggaggcccatcctcacccacacctgctccaggtgccctgagctgcacctccccaggcagctgctgcccagccctggtgactgcacctgggcccaggaaggccccatcctgctgtcacttgggcttgcccaggctccctgtgacttttggccctggccccacaggatgcctatgacaatgtgaccctggacgtggagctggctcgccgtgagggctggtgttttggggccaagctggtgcggggcgcatacctggcccaggagcgagcccgtgcggcagagatcggctatgaggaccccatcaaccccacgtacgaggccaccaacgccatgtaccacaggtgcgcagctctcccacccctctgtcttctcagggcagggcgccaagaaaccaggcctgagggagaggcttggagactgaacttgtcagccacatgtgtccccaggtcagaactggtatttcctcagcttttatgtcatgtgttactttttcaaaagcattaaggttattcttttataaatatagaaaagcctattgaacaaagcaaaattggccacagttccctgagcttgctcctgcagacacttagatccagagatgtgcatgaacacccggtcctccccaccctgcaggctcagcctgtttgcttttcagttcacacagtgggatcgcccatcagctgttctgcacctgcttttactgctctagtttcttggtgatcttttcatgtagcacaggctggccaaccatgggcttttcctcttagaggcgtgtgtgcatgctgcaaattcagagagaccccaagtgtctcctggttggctccagctcccctcctgcagccgctgtgcatgtcgtgccacagcgcacacatctccgccattgttttttgcgttgtagcgtgtcctctgcccgatgtgtttttcatttcgcgttccatctgggtcctcttgtgtgggcttgcagagtggtgctgtcaacagccagcatggagtgcccggggctatgtgtccagcatctttgatcttattggtttttagtctggttattgtaatggactcgctggacataccgtcaccctctgtggtacacacgggccgtcaggggttttgtgtctgaggatgcagctgtcctaggttgctggaaatggaattgctgggtcagagagaacgtgcgtgtggtcaagcctgctgagtgacctcgctgcaggagggccgtactgctcgggcttcctggtgcaccgggatgcccacccccactgtgccctacagggacctgcttcccttttatttccttgcagggccaggggtgcactgtacgatccctccccagaagcaaagctgtgtctgtcatgaggctcatgggcatgtttgggctggtccccagagtcacagcacgtttgatgcagggactctgcccccacagctggttctgcgtgaattgtctggtcccagacatcgcttttgcttggttgctggtctttctttttcatgaggtgctgggaggggcagatgctgctcctgttcctcctgatcctgtggatacccttggaaagagccagctcaatggatggatctgggtctgccctcggcctcctctctgtgcagctggtaatgagaggtgcaggcagccacaggcctggaactgggctcacatggcactctccacaggtgcctggactacgtgttggaggagctgaagcacaacgccaaggccaaggtgatggtggcctcccacaatgaggacacagtgcgctttgcactgcgcaggtaggtgtgccccaccctgcaccgaaaccccaacctgagccgttgtctcctccggctggggagaggtggcagcagcgcagagctcagggtgggcagagcgacctgctgggtggtcgggcatttgtggggaaaggctggtgaaatgagctggagggtggcttcagtgggcaggcccaggcccgctggcgttctggacatcggactgtgagagcacaatggctttttgcagttacgttggtttttaaaattaacttttttctttttttgagatagaatctcgctctgtcacctatgctggagtgcagtggcgtggtctcggctcactgcaacctccgcttcccaagttcaagcaattcttcatgcctcagcctcccaagtagctgggattacaggcatgtgccaccacgcctggctaatgttttgtatttttagcagagacagggtttcaccgtgttggccagactggtctcaaactcctggcctcaagtgatcctcccttcttggcctcccaaagtgctgggattacaagcatcagccactgtacccagacttttaaaaattaacatctgacttattaaacttcacaattaaaaaactaaatttcatcagggtattcggatggctcctgaaaggtacaaatgcagtgttggaggccagtccctcaggaggcctccacagtgccacctcattaatacgcccttaacattttaactacatctggaatgtaacggtttgttttctctttaaacatttgtcccatggagcacaacttcggtagaattctaacaagtcaaatgcagaagttaggtgaagtcagttcttggatactcctgtactgtcaccctggtcttatctcatgccttagtccaagctatgcacacaatggggtcctaggtccccctcccctcccagattccgccttcccagggatgggaccccctagaaccctcgggggcctgggcagtggcctcgctggctctcgccttcctaggagctgagcaggagctccactctcagcagggcagggtgccccagatccagggcttgtggcacgagggggctccccaagaagctgtgaagccacagggccaggcttggggccagggctgcagccaacaggacacatcctggtgctgctcgggagctgactcacggctctgaaatcattcagtgatgtccacattcagcctttgtttacgatgctgctactttttcatggcctgaaattgcagcacacccatttttgtgccctgatcctctgctaattgtcatagatgtgtcggtgatgggacagactcactttctccacacgcacaggcctggtggccagcactgcccagcactcgggagctggtgggggttcctctcagcttgtaatcaggactcccagcctctgggtggactctcaatgctggtggactcacagcctgactagacacatcaccatccaactccgaaaggacagcctgccctcagcagggcttcctctctccagcttccgcccggcacctgtctgtccctactatcttgctgtggcagtggcttccccagtggacacagcttccccctcccctgagtggcagccgggctctctcctcttggccccaagggccctgtgccaggctcccccagtaccacgctcacatccctgcctgagaggctggacccctgcaggcttcagctctgcccctgctgtgggtggttggggagctctggggagctggggtcccctcccatgggtaagtggttctagactatggcagctgctctgtcctgtgctgggcccagactgccacaccacccaccctcaaacaatcggagttggctttggccaaggaacaaaccagccccaaacttagaggctggaacagtggcatgttctgtaggccaggggtgggctggctcagctgatgcttctgctgctggctgtgcctgtgtccctcctgcgtctgtgatctggggccggtggggcctaatgagctcattcatggctggggcagtaaaggagactgcatcccgggtccagcgtcccacaggccagcccaggcttgagcacgtggtgggctcaggcttccagaaggcctggagagggcaagcctctgcttgtgtcacctttggtacctccctgctggccaaagtgcctcacgaggccaagcccagatgccaggtggagtgagccactgtcctgtgctgggaggagccgcagtcacatggcagaggctgtgcacaccagcaggggagggggcagccagcagtggcacccggctctcgggttcatgtcctggggttgaggaagacacaagatggaagccagggcgatgtggcagagatgggtgcctgctttagactgggtggtcccgggtgatgcgtgagcagcaggcggaactcaccccagggtggggaccccagtgctttgcagaccagcgaagtcgggatacctggatatagtaagctggagatgaaacttgagaactgccactgcgtggatatttcagaccctgagaatctttgtaagacgctatacggggtggtgtgaagacaggacagagtggaggccccaccccagtatctgagcagtgctaatagatatataatgcaagccacatctgtaatttaaaatttagtagctacgttaaaggaaaaagataaaatgaatttcaagaataattttaattaacccaaaatattcaaaatattacttcaaattgtattccagttgcttttagaaaagcaacgcggcatcgtgcattatttttctacaaagtctcctaaatcccgtgtgtatttgacatttgcaacacatctcgattcagagcagccgccttccgaggactcgggggctggtggcagctgtgtgggacacagcagctgtggggatggggcagggcagcagcccacagagggcgagggcaggggccggagaccagtcataccacagaaccctggaggggcttgaggaagggatggcaggagagctgaggagcttctctgccctgtggggcaggctgctgggtgggtcagggcccgaggaagggctgcacctccaagaagggagctagaggagaggtgagagaggagaggggagggaaagcaggtgggaggccttgttggccaagggctgaggcctccccagggagacgagtagggcagcccagcagagtcctgctgggaagaggcctcactggggcagggccaggcagagcccataccccagccccaccttgcaggggatgaagtctggagagtgcagatggggcacctgggatggcaggacaggctcagagctgggacaggagccctgtatccctgcactggggacagtgtcctggaactggccctcagttcctggcttcacctgcacaggatggaggagctgggcctgcatcctgctgaccaccgggtgtactttggacagctgctaggcatgtgtgaccagatcagcttcccgctgggtgagtggggccctccctggtgcgatggggtacggtgctgggcctgggcctcatggtgtatctgcccccatgcaggccaggccggctaccccgtgtacaagtacgtgccctatggccccgtgatggaggtgctgccctacttgtcccgccgtgccctggagaacagcagcctcatgaagggcacccatcgggagcggcagctgctgtggctggagctcttgaggcggctccgaactggcaacctcttccatcgccctgcctagcacccgccagcacacccttagcctccagcaccccccgcccccgcccaggccatcaccacagctgcagccaaccccatcctcacacagattcaccttttttcaccccacacttgcagagctgctggaggtgaggtcaggtgcctcccagccctgcccagagtatgggcactcaggtgtgggccgaacctgatacctgcctgggacagccactggaaacttttgggaactctcctcgaatgtgtgggcccaaggcccccacctctgtgacccccatgtccttggacctagaggattgtccaccttctgccaaggccagcccacacagcccgagccccttggggagcagtggccgggctggggaggcctgcctggtcaataaaccactgttcctgc

SEQ ID NO: 13565 - DNA, 2462 bp, Homo sapiens
ggtctcactctgttgctgtcttcacggagagcaggagcagaggctttgagaagccagtgggccttggcctcagccctgccggcagagggtccccaccatgcagctgaagtgccagggtgcttgtgaagtctaagcccttgtctggcatttgtcaggaatatagggtgaggcctctgggaccgagcggggcggggcggggcggggcggggcggggcgggaccaacagcgcacacttaagcggcccgggcgggtaccgccgtcccgccatggctctgaggcgcgccctgcccgcgctgcgcccctgcattccccgcttcgtcccgctgtccacggcgccggcctcccgcgagcagcccgcagcgggcccagcggccgtgccaggaggtgggtcggccacggcagtgcggccgccggtgcccgccgtggacttcggcaacgcgcaggaggcgtaccgcagccggcgaacctgggagctggcgcggagcctgctggtgctgcgcttgtgcgcctggcccgcgctgctggcgcgccacgagcagctgctgtatgtttccaggaaacttctaggacagaggctattcaacaagctcatgaagatgaccttctatgggcattttgtagccggggaggaccaggagtccatccagcccctgcttcggcactacagggccttcggtgtcagcgccatcctggactatggagtggaggaggacctgagccccgaggaggcagagcacaaggagatggagtcctgcacctcagctgcggagagggatggcagtggcacgaataagcgggacaagcaataccaggcccactgggccttcggggaccgcaggaatggtgtcatcagtgcccgcacctacttctacgccaatgaggccaagtgcgacagccacatggagacattcttgcgctgcatcgaagcctcaggtagagtcagcgatgacggcttcatagccattaagctcacagcactggggagaccccagtttctgctgcagttctcagaggtgctggccaagtggaggtgcttctttcaccaaatggctgtggagcaagggcaggcgggcctggctgccatggacaccaagctggaggtggcggtgctgcaggaaagtgtcgcaaagttgggcatcgcatccagggctgagattgaggactggttcacggcagagaccctgggagtgtctggcaccatggacctgctggactggagcagcctcatcgacagcaggaccaagctgtccaagcacttggtagtccccaacgcacagacaggacagctggagcccctgctgtcccggttcactgaggaggaggagctacagatgaccaggatgctacagcggatggatgtcctggccaagaaagccacagagatgggcgtgcggctgatggtggatgccgagcagacctacttccagccggccatcagccgcctgacgctggagatgcagcggaagttcaatgtggagaagccgctcatcttcaacacataccagtgctacctcaaggatgcctatgacaatgtgaccctggacgtggagctggctcgccgtgagggctggtgttttggggccaagctggtgcggggcgcatacctggcccaggagcgagcccgtgcggcagagatcggctatgaggaccccatcaaccccacgtacgaggccaccaacgccatgtaccacaggtgcctggactacgtgttggaggagctgaagcacaacgccaaggccaaggtgatggtggcctcccacaatgaggacacagtgcgctttgcactgcgcaggatggaggagctgggcctgcatcctgctgaccaccgggtgtactttggacagctgctaggcatgtgtgaccagatcagcttcccgctgggccaggccggctaccccgtgtacaagtacgtgccctatggccccgtgatggaggtgctgccctacttgtcccgccgtgccctggagaacagcagcctcatgaagggcacccatcgggagcggcagctgctgtggctggagctcttgaggcggctccgaactggcaacctcttccatcgccctgcctagcacccgccagcacacccttagcctccagcaccccccgcccccgcccaggccatcaccacagctgcagccaaccccatcctcacacagattcaccttttttcaccccacacttgcagagctgctggaggtgaggtcaggtgcctcccagccctgcccagagtatgggcactcaggtgtgggccgaacctgatacctgcctgggacagccactggaaacttttgggaactctcctcgaatgtgtgggcccaaggcccccacctctgtgacccccatgtccttggacctagaggattgtccaccttctgccaaggccagcccacacagcccgagccccttggggagcagtggccgggctggggaggcctgcctggtcaataaaccactgttcctgc

SEQ ID NO: 13566 - DNA, 1065 bp, Homo sapiens
ttcatgggcggggtggggtggggtcaggagcctgctgtgggctggccaggccctggccctccctgtcgcaccctgcgctgcctccatgcacctctcagggctgtcatggcttttcctgtggcttctgacaggtagagtcagcgatgacggcttcatagccattaagctcacagcactggggagaccccagtttctggtaagtgctagaaccttccacctgcagagtctggtgctgtgcgagatctcagggcagctgtgggcatccaccaaaaacacaggtgcccatgccttagaggcctgagctggccacaggggctgtgtgggggactggggtgggcaggggcgtgtgcagatggcattcaggcctgcgtttgcagctgcagttctcagaggtgctggccaagtggaggtgcttctttcaccaaatggctgtggagcaagggcaggcgggcctggctgccatggacaccaagctggaggtggcggtgctgcaggtggggcagccttccccttccccactcctgtggcttgtgagggggtgggcaccgtggggtcacacggggcatggtgggcagtggtcggaggtggttttgggaactcacccagggcatgtggctcactctgcagctgctggggttggcctggtggggaggaggaggtcagagggactctgaacagagaggggagatgctggcaggagggctggagacccagccctgcagggcgtgggcgtgcatcagcagcggggtgggaatagacctgtctatgcagtagaaacaaaccagacatggatcctgttcttactaacgatgtaataaagccagaaacagcaccagaggccaatgggtggggggaaggataaaatatgagtgaatggggctgatccaggccttctcacttctcaaggaaagtgtcgcaaagttgggcatcgcatccagggctgagattgaggactggttcacggcagagaccctgggagtgtctgggtgagagcagcccccaggctgagaggacacgagcatcagccatggttccagccaagccccagtgacgtctcccagtcct

SEQ ID NO: 13567 - DNA, 472 bp, Homo sapiens
ttcatgggcggggtggggtggggtcaggagcctgctgtgggctggccaggccctggccctccctgtcgcaccctgcgctgcctccatgcacctctcagggctgtcatggcttttcctgtggcttctgacaggtagagtcagcgatgacggcttcatagccattaagctcacagcactggggagaccccagtttctgctgcagttctcagaggtgctggccaagtggaggtgcttctttcaccaaatggctgtggagcaagggcaggcgggcctggctgccatggacaccaagctggaggtggcggtgctgcaggaaagtgtcgcaaagttgggcatcgcatccagggctgagattgaggactggttcacggcagagaccctgggagtgtctgggtgagagcagcccccaggctgagaggacacgagcatcagccatggttccagccaagccccagtgacgtctcccagtcct

SEQ ID NO: 13568 - DNA, 23516 bp, Homo sapiens
cgtcccgccatggctctgaggcgcgccctgcccgcgctgcgcccctgcattccccgcttcgtcccgctgtccacggcgccggcctcccgcgagcagcccgcagcgggcccagcggccgtgccaggaggtgggtcggccacggcagtgcggccgccggtgcccgccgtggacttcggcaacgcgcaggaggcgtaccgcagccggcgaacctgggagctggcgcggagcctgctggtgctgcgcttgtgcgcctggcccgcgctgctggcgcgccacgagcaggtgcgcggggtgcaggcgggggcgcgggggcttctgccggtcccgggagcctttacggagcttcctggcctgaaacgggtgcctcccaagcatctcctggagcaagggaagccaggaagggaggcgtttcctgcagtccctctcggacctcgcaaattttcctatttgtcgatgtctaccaactaaaaacaatggtcgttttcatatttacgatatataccacttgtgggaatacagagttatcacttggaatttaaaatggagtattcttcatgttgagacaagagaatcctggtgtagggctcatagcctggaaccccggaattcaaaccccgggacccagcagcttcccagacacggccactctgagaacactgttggggaaaaatgggaagcccctcaaacgcccagctttgaactcacccatggtagctttaaaaagtgtcagggcttttggtggcggtggtggggggcaacaagcagaacactgttttagccgcatcagcctaggggtactagagatgacggttatctccaggtgaccctgggaagagtttgcaaggttccgctttttggcgccagggtatctggtggtgttgatttctcaggtgagactgtacagaggtcgggggctgcacccctggcctcaacaggaggcgggggaaggcgggggacggtgtcagatgagaagcaccgagccacagttgagcttaggtgaggcctcggcgggtgcgaggtgagggcagggatccacgaactcagagtcagatgctgttggcccgaatcccatggggagcgccaaggtcagcctaggacccgtggtggcgggagtgcggaggatggtggaggaagaaggagctgaactggacagatggagggctctgggagggcattgctgtgtgtgcacacaaggatgtcttaaggtcaagttttggtcatagagagccccggccaaggagacaggagggcgagaagggacatcccaggtagaggaactggcaaggtgagggacggcgatgtggaggctttggggagtgcccacatctaaggggcatcccaaaagaggagccagtgctggtggtgctgcaataggaggaggaggcagcagggcagaaatgccaggggagggagtggccagccacaggtccctgcccagggcaaggacgggcatgctaggtggcagctggggccagtcgtgcagaagccatgcccaccttgtggccgggatggagtggggactaggaaggcaccaggtcaggtttctgtaggcacagccctaagcatggctgggatggggagggggctaggaaggcaccaggtcaggtttctgtaggcacagccctaaggtttcttgtctagattcaagacaagttgttgcacagagaagccagcagagctgggtgtggggtttggtgcccagtctgctgcggggaatgccaggtgctgttccgtgactgtgggaggaaactgttggctccgctgtcccttgggtgccttcttgaggcaagtgccagggctcagggatggtgctgtgagtacctggaagaggcagggcatccagaggtgacctctcccaggctcccctagggtcccacctgtgccctgggaagtccctcagtggggtctgtactgttgtcttgctagtggtcccatgggtgtcggcagcctcagcactggaagaaggcagaggccaggtcctgggcttgtgagctgctcactagaacctggtcctgtgagcgggccagaggggagttccttccctcaccctctgggctgtggggagattccttctgctgagccagcacaggtctgtgaggcacccgggcagtgaggccacatctgccacaggcgtgtcaggttgtagtagctgatctttgagctgctgccttggatggggacagcagtggggcccgcccttgcctgaaagccagacttattgaggagggtttaggaaagtcccaggatttccatgacaacagcactgaggttgggtgtgcgccctcacagaagggacaggacccgtggtgacagtggttccctgagtggggggaggggagagaaccggctctaccagtgttactctgcacacatttggttgagtctttcacagggggtacaagtgtatgtgttactggtgcaggtttctaaatcctcgaaggatctcctcacctgaagaagatgtggggctgccctggtctcaggtagtgccatgcggggacatcagtgacaccaggatggtgttaaagtggttgctttgctgtggagtcagctttaaaattacaagccctaggctcatgcctaggcatggtggctcatgcctgtaattctagcacttaaggaggtcaaggcaggaggatcatttaaggctaggagttcaagaccagcctgagcaacatcgtgaaaccctgtctctacaaaatatttttaaaagttagctggggccaggtgcggtggctcatgcctgtcatcccagcactttgggtggccgaggcgggtggatcacctgaagtcaggagtttgagaccagcctggccaacatggagaaaccccatctctactaaaaatataaaaattagctgggcatggtggtgtgcgcctgtaatctctgctacttgggaggctgaggcgggagaatcgcttgaacctgggaggtggaggttgcagtgagccgagattgtgctactgcactccagcctgggcaacaagagcaaaactctgcctcaaaaaaaagaaaaaataaaagttagctgagtgtggtggtgcatgcctgtagtcccaactactctggaggccgagataggagtgtcgcttgagcccaggagtgagaccctgcctctaaaaataaataaataaaaaacttgccagccctgcctgtgtgcttctgcagccctgtgcagggagcttccaccctcagcccgggcccagtcccccagccccccatctttgtgaataagcatccctggagtcagtgcagcctgggctcccgccccttcatttagtgctggccgtgcggaggcgagcagttaggtagagggagactgcgtggccccgtgcggcagtcgacagttgcccaccctccctcctgttgttttctgatggttctctcagagcggatgtggataagcccagtgatggtgttcaggtccccagttctgccccgcctgccacttgggtgatctttgatatgtttcagacccatcctgttctcccaactatccctgggtgctgccagcaggaatgaggcctggctcaggctcagtgggagacggagaacatgtcagcctgttcattttccagtttctaatcctcttgataaaagaacaaaatgccttaaagtcagattctgcttggaggctgcaggaaggcaggggtgagtgcctgggaaaccctggtccttggggctgccccatggcgtgcccaggggtgatggtcaggaggcgtctccatggggcaccaatgttcagggtaaggctgtggggctatgtctgcctgtgggcaggcgtgtgggtgctcagggctggcttgggtgtaagtgtttgactcgctaatggttttgcttagactagaagttgttcctgaaactacggtctcaagagatgctccccacataaaaggagttctagtatccattgggtttgagaaaccccaggctcttcctgtgttggggctgagtcggcaggggcagcagacacaacgcggaggtgtgcttctgagcatcacactcggccctcctctccaagtagcctctcgttgtccctgtcctttctgccctggctgtcccccgtgctggagctcccacagttgtccatgccatctcctcgccttggcaagccccactcctggatctgggttagtaaacacccctgccctaccctgcaggcactgccccatccccctgtcctgagtcataggcagagtccctccttcccctttggggttcctttaccaccaggatgtgagatcctggtcggtttcctttggttgtttccagtctataaaaggtgcttggtgcatggcagcttgggacatctgaatgagcgacgtggtgaaatatgattggaggagacagacagttcccgggcagcatctgtcagagtggctggtcagccccagatgaccctgcagagcgcatgggtcctggggtgggagtcatctcacaggcccctgtggactgtcatctagctcattgtccttgttgccagggcatgcctccctccagctgggcgcagactcagcctgagtttcacacgtttgttatttagcatccattcgggggctggcctcatgccagtcacactgtttaagggacttgggataagagggaacaaaacattgaaaaatctgggcactcaagtactagaaagtcaagttagatcctcctcttccgcagcagaactaccaaggtgtggatacagaggatggtctcaaaatgccggctgtcatccccagggaggctggccattctcctttttatccaccaagcagtggtcaggcacccactgtgtgctgctggagtgactcatgggtggggccctgaaggggcagagtccaggtgggaacagtgtcctcaggccaagcaggcagcacctcctgtggtctctctgccctggatgggaactggagtgatggacagggtggagaagcaagcggctttagctggtcttcaccatgaaactgaccctgaaagcccagtcgccaagagaccatatcgaggccccatggctggggtgaagtgtggtcggggatgagcagcggtgccttgctgggaaaggagagttcaggcagcccaggacagcggcttccctttgcctttcagctgctgtatgtttccaggaaacttctaggacagaggctattcaacaagctcatgaagatgaccttctatgggcattttgtagccggggaggaccaggagtccatccagcccctgcttcggcactacagggccttcggtgtcagcgccatcctggactatggagtggaggaggacctgagccccgaggaggcagagcacaaggagatggagtaaggcctgcccggtgtctgcgggctttctgatcatgaccctggagcacccagtgggagcaggtgggatgtatccagctgctgggcttcagcctcagctgggcagaggccaaggctaggagagcttggtcagcccaactaccgatgaccctcctgggctctgcctggagttcttgcatttttgtttcatgcggtggacagctctgggctttcatgggaggcctggtgtgcgtgaggcctgaggaagcagagtacagaatggcccttggccctatctagtccaccgcctggaggagcacaggcaccagcatatgaaccaagcactctgcaaagaatggttggtctcgcctggatctcacatgagccagggactgctccaggaagtggagggaaacgtggtcttgttgttctgtcctgatgccctgcccaggagggcgggtcagggtggtaccaactgccctctacactcactgcccagggaaggggccttgtatcagcttagtggcctccaggagctgactccaggccggcctgctacactgctcctggcttcaattcccttctccactgacaatggggcaggggccaggcctgggaggttccacaactgcagggcaggctgaggccaggcaagggtcgggcagtgggacctgcctgcgggtcaggaatccctgcaaaagagaggctgtagcagagcctcctccatcaggtcagcaagtttgtgtaaacagccaggtagcacagactctcagtcgggccacaccctccctgccacaacggcttcactctgcctcagtagggccatagtaattagaatttcatataattttcttgtgtcacaaaatattattcttgttttgatttctttcaaccagtttttttaaagtagggtcttgctctgttgcccaggctagagtgcagtggtgccattgttcactgcagccaaccttctgggctcaagtgatcctcccatctgagccccctaagtagctgggaccacaggcacgcaccaccatacctggctaagttttaatttttttttgtaaagatgggatctccctatgtcttcctatgtatttgggtcccctgcaccctgacagcagccgggcctgacccacataaggcttgggacagtccctctgtggacctggtcaggccttggtggttgttcctgcccctcccctggtggctggcctgggaaggggagggaaaggcagtcacatgaggcctccagccctgggaacggaatgtctgaggcttgcctcagcatgtcggctgccagctgcctggagaggattggccaggggagcccagcccctgccttgcgattggctgttttgaaggtggggtactacagccccagcaccccactgtgttcctagcaggccccgtgggccttgcagctgcctgagctcttggctgcagcctttgctgagctgcctgttgaataaccaatggcctgtgtgttctcagaaggagtctgggtggggacttggtttcacaatgggattttcctctcaggcgcctctggtatgaaaagactcctttcccagggtggtcctgcctggcttcctccctgccctgcaggctgagtgtctggaggtggactggcctgcactctgccagggggctgggcacctgtgtccttaggagcttgagtcctttgccctgcaagggattcacctgtcttgctgctggtggctgctgtctgcaggggtcctgctccagctctgggaagtgaacagggttccctcctgtcctcacaggggtgcatgctgaggacacctaccgagctcagctgctttgtgctttcagaggggcctgagccatgggggtagggctgggtctgcaagcactggtctgatgtccacactgcagcatggcctgcttggccaggagtgaccagtcacgcagaccctagtgcagggaactgcttagagatctgccttcctaacctaccctcctgtcacaagggccatgggctctactctggggagagacactgaggccaccgccccaaattaaggccatggcaagtggtgctggccgtgagaggcccagggaggatggaggcgtctgagtgcatggcaaagtgagtcccagcagtgctcccgagaaagaaagaggaggtgggagcctggaggtgcaggagggcaatgcccacccggggggggggtggaccatgcttcccagaggccagggccccacccaaccccaggagaggagtcccagggatccccgaagcaggctgagggcttggggatggggaaggggccaaggcatcttcctgatgattgggctgtgagggaacacctagggggtggatgggggcattggtctggctgtgcaggcccagggctggctggaggcaggatatgtgtgcagtgagtgtcctgagcgaggggctggggaggcagagggttggggagctggggaggggggtacaggtaggaagcggcttgccaggcttccctccaggagagagttggacaagggcggggtgtggacccccatgctctgcttgtttcaataggcatcacgtccccagggacagccacccagagctgaggtggaggctgagggggtggtcagggtcttcctgctgtctctgaagaccccctggggacacgtgcttgtcctcctctgccctatgtccccttgtcgctcttccctcctctgttgtcccaggtcgtgcccatgtgtgcgatcatgtgcccttcaacagactatgccctgggcatgatgaggggtgggactgggggagcacgaggcaggtcctggctttaaggaggcattgggatgtggtccccaccctgatcagggccccacatccactggttcacccttcctcctctaacaccccacagctgccagtgccatgtgcccccctcttccctgtggtgccttgagccaggacgtggcaacgtcccaggtggcgaaagccagatttcctgtgtggcacccgcagttctgaatcagctgctcccagggtgctttcttcctcttctccagtggaaataggacccctgacctgcctgggaaccaccatttgtgtctccttgtgacttatccatgatgcctgttggagagtgtggccctgtccttgctgcgtagccatccactctgagacctggctgcccctctggccactgcacgtgctgtgtggtcatcttggccactgcttggctgtgtcagcctggtctgtgctctggaagttcacggagaggagcagcggtagcctatggtgttctgcctctgagtgtgtcagagcaggagagggagcagccctggcttccccagcctctcctgccaggcccacctcagaggatgaacacagcagctgtgggaatgctgagcgggaactcatctgcctggggacctgtcagataatgatcctgtttcatgaaggtgagctgcctcacaggcagacacctgtgtggttaagtcccgtgttatccaaactgtgggctgtgtggtttcaggatgggaccttctcttcagggtcatggaggcccctgaggccctgtccccactgtctgctgttacttgccatgagggtttctgccctgggcagggccctggctgccaccccggccttaacatagacagtgagtcccccttggggatggcttttcctggctgtacctaagccttggcgtgaaggtcttagggctgatctcatgactggtcttgaggtgcccaagccaggggcccaggagctccctgtctcaggcaggggttcacgtgctgcctgcctgttccctagtcacatggtgacattccaccctcttctgtcacatctctgtcagcataaggtggccagagcatatctgcctgccagctcccatcactgggctgcagcctcaggggccctggcagcacatgtggagtccctggcccatgtggggctgcccaggagtgggtgggagggaaggcctcctggcgggggctcctggcccagggcttgctccttgagcagccaggtggaaagtgggcagctgaggccccttgacatggaggcctctgggatgcggctcactgaccactgctctgcctttccccttcccggcatctgagggggaccctctcctttcctgtgagtgtgggcagagctgcccctgagggtccgagcgcctctggggagcttcaggaaggctctgggtgctgttggtcatgcagctgagctctctccgtggtcactgacttgatcaggtttgaatataaagtcaggtgaccctcagagctgctccgggggccagggagaccatggtcgctttgtcacagcagacttaacggccgcagcaactcttgctagcctggatgacacagcactgaaaccaagtgccagaagcagattgtggctgtggggaggaggaggaagaagaggaggctctggcaggggtgcagggctggtgggggaggggagccaggtaccctagagaagggaggggccagggggaatgggggtgctggccaggcggggatggagaggcttctgcaggaaggacaggggcttggctgagcagagtgtggccagcctagcgggggacagcctgcatcctggcctcactggtcttgaggtgcccaagccaggggcccaggactttgggcattactaggaaatgatgggaaccctgggtggggtggcgtgaaacaagatgagatggtaagatctgctttcactttaaaggaacatttctggttgttgcttggaaaagaagtgtcggggcaagaatgctacaggagggccggcctggaggacagggcgggactgcagggctggctgtgcgggggcaggagcctgtgcttgcatcagagctgcctgggagaccctggctctggggtggaggcctgagtaagggggcctcgctggggatttggggacctctgtgtgctggtgccttcccgcctccgttcctctcagccctgactggctctgtcttggaaccaggtaactacctttatttgagaacctgctgcaagccctgggctgttctgagagctcaggaatatcgttctgatttctccacccacaaggagccccgggcttcctgagcccttgggacacagcagccccataaactgctgcccctcccaggcccaagtgttccaccccaggctaggggtggggctggggctgcaccttggaatctaccctccaccggggttgtggtggggccctccgtgcagcctcagtgggaacgtgcctgtcacctgaggctcaggtggcgtgaccctgacctttgctctccccctccttcccacaggtcctgcacctcagctgcggagagggatggcagtggtgagtgagaggctgccgcgcaggaacagactccctcccgactccgcacaccccttggtggctcaggagagtctaggctggggcacaagtgggccttggggtgacgtcggagcccgggctcctccctatgtccagggcacctgccctgtcgctctgggctctgacatactcgcaagtgtctggggagacgccctgctcctttttcatggcctcctggtggacctaggcctttgttaaggagactgccgtcctggcctcatgaggaggcttagccagggggatgcagcactccaggtggaagagccgcggtgtagacaggagggtgggcttggggatgggaaccatggggcagtgcagtgccagggccaggctggcaaggccactatgcttggagccctcctgagggcaggggccctgggctattggtgtgtgggtgctgggggtgggtgtttggagctgtgctcaggccgtgcattcgctattccaggcacgaataagcgggacaagcaataccaggcccactgggccttcggggaccgcaggaatggtgtcatcagtgcccgcacctacttctacgccaatgaggccaagtgcgacagccacatggagacattcttgcgctgcatcgaagcctcaggtggggccccctctttgctggctatacccctgccatgtcccagcctgagcggacccctgggctcatggaggtgccggtgggtgaacactaagctggggcaggagccagagggctgggttctgaccacacttgggtccctcactgttcagccccttcctgaggggccccactgcctcccagaaggcatctcctctcctgccccagctccctgttccctgatcccgcctcatgccccccacccttctccctggctcagggccaggatcgggagctgcaggaagttggtccatgtcagctgccgagccacacttagcccagggtggaggttccattcagggagctggtgccgcatcttctgtccttccctgacacagcctctgggggccagcggtgggggcagcaggtgtttccagggatagagaagccagaggtcagcaaggcccaatgtccttcagtgttagaaacatccgacctgcacagccccatgctggccccagcagccctccgtcaggggcagcgggtcccaggcctgtttatgtttttgtttgtttgcttcaaatgagactggatcttgctctgtcacccaggctggagtgctcacgcctctaatcccagcaatttgggaggccaaggcgggtggattgcctgagctcagttcaagaccagcctgggcaacatggtgaaactccgtctccactaaaatacaaaaaattagccgggcgtggcagcaggcgcttgtaatcccagctacttgggaggctgagacaggagaatcacttgaatccaggaggcggaggttgcagtgagccaagattgcgccactgcactccagcctgggcgacagagtgagactccatctcaaaaaaaaaaaaaaaaaatgaggtctcactatgttgccctggttggcctggaactcctgggctcaagtgatccctccaccttggcctcccaaagtgctgggattacaggcacacactaccacacccagctaattttcatattttttgtagagatggtgtttcaccatgttgcccaggctggtctcaaactcctggcctcaagcgaaccttacactttggcctcccaaagtgctgggattataggtgcatgccgctgcacctggcacttctgagcagtgcttggaagccgcctcctgatgggggctgagggtcagagtggccagctgaatgctgggccatcagggtgaggggcgtcttctcctcgtccattgcctgttctcccagggcaggtggaaggggaaggccctgcattggggtggcgtgaaacaagatgagatggtaagatctgctttcactttaaaggaacatttctggttgttgcttggaaagaagtgtcaggggcaagaatgctgcaggagggctggcctggaggacagggtgggactgcgggctggctgcacgggggcaggagcctgcgcttgcgtcagaggttcctgagagactcggtctctggggcagaggcctgagcaaggggacctcgctggggtgtctctgtcttagccacgctcggtgtttctgggtcctgtgacccacgtgtgagcagcctgtggtgctggtggcacagggaaggaaaccgaggcagggagcctgtgggggctgcttggcaggggacaggcagctcctgtgcccactgctgtcccacacctgcatggaaacagaaaccccgccacggagccccctcccatctccacagggcctctagagcgccatgtgcaaggacttcatgggcggggtggggtggggtcaggagcctgctgtgggctggccaggccctggccctccctgtcgcaccctgcgctgcctccatgcacctctcagggctgtcatggcttttcctgtggcttctgacaggtagagtcagcgatgacggcttcatagccattaagctcacagcactggggagaccccagtttctggtaagtgctagaaccttccacctgcagagtctggtgctgtgcgagatctcagggcagctgtgggcatccaccaaaaacacaggtgcccatgccttagaggcctgagctggccacaggggctgtgtgggggactggggtgggcaggggcgtgtgcagatggcattcaggcctgcgtttgcagctgcagttctcagaggtgctggccaagtggaggtgcttctttcaccaaatggctgtggagcaagggcaggcgggcctggctgccatggacaccaagctggaggtggcggtgctgcaggtggggcagccttccccttccccactcctgtggcttgtgagggggtgggcaccgtggggtcacacggggcatggtgggcagtggtcggaggtggttttgggaactcacccagggcatgtggctcactctgcagctgctggggttggcctggtggggaggaggaggtcagagggactctgaacagagaggggagatgctggcaggagggctggagacccagccctgcagggcgtgggcgtgcatcagcagcggggtgggaatagacctgtctatgcagtagaaacaaaccagacatggatcctgttcttactaacgatgtaataaagccagaaacagcaccagaggccaatgggtggggggaaggataaaatatgagtgaatggggctgatccaggccttctcacttctcaaggaaagtgtcgcaaagttgggcatcgcatccagggctgagattgaggactggttcacggcagagaccctgggagtgtctgggtgagagcagcccccaggctgagaggacacgagcatcagccatggttccagccaagccccagtgacgtctcccagtcctggctgccctgcctgagagggtgggccctgggatgacagtgctgaaggaactgcttttcacacagcaggacttgatggcttcaggagtccctgaggctggggctgggctgggcaggggagacacagggccagcacagaccccatagagggctctttatagaattatctgggtccagagcaaaggtggcactctcagccctccctggagtccacgccggcaggtgaaggatcagagccccatgccccatccttggagccaggggctgggacccagatcaccaggagcctccagttgaagtggggaggtgactggggtggtgcagtagtgagccatcccctcacacactgccagccttgcccactgtgtcctccctggccgcccggagctgtgtccgcctcctgcctggctgcctgtgctcggcccctccacaagcccaaaacagcctagggtactcagtgttttcagagccgcctagatgcaggactgtttgtgttttggttttaaatttatttaattaatttattttttatagagaccaggtctcaccatgttgcccaggctggtttcaaacccctgggctcaagtgacctgcccgccgcagcccccaaagtgctgggattataagtttgagcccccgcatgccactggttttaaatttttaaacagaaaacaatatttatatttcctctgtcttttaaaactgaacaccgaggtgggttttgtggtgggtggtgaacggacaggtttgggcctcgatcccccacccgaccctagcacccacaggtgggggtgccccctctgctgatgcgcctcctccctcagcaccatggacctgctggactggagcagcctcatcgacagcaggaccaagctgtccaagcacttggtagtccccaacgcacaggtaacacctccgctcctcagtgaggcccagctcagcagggcgctgcgctaagaagggaattcagcctgccacgtgtgtctcttgttgcctaccctgggaacttaacatgaccaaaatcactgcacactatggccccacagaccccctgtggtccagggggaagaagacaagcccactagtgtccacagagtgcttggcgggacagagacccacgcggagccttaagacaccacaaggagagggggtctgggggccttccccaagtcatctgtcttgtgcatcaggtcaccccaaacttcagaggcctgaaacggcagcagccactctgcttctgcctcatggttctggggttgacagggctcagctgggcagtcctcccctggggtctcctgggtagctgtactcacagagtggtggcgctgggacctgggggaggcacccattcacatgtctgggagttggtgctggctgtggcttgggctttttcccaacatggcagctgggctctaagggccagtgtcacctgagacgtgagagccaggcagaagctgggtgaccttttcctgcctcgcctcagaagtcacacggtgtcttttctggcaagttctgtttgttagaagcatgtcaccaggccagcctgtatacagcggggagaggaatgagactcatctgcctgtgggaggggggcccaggacctggcagactgcttgaaaccacagcttaaactgggattcaaagaaagaacagaagcaccttcagaaaacatcctgcagaggcagctttccatgacacatctagccccagtccactaagggcccagcctcaaacttagagcccccgacccagagcctcggggcgcagtgcgtacagtgtggctgtgcaccaaggccaccagctgttggagactttagcatggtgtagcaagggatagagtggtactgtttgtgcccagtgaggcaaggctgctggggccagcaaaggggtgagcgggaggccctgcgggatgggtccccacggcctctgagcaccagcaacttgaaggcctcatcctggtggttgccctggtccctggctacgtgtcagcacgtgctgcacaactgccctgtctgcctgtagccaggggtcttcctcctgggccctctgcctgctccgggtggagcccttctgtttgacgattgggtgatcagtgttcacttgttcaatgtcacatgggagttgcagggggctctcccacaacggtggggcctctgtgggaactggggagtacacacttcggagtgcaggcctggactgagcctggggcccactgacatgggcactgagctccctcgtggtacccctaggccccgcatagggcagtgcactggctgcgttggaggttcaggggcactgtgctgcttgtccaggtggccctccctcccagccctgcacagacgggtgagagggttcctgtgggctgggaatactgagagaggtttagcctgggcctcagggtggcactttcccgcccttgctgtggcctgaccgcgtgttgcacccccagacaggacagctggagcccctgctgtcccggttcactgaggaggaggagctacagatgaccaggatgctacagcggatggatgtcctggccaaggtgagctgtcccgctcgggcagagggtacctgggactcgtggagaagagggcacctgcctcacttgagcaacagttgctcccactctcccaccccctgcgcctctcagaaagccacagagatgggcgtgcggctgatggtggatgccgagcagacctacttccagccggccatcagccgcctgacgctggagatgcagcggaagttcaatgtggagaagccgctcatcttcaacacataccagtgctacctcaaggcaagcccccgctcagcccctccctgcctgccctggggcttggagaccccacaggaggggctcctctcatctgagctccctggcatttggctggttttacactcagcacccaccagggagctcatgggatggaggagggagtgggccgtgcccccaaggggttgttggggtcttctgcagcacagctcacccagcgggccccagggtccaggaaagagccccttaggtggtggccacagccaggcctgcagaggaggctgaggccagggtgactgcctcagagtagcaagaaagacccgctgcccgcaacctctcccctggttctcagaaccagccaagagtgtctaaggagcaggaggaagacaacaatctttatgagggtccactagatgtacccgacaccccaaacttggaaggtgtcacatgaccatttcctccagcgtgttttcagttcagcgcccctaagaacctcctgaaagctttgggccctccccggaaagactcacccaggatgtcacatgtattcagggagcccaccctagcctttgggccccaaactgctcagggatgttagcaggtccagagctctcaggggtgagccggatgcccagaggacacagggtggcatggggaggggtccaggcaggagcatgcagtatgcacccctcccggtcggcctgggagtctggagcacatgatggctgctggcgcctgggctgcacccacagggccgtccacaggccacacaggaagttgcagacgtccccactgccattgctccttggggacagaggttggaggcccatcctcacccacacctgctccaggtgccctgagctgcacctccccaggcagctgctgcccagccctggtgactgcacctgggcccaggaaggccccatcctgctgtcacttgggcttgcccaggctccctgtgacttttggccctggccccacaggatgcctatgacaatgtgaccctggacgtggagctggctcgccgtgagggctggtgttttggggccaagctggtgcggggcgcatacctggcccaggagcgagcccgtgcggcagagatcggctatgaggaccccatcaaccccacgtacgaggccaccaacgccatgtaccacaggtgcgcagctctcccacccctctgtcttctcagggcagggcgccaagaaaccaggcctgagggagaggcttggagactgaacttgtcagccacatgtgtccccaggtcagaactggtatttcctcagcttttatgtcatgtgttactttttcaaaagcattaaggttattcttttataaatatagaaaagcctattgaacaaagcaaaattggccacagttccctgagcttgctcctgcagacacttagatccagagatgtgcatgaacacccggtcctccccaccctgcaggctcagcctgtttgcttttcagttcacacagtgggatcgcccatcagctgttctgcacctgcttttactgctctagtttcttggtgatcttttcatgtagcacaggctggccaaccatgggcttttcctcttagaggcgtgtgtgcatgctgcaaattcagagagaccccaagtgtctcctggttggctccagctcccctcctgcagccgctgtgcatgtcgtgccacagcgcacacatctccgccattgttttttgcgttgtagcgtgtcctctgcccgatgtgtttttcatttcgcgttccatctgggtcctcttgtgtgggcttgcagagtggtgctgtcaacagccagcatggagtgcccggggctatgtgtccagcatctttgatcttattggtttttagtctggttattgtaatggactcgctggacataccgtcaccctctgtggtacacacgggccgtcaggggttttgtgtctgaggatgcagctgtcctaggttgctggaaatggaattgctgggtcagagagaacgtgcgtgtggtcaagcctgctgagtgacctcgctgcaggagggccgtactgctcgggcttcctggtgcaccgggatgcccacccccactgtgccctacagggacctgcttcccttttatttccttgcagggccaggggtgcactgtacgatccctccccagaagcaaagctgtgtctgtcatgaggctcatgggcatgtttgggctggtccccagagtcacagcacgtttgatgcagggactctgcccccacagctggttctgcgtgaattgtctggtcccagacatcgcttttgcttggttgctggtctttctttttcatgaggtgctgggaggggcagatgctgctcctgttcctcctgatcctgtggatacccttggaaagagccagctcaatggatggatctgggtctgccctcggcctcctctctgtgcagctggtaatgagaggtgcaggcagccacaggcctggaactgggctcacatggcactctccacaggtgcctggactacgtgttggaggagctgaagcacaacgccaaggccaaggtgatggtggcctcccacaatgaggacacagtgcgctttgcactgcgcaggtaggtgtgccccaccctgcaccgaaaccccaacctgagccgttgtctcctccggctggggagaggtggcagcagcgcagagctcagggtgggcagagcgacctgctgggtggtcgggcatttgtggggaaaggctggtgaaatgagctggagggtggcttcagtgggcaggcccaggcccgctggcgttctggacatcggactgtgagagcacaatggctttttgcagttacgttggtttttaaaattaacttttttctttttttgagatagaatctcgctctgtcacctatgctggagtgcagtggcgtggtctcggctcactgcaacctccgcttcccaagttcaagcaattcttcatgcctcagcctcccaagtagctgggattacaggcatgtgccaccacgcctggctaatgttttgtatttttagcagagacagggtttcaccgtgttggccagactggtctcaaactcctggcctcaagtgatcctcccttcttggcctcccaaagtgctgggattacaagcatcagccactgtacccagacttttaaaaattaacatctgacttattaaacttcacaattaaaaaactaaatttcatcagggtattcggatggctcctgaaaggtacaaatgcagtgttggaggccagtccctcaggaggcctccacagtgccacctcattaatacgcccttaacattttaactacatctggaatgtaacggtttgttttctctttaaacatttgtcccatggagcacaacttcggtagaattctaacaagtcaaatgcagaagttaggtgaagtcagttcttggatactcctgtactgtcaccctggtcttatctcatgccttagtccaagctatgcacacaatggggtcctaggtccccctcccctcccagattccgccttcccagggatgggaccccctagaaccctcgggggcctgggcagtggcctcgctggctctcgccttcctaggagctgagcaggagctccactctcagcagggcagggtgccccagatccagggcttgtggcacgagggggctccccaagaagctgtgaagccacagggccaggcttggggccagggctgcagccaacaggacacatcctggtgctgctcgggagctgactcacggctctgaaatcattcagtgatgtccacattcagcctttgtttacgatgctgctactttttcatggcctgaaattgcagcacacccatttttgtgccctgatcctctgctaattgtcatagatgtgtcggtgatgggacagactcactttctccacacgcacaggcctggtggccagcactgcccagcactcgggagctggtgggggttcctctcagcttgtaatcaggactcccagcctctgggtggactctcaatgctggtggactcacagcctgactagacacatcaccatccaactccgaaaggacagcctgccctcagcagggcttcctctctccagcttccgcccggcacctgtctgtccctactatcttgctgtggcagtggcttccccagtggacacagcttccccctcccctgagtggcagccgggctctctcctcttggccccaagggccctgtgccaggctcccccagtaccacgctcacatccctgcctgagaggctggacccctgcaggcttcagctctgcccctgctgtgggtggttggggagctctggggagctggggtcccctcccatgggtaagtggttctagactatggcagctgctctgtcctgtgctgggcccagactgccacaccacccaccctcaaacaatcggagttggctttggccaaggaacaaaccagccccaaacttagaggctggaacagtggcatgttctgtaggccaggggtgggctggctcagctgatgcttctgctgctggctgtgcctgtgtccctcctgcgtctgtgatctggggccggtggggcctaatgagctcattcatggctggggcagtaaaggagactgcatcccgggtccagcgtcccacaggccagcccaggcttgagcacgtggtgggctcaggcttccagaaggcctggagagggcaagcctctgcttgtgtcacctttggtacctccctgctggccaaagtgcctcacgaggccaagcccagatgccaggtggagtgagccactgtcctgtgctgggaggagccgcagtcacatggcagaggctgtgcacaccagcaggggagggggcagccagcagtggcacccggctctcgggttcatgtcctggggttgaggaagacacaagatggaagccagggcgatgtggcagagatgggtgcctgctttagactgggtggtcccgggtgatgcgtgagcagcaggcggaactcaccccagggtggggaccccagtgctttgcagaccagcgaagtcgggatacctggatatagtaagctggagatgaaacttgagaactgccactgcgtggatatttcagaccctgagaatctttgtaagacgctatacggggtggtgtgaagacaggacagagtggaggccccaccccagtatctgagcagtgctaatagatatataatgcaagccacatctgtaatttaaaatttagtagctacgttaaaggaaaaagataaaatgaatttcaagaataattttaattaacccaaaatattcaaaatattacttcaaattgtattccagttgcttttagaaaagcaacgcggcatcgtgcattatttttctacaaagtctcctaaatcccgtgtgtatttgacatttgcaacacatctcgattcagagcagccgccttccgaggactcgggggctggtggcagctgtgtgggacacagcagctgtggggatggggcagggcagcagcccacagagggcgagggcaggggccggagaccagtcataccacagaaccctggaggggcttgaggaagggatggcaggagagctgaggagcttctctgccctgtggggcaggctgctgggtgggtcagggcccgaggaagggctgcacctccaagaagggagctagaggagaggtgagagaggagaggggagggaaagcaggtgggaggccttgttggccaagggctgaggcctccccagggagacgagtagggcagcccagcagagtcctgctgggaagaggcctcactggggcagggccaggcagagcccataccccagccccaccttgcaggggatgaagtctggagagtgcagatggggcacctgggatggcaggacaggctcagagctgggacaggagccctgtatccctgcactggggacagtgtcctggaactggccctcagttcctggcttcacctgcacaggatggaggagctgggcctgcatcctgctgaccaccgggtgtactttggacagctgctaggcatgtgtgaccagatcagcttcccgctgggtgagtggggccctccctggtgcgatggggtacggtgctgggcctgggcctcatggtgtatctgcccccatgcaggccaggccggctaccccgtgtacaagtacgtgccctatggccccgtgatggaggtgctgccctacttgtcccgccgtgccctggagaacagcagcctcatgaagggcacccatcgggagcggcagctgctgtggctggagctcttgaggcggctccgaactggcaacctcttccatcgccctgcctagcacccgccagcacacccttagcctccagcaccccccgcccccgcccaggccatcaccacagctgcagccaaccccatcctcacacagattcaccttttttcaccccacacttgcagagctgctggaggtgaggtcaggtgcctcccagccctgcccagagtatgggcactcaggtgtgggccgaacctgatacctgcctgggacagccactggaaacttttgggaactctcctcgaatgtgtgggcccaaggcccccacctctgtgacccccatgtccttggacctagaggattgtccaccttctgccaaggccagcccacacagcccgagccccttggggagcagtggccgggctggggaggcctgcctggtcaataaaccactgttcctgca

SEQ ID NO: 13569 - DNA, 2034 bp, Homo sapiens
cgtcccgccatggctctgaggcgcgccctgcccgcgctgcgcccctgcattccccgcttcgtcccgctgtccacggcgccggcctcccgcgagcagcccgcagcgggcccagcggccgtgccaggaggaaacttctaggacagaggctattcaacaagctcatgaagatgaccttctatgggcattttgtagccggggaggaccaggagtccatccagcccctgcttcggcactacagggccttcggtgtcagcgccatcctggactatggagtggaggaggacctgagccccgaggaggcagagcacaaggagatggagtcctgcacctcagctgcggagagggatggcagtggcacgaataagcgggacaagcaataccaggcccactgggccttcggggaccgcaggaatggtgtcatcagtgcccgcacctacttctacgccaatgaggccaagtgcgacagccacatggagacattcttgcgctgcatcgaagcctcaggtagagtcagcgatgacggcttcatagccattaagctcacagcactggggagaccccagtttctgctgcagttctcagaggtgctggccaagtggaggtgcttctttcaccaaatggctgtggagcaagggcaggcgggcctggctgccatggacaccaagctggaggtggcggtgctgcaggaaagtgtcgcaaagttgggcatcgcatccagggctgagattgaggactggttcacggcagagaccctgggagtgtctggcaccatggacctgctggactggagcagcctcatcgacagcaggaccaagctgtccaagcacttggtagtccccaacgcacagacaggacagctggagcccctgctgtcccggttcactgaggaggaggagctacagatgaccaggatgctacagcggatggatgtcctggccaagaaagccacagagatgggcgtgcggctgatggtggatgccgagcagacctacttccagccggccatcagccgcctgacgctggagatgcagcggaagttcaatgtggagaagccgctcatcttcaacacataccagtgctacctcaaggatgcctatgacaatgtgaccctggacgtggagctggctcgccgtgagggctggtgttttggggccaagctggtgcggggcgcatacctggcccaggagcgagcccgtgcggcagagatcggctatgaggaccccatcaaccccacgtacgaggccaccaacgccatgtaccacaggtgcctggactacgtgttggaggagctgaagcacaacgccaaggccaaggtgatggtggcctcccacaatgaggacacagtgcgctttgcactgcgcaggatggaggagctgggcctgcatcctgctgaccaccgggtgtactttggacagctgctaggcatgtgtgaccagatcagcttcccgctgggccaggccggctaccccgtgtacaagtacgtgccctatggccccgtgatggaggtgctgccctacttgtcccgccgtgccctggagaacagcagcctcatgaagggcacccatcgggagcggcagctgctgtggctggagctcttgaggcggctccgaactggcaacctcttccatcgccctgcctagcacccgccagcacacccttagcctccagcaccccccgcccccgcccaggccatcaccacagctgcagccaaccccatcctcacacagattcaccttttttcaccccacacttgcagagctgctggaggtgaggtcaggtgcctcccagccctgcccagagtatgggcactcaggtgtgggccgaacctgatacctgcctgggacagccactggaaacttttgggaactctcctcgaatgtgtgggcccaaggcccccacctctgtgacccccatgtccttggacctagaggattgtccaccttctgccaaggccagcccacacagcccgagccccttggggagcagtggccgggctggggaggcctgcctggtcaataaaccactgttcctgca

SEQ ID NO: 13570 - DNA, 11221 bp, Homo sapiens
ctcctggcctcaagcgaaccttacactttggcctcccaaagtgctgggattataggtgcatgccgctgcacctggcacttctgagcagtgcttggaagccgcctcctgatgggggctgagggtcagagtggccagctgaatgctgggccatcagggtgaggggcgtcttctcctcgtccattgcctgttctcccagggcaggtggaaggggaaggccctgcattggggtggcgtgaaacaagatgagatggtaagatctgctttcactttaaaggaacatttctggttgttgcttggaaagaagtgtcaggggcaagaatgctgcaggagggctggcctggaggacagggtgggactgcgggctggctgcacgggggcaggagcctgcgcttgcgtcagaggttcctgagagactcggtctctggggcagaggcctgagcaaggggacctcgctggggtgtctctgtcttagccacgctcggtgtttctgggtcctgtgacccacgtgtgagcagcctgtggtgctggtggcacagggaaggaaaccgaggcagggagcctgtgggggctgcttggcaggggacaggcagctcctgtgcccactgctgtcccacacctgcatggaaacagaaaccccgccacggagccccctcccatctccacagggcctctagagcgccatgtgcaaggacttcatgggcggggtggggtggggtcaggagcctgctgtgggctggccaggccctggccctccctgtcgcaccctgcgctgcctccatgcacctctcagggctgtcatggcttttcctgtggcttctgacaggtagagtcagcgatgacggcttcatagccattaagctcacagcactggggagaccccagtttctggtaagtgctagaaccttccacctgcagagtctggtgctgtgcgagatctcagggcagctgtgggcatccaccaaaaacacaggtgcccatgccttagaggcctgagctggccacaggggctgtgtgggggactggggtgggcaggggcgtgtgcagatggcattcaggcctgcgtttgcagctgcagttctcagaggtgctggccaagtggaggtgcttctttcaccaaatggctgtggagcaagggcaggcgggcctggctgccatggacaccaagctggaggtggcggtgctgcaggtggggcagccttccccttccccactcctgtggcttgtgagggggtgggcaccgtggggtcacacggggcatggtgggcagtggtcggaggtggttttgggaactcacccagggcatgtggctcactctgcagctgctggggttggcctggtggggaggaggaggtcagagggactctgaacagagaggggagatgctggcaggagggctggagacccagccctgcagggcgtgggcgtgcatcagcagcggggtgggaatagacctgtctatgcagtagaaacaaaccagacatggatcctgttcttactaacgatgtaataaagccagaaacagcaccagaggccaatgggtggggggaaggataaaatatgagtgaatggggctgatccaggccttctcacttctcaaggaaagtgtcgcaaagttgggcatcgcatccagggctgagattgaggactggttcacggcagagaccctgggagtgtctgggtgagagcagcccccaggctgagaggacacgagcatcagccatggttccagccaagccccagtgacgtctcccagtcctggctgccctgcctgagagggtgggccctgggatgacagtgctgaaggaactgcttttcacacagcaggacttgatggcttcaggagtccctgaggctggggctgggctgggcaggggagacacagggccagcacagaccccatagagggctctttatagaattatctgggtccagagcaaaggtggcactctcagccctccctggagtccacgccggcaggtgaaggatcagagccccatgccccatccttggagccaggggctgggacccagatcaccaggagcctccagttgaagtggggaggtgactggggtggtgcagtagtgagccatcccctcacacactgccagccttgcccactgtgtcctccctggccgcccggagctgtgtccgcctcctgcctggctgcctgtgctcggcccctccacaagcccaaaacagcctagggtactcagtgttttcagagccgcctagatgcaggactgtttgtgttttggttttaaatttatttaattaatttattttttatagagaccaggtctcaccatgttgcccaggctggtttcaaacccctgggctcaagtgacctgcccgccgcagcccccaaagtgctgggattataagtttgagcccccgcatgccactggttttaaatttttaaacagaaaacaatatttatatttcctctgtcttttaaaactgaacaccgaggtgggttttgtggtgggtggtgaacggacaggtttgggcctcgatcccccacccgaccctagcacccacaggtgggggtgccccctctgctgatgcgcctcctccctcagcaccatggacctgctggactggagcagcctcatcgacagcaggaccaagctgtccaagcacttggtagtccccaacgcacaggtaacacctccgctcctcagtgaggcccagctcagcagggcgctgcgctaagaagggaattcagcctgccacgtgtgtctcttgttgcctaccctgggaacttaacatgaccaaaatcactgcacactatggccccacagaccccctgtggtccagggggaagaagacaagcccactagtgtccacagagtgcttggcgggacagagacccacgcggagccttaagacaccacaaggagagggggtctgggggccttccccaagtcatctgtcttgtgcatcaggtcaccccaaacttcagaggcctgaaacggcagcagccactctgcttctgcctcatggttctggggttgacagggctcagctgggcagtcctcccctggggtctcctgggtagctgtactcacagagtggtggcgctgggacctgggggaggcacccattcacatgtctgggagttggtgctggctgtggcttgggctttttcccaacatggcagctgggctctaagggccagtgtcacctgagacgtgagagccaggcagaagctgggtgaccttttcctgcctcgcctcagaagtcacacggtgtcttttctggcaagttctgtttgttagaagcatgtcaccaggccagcctgtatacagcggggagaggaatgagactcatctgcctgtgggaggggggcccaggacctggcagactgcttgaaaccacagcttaaactgggattcaaagaaagaacagaagcaccttcagaaaacatcctgcagaggcagctttccatgacacatctagccccagtccactaagggcccagcctcaaacttagagcccccgacccagagcctcggggcgcagtgcgtacagtgtggctgtgcaccaaggccaccagctgttggagactttagcatggtgtagcaagggatagagtggtactgtttgtgcccagtgaggcaaggctgctggggccagcaaaggggtgagcgggaggccctgcgggatgggtccccacggcctctgagcaccagcaacttgaaggcctcatcctggtggttgccctggtccctggctacgtgtcagcacgtgctgcacaactgccctgtctgcctgtagccaggggtcttcctcctgggccctctgcctgctccgggtggagcccttctgtttgacgattgggtgatcagtgttcacttgttcaatgtcacatgggagttgcagggggctctcccacaacggtggggcctctgtgggaactggggagtacacacttcggagtgcaggcctggactgagcctggggcccactgacatgggcactgagctccctcgtggtacccctaggccccgcatagggcagtgcactggctgcgttggaggttcaggggcactgtgctgcttgtccaggtggccctccctcccagccctgcacagacgggtgagagggttcctgtgggctgggaatactgagagaggtttagcctgggcctcagggtggcactttcccgcccttgctgtggcctgaccgcgtgttgcacccccagacaggacagctggagcccctgctgtcccggttcactgaggaggaggagctacagatgaccaggatgctacagcggatggatgtcctggccaaggtgagctgtcccgctcgggcagagggtacctgggactcgtggagaagagggcacctgcctcacttgagcaacagttgctcccactctcccaccccctgcgcctctcagaaagccacagagatgggcgtgcggctgatggtggatgccgagcagacctacttccagccggccatcagccgcctgacgctggagatgcagcggaagttcaatgtggagaagccgctcatcttcaacacataccagtgctacctcaaggcaagcccccgctcagcccctccctgcctgccctggggcttggagaccccacaggaggggctcctctcatctgagctccctggcatttggctggttttacactcagcacccaccagggagctcatgggatggaggagggagtgggccgtgcccccaaggggttgttggggtcttctgcagcacagctcacccagcgggccccagggtccaggaaagagccccttaggtggtggccacagccaggcctgcagaggaggctgaggccagggtgactgcctcagagtagcaagaaagacccgctgcccgcaacctctcccctggttctcagaaccagccaagagtgtctaaggagcaggaggaagacaacaatctttatgagggtccactagatgtacccgacaccccaaacttggaaggtgtcacatgaccatttcctccagcgtgttttcagttcagcgcccctaagaacctcctgaaagctttgggccctccccggaaagactcacccaggatgtcacatgtattcagggagcccaccctagcctttgggccccaaactgctcagggatgttagcaggtccagagctctcaggggtgagccggatgcccagaggacacagggtggcatggggaggggtccaggcaggagcatgcagtatgcacccctcccggtcggcctgggagtctggagcacatgatggctgctggcgcctgggctgcacccacagggccgtccacaggccacacaggaagttgcagacgtccccactgccattgctccttggggacagaggttggaggcccatcctcacccacacctgctccaggtgccctgagctgcacctccccaggcagctgctgcccagccctggtgactgcacctgggcccaggaaggccccatcctgctgtcacttgggcttgcccaggctccctgtgacttttggccctggccccacaggatgcctatgacaatgtgaccctggacgtggagctggctcgccgtgagggctggtgttttggggccaagctggtgcggggcgcatacctggcccaggagcgagcccgtgcggcagagatcggctatgaggaccccatcaaccccacgtacgaggccaccaacgccatgtaccacaggtgcgcagctctcccacccctctgtcttctcagggcagggcgccaagaaaccaggcctgagggagaggcttggagactgaacttgtcagccacatgtgtccccaggtcagaactggtatttcctcagcttttatgtcatgtgttactttttcaaaagcattaaggttattcttttataaatatagaaaagcctattgaacaaagcaaaattggccacagttccctgagcttgctcctgcagacacttagatccagagatgtgcatgaacacccggtcctccccaccctgcaggctcagcctgtttgcttttcagttcacacagtgggatcgcccatcagctgttctgcacctgcttttactgctctagtttcttggtgatcttttcatgtagcacaggctggccaaccatgggcttttcctcttagaggcgtgtgtgcatgctgcaaattcagagagaccccaagtgtctcctggttggctccagctcccctcctgcagccgctgtgcatgtcgtgccacagcgcacacatctccgccattgttttttgcgttgtagcgtgtcctctgcccgatgtgtttttcatttcgcgttccatctgggtcctcttgtgtgggcttgcagagtggtgctgtcaacagccagcatggagtgcccggggctatgtgtccagcatctttgatcttattggtttttagtctggttattgtaatggactcgctggacataccgtcaccctctgtggtacacacgggccgtcaggggttttgtgtctgaggatgcagctgtcctaggttgctggaaatggaattgctgggtcagagagaacgtgcgtgtggtcaagcctgctgagtgacctcgctgcaggagggccgtactgctcgggcttcctggtgcaccgggatgcccacccccactgtgccctacagggacctgcttcccttttatttccttgcagggccaggggtgcactgtacgatccctccccagaagcaaagctgtgtctgtcatgaggctcatgggcatgtttgggctggtccccagagtcacagcacgtttgatgcagggactctgcccccacagctggttctgcgtgaattgtctggtcccagacatcgcttttgcttggttgctggtctttctttttcatgaggtgctgggaggggcagatgctgctcctgttcctcctgatcctgtggatacccttggaaagagccagctcaatggatggatctgggtctgccctcggcctcctctctgtgcagctggtaatgagaggtgcaggcagccacaggcctggaactgggctcacatggcactctccacaggtgcctggactacgtgttggaggagctgaagcacaacgccaaggccaaggtgatggtggcctcccacaatgaggacacagtgcgctttgcactgcgcaggtaggtgtgccccaccctgcaccgaaaccccaacctgagccgttgtctcctccggctggggagaggtggcagcagcgcagagctcagggtgggcagagcgacctgctgggtggtcgggcatttgtggggaaaggctggtgaaatgagctggagggtggcttcagtgggcaggcccaggcccgctggcgttctggacatcggactgtgagagcacaatggctttttgcagttacgttggtttttaaaattaacttttttctttttttgagatagaatctcgctctgtcacctatgctggagtgcagtggcgtggtctcggctcactgcaacctccgcttcccaagttcaagcaattcttcatgcctcagcctcccaagtagctgggattacaggcatgtgccaccacgcctggctaatgttttgtatttttagcagagacagggtttcaccgtgttggccagactggtctcaaactcctggcctcaagtgatcctcccttcttggcctcccaaagtgctgggattacaagcatcagccactgtacccagacttttaaaaattaacatctgacttattaaacttcacaattaaaaaactaaatttcatcagggtattcggatggctcctgaaaggtacaaatgcagtgttggaggccagtccctcaggaggcctccacagtgccacctcattaatacgcccttaacattttaactacatctggaatgtaacggtttgttttctctttaaacatttgtcccatggagcacaacttcggtagaattctaacaagtcaaatgcagaagttaggtgaagtcagttcttggatactcctgtactgtcaccctggtcttatctcatgccttagtccaagctatgcacacaatggggtcctaggtccccctcccctcccagattccgccttcccagggatgggaccccctagaaccctcgggggcctgggcagtggcctcgctggctctcgccttcctaggagctgagcaggagctccactctcagcagggcagggtgccccagatccagggcttgtggcacgagggggctccccaagaagctgtgaagccacagggccaggcttggggccagggctgcagccaacaggacacatcctggtgctgctcgggagctgactcacggctctgaaatcattcagtgatgtccacattcagcctttgtttacgatgctgctactttttcatggcctgaaattgcagcacacccatttttgtgccctgatcctctgctaattgtcatagatgtgtcggtgatgggacagactcactttctccacacgcacaggcctggtggccagcactgcccagcactcgggagctggtgggggttcctctcagcttgtaatcaggactcccagcctctgggtggactctcaatgctggtggactcacagcctgactagacacatcaccatccaactccgaaaggacagcctgccctcagcagggcttcctctctccagcttccgcccggcacctgtctgtccctactatcttgctgtggcagtggcttccccagtggacacagcttccccctcccctgagtggcagccgggctctctcctcttggccccaagggccctgtgccaggctcccccagtaccacgctcacatccctgcctgagaggctggacccctgcaggcttcagctctgcccctgctgtgggtggttggggagctctggggagctggggtcccctcccatgggtaagtggttctagactatggcagctgctctgtcctgtgctgggcccagactgccacaccacccaccctcaaacaatcggagttggctttggccaaggaacaaaccagccccaaacttagaggctggaacagtggcatgttctgtaggccaggggtgggctggctcagctgatgcttctgctgctggctgtgcctgtgtccctcctgcgtctgtgatctggggccggtggggcctaatgagctcattcatggctggggcagtaaaggagactgcatcccgggtccagcgtcccacaggccagcccaggcttgagcacgtggtgggctcaggcttccagaaggcctggagagggcaagcctctgcttgtgtcacctttggtacctccctgctggccaaagtgcctcacgaggccaagcccagatgccaggtggagtgagccactgtcctgtgctgggaggagccgcagtcacatggcagaggctgtgcacaccagcaggggagggggcagccagcagtggcacccggctctcgggttcatgtcctggggttgaggaagacacaagatggaagccagggcgatgtggcagagatgggtgcctgctttagactgggtggtcccgggtgatgcgtgagcagcaggcggaactcaccccagggtggggaccccagtgctttgcagaccagcgaagtcgggatacctggatatagtaagctggagatgaaacttgagaactgccactgcgtggatatttcagaccctgagaatctttgtaagacgctatacggggtggtgtgaagacaggacagagtggaggccccaccccagtatctgagcagtgctaatagatatataatgcaagccacatctgtaatttaaaatttagtagctacgttaaaggaaaaagataaaatgaatttcaagaataattttaattaacccaaaatattcaaaatattacttcaaattgtattccagttgcttttagaaaagcaacgcggcatcgtgcattatttttctacaaagtctcctaaatcccgtgtgtatttgacatttgcaacacatctcgattcagagcagccgccttccgaggactcgggggctggtggcagctgtgtgggacacagcagctgtggggatggggcagggcagcagcccacagagggcgagggcaggggccggagaccagtcataccacagaaccctggaggggcttgaggaagggatggcaggagagctgaggagcttctctgccctgtggggcaggctgctgggtgggtcagggcccgaggaagggctgcacctccaagaagggagctagaggagaggtgagagaggagaggggagggaaagcaggtgggaggccttgttggccaagggctgaggcctccccagggagacgagtagggcagcccagcagagtcctgctgggaagaggcctcactggggcagggccaggcagagcccataccccagccccaccttgcaggggatgaagtctggagagtgcagatggggcacctgggatggcaggacaggctcagagctgggacaggagccctgtatccctgcactggggacagtgtcctggaactggccctcagttcctggcttcacctgcacaggatggaggagctgggcctgcatcctgctgaccaccgggtgtactttggacagctgctaggcatgtgtgaccagatcagcttcccgctgggtgagtggggccctccctggtgcgatggggtacggtgctgggcctgggcctcatggtgtatctgcccccatgcaggccaggccggctaccccgtgtacaagtacgtgccctatggccccgtgatggaggtgctgccctacttgtcccgccgtgccctggagaacagcagcctcatgaagggcacccatcgggagcggcagctgctgtggctggagctcttgaggcggctccgaactggcaacctcttccatcgccctgcctagcacccgccagcacacccttagcctccagcaccccccgcccccgcccaggccatcaccacagctgcagccaaccccatcctcacacagattcaccttttttcaccccacacttgcagagctgctggaggtgaggtcaggtgcctcccagccctgcccagagtatgggcactcaggtgtgggccgaacctgatacctgcctgggacagccactggaaacttttgggaactctcctcgaatgtgtgggcccaaggcccccacctctgtgacccccatgtccttggacctagaggattgtccaccttctgccaaggccagcccacacagcccgagccccttggggagcagtggccgggctggggaggcctgcctggtcaataaaccactgttcctgc

SEQ ID NO: 13571 - DNA, 2567 bp, Homo sapiens
ctcctggcctcaagcgaaccttacactttggcctcccaaagtgctgggattataggtgcatgccgctgcacctggcacttctgagcagtgcttggaagccgcctcctgatgggggctgagggtcagagtggccagctgaatgctgggccatcagggtgaggggcgtcttctcctcgtccattgcctgttctcccagggcaggtggaaggggaaggccctgcattggggtggcgtgaaacaagatgagatggtaagatctgctttcactttaaaggaacatttctggttgttgcttggaaagaagtgtcaggggcaagaatgctgcaggagggctggcctggaggacagggtgggactgcgggctggctgcacgggggcaggagcctgcgcttgcgtcagaggttcctgagagactcggtctctggggcagaggcctgagcaaggggacctcgctggggtgtctctgtcttagccacgctcggtgtttctgggtcctgtgacccacgtgtgagcagcctgtggtgctggtggcacagggaaggaaaccgaggcagggagcctgtgggggctgcttggcaggggacaggcagctcctgtgcccactgctgtcccacacctgcatggaaacagaaaccccgccacggagccccctcccatctccacagggcctctagagcgccatgtgcaaggacttcatgggcggggtggggtggggtcaggagcctgctgtgggctggccaggccctggccctccctgtcgcaccctgcgctgcctccatgcacctctcagggctgtcatggcttttcctgtggcttctgacaggtagagtcagcgatgacggcttcatagccattaagctcacagcactggggagaccccagtttctggtaagtgctagaaccttccacctgcagagtctggtgctgtgcgagatctcagggcagctgtgggcatccaccaaaaacacaggtgcccatgccttagaggcctgagctggccacaggggctgtgtgggggactggggtgggcaggggcgtgtgcagatggcattcaggcctgcgtttgcagctgcagttctcagaggtgctggccaagtggaggtgcttctttcaccaaatggctgtggagcaagggcaggcgggcctggctgccatggacaccaagctggaggtggcggtgctgcaggaaagtgtcgcaaagttgggcatcgcatccagggctgagattgaggactggttcacggcagagaccctgggagtgtctggcaccatggacctgctggactggagcagcctcatcgacagcaggaccaagctgtccaagcacttggtagtccccaacgcacagacaggacagctggagcccctgctgtcccggttcactgaggaggaggagctacagatgaccaggatgctacagcggatggatgtcctggccaagttgctcccactctcccaccccctgcgcctctcagaaagccacagagatgggcgtgcggctgatggtggatgccgagcagacctacttccagccggccatcagccgcctgacgctggagatgcagcggaagttcaatgtggagaagccgctcatcttcaacacataccagtgctacctcaaggatgcctatgacaatgtgaccctggacgtggagctggctcgccgtgagggctggtgttttggggccaagctggtgcggggcgcatacctggcccaggagcgagcccgtgcggcagagatcggctatgaggaccccatcaaccccacgtacgaggccaccaacgccatgtaccacaggtgcctggactacgtgttggaggagctgaagcacaacgccaaggccaaggtgatggtggcctcccacaatgaggacacagtgcgctttgcactgcgcaggatggaggagctgggcctgcatcctgctgaccaccgggtgtactttggacagctgctaggcatgtgtgaccagatcagcttcccgctgggccaggccggctaccccgtgtacaagtacgtgccctatggccccgtgatggaggtgctgccctacttgtcccgccgtgccctggagaacagcagcctcatgaagggcacccatcgggagcggcagctgctgtggctggagctcttgaggcggctccgaactggcaacctcttccatcgccctgcctagcacccgccagcacacccttagcctccagcaccccccgcccccgcccaggccatcaccacagctgcagccaaccccatcctcacacagattcaccttttttcaccccacacttgcagagctgctggaggtgaggtcaggtgcctcccagccctgcccagagtatgggcactcaggtgtgggccgaacctgatacctgcctgggacagccactggaaacttttgggaactctcctcgaatgtgtgggcccaaggcccccacctctgtgacccccatgtccttggacctagaggattgtccaccttctgccaaggccagcccacacagcccgagccccttggggagcagtggccgggctggggaggcctgcctggtcaataaaccactgttcctgc

SEQ ID NO: 13572 - DNA, 14762 bp, Homo sapiens
cggtgcccgccgtggacttcggcaacgcgcaggaggcgtaccgcagccggcgaacctgggagctggcgcggagcctgctggtgctgcgcttgtgcgcctggcccgcgctgctggcgcgccacgagcaggtgcgcggggtgcaggcgggggcgcgggggcttctgccggtcccgggagcctttacggagcttcctggcctgaaacgggtgcctcccaagcatctcctggagcaagggaagccaggaagggaggcgtttcctgcagtccctctcggacctcgcaaattttcctatttgtcgatgtctaccaactaaaaacaatggtcgttttcatatttacgatatataccacttgtgggaatacagagttatcacttggaatttaaaatggagtattcttcatgttgagacaagagaatcctggtgtagggctcatagcctggaaccccggaattcaaaccccgggacccagcagcttcccagacacggccactctgagaacactgttggggaaaaatgggaagcccctcaaacgcccagctttgaactcacccatggtagctttaaaaagtgtcagggcttttggtggcggtggtggggggcaacaagcagaacactgttttagccgcatcagcctaggggtactagagatgacggttatctccaggtgaccctgggaagagtttgcaaggttccgctttttggcgccagggtatctggtggtgttgatttctcaggtgagactgtacagaggtcgggggctgcacccctggcctcaacaggaggcgggggaaggcgggggacggtgtcagatgagaagcaccgagccacagttgagcttaggtgaggcctcggcgggtgcgaggtgagggcagggatccacgaactcagagtcagatgctgttggcccgaatcccatggggagcgccaaggtcagcctaggacccgtggtggcgggagtgcggaggatggtggaggaagaaggagctgaactggacagatggagggctctgggagggcattgctgtgtgtgcacacaaggatgtcttaaggtcaagttttggtcatagagagccccggccaaggagacaggagggcgagaagggacatcccaggtagaggaactggcaaggtgagggacggcgatgtggaggctttggggagtgcccacatctaaggggcatcccaaaagaggagccagtgctggtggtgctgcaataggaggaggaggcagcagggcagaaatgccaggggagggagtggccagccacaggtccctgcccagggcaaggacgggcatgctaggtggcagctggggccagtcgtgcagaagccatgcccaccttgtggccgggatggagtggggactaggaaggcaccaggtcaggtttctgtaggcacagccctaagcatggctgggatggggagggggctaggaaggcaccaggtcaggtttctgtaggcacagccctaaggtttcttgtctagattcaagacaagttgttgcacagagaagccagcagagctgggtgtggggtttggtgcccagtctgctgcggggaatgccaggtgctgttccgtgactgtgggaggaaactgttggctccgctgtcccttgggtgccttcttgaggcaagtgccagggctcagggatggtgctgtgagtacctggaagaggcagggcatccagaggtgacctctcccaggctcccctagggtcccacctgtgccctgggaagtccctcagtggggtctgtactgttgtcttgctagtggtcccatgggtgtcggcagcctcagcactggaagaaggcagaggccaggtcctgggcttgtgagctgctcactagaacctggtcctgtgagcgggccagaggggagttccttccctcaccctctgggctgtggggagattccttctgctgagccagcacaggtctgtgaggcacccgggcagtgaggccacatctgccacaggcgtgtcaggttgtagtagctgatctttgagctgctgccttggatggggacagcagtggggcccgcccttgcctgaaagccagacttattgaggagggtttaggaaagtcccaggatttccatgacaacagcactgaggttgggtgtgcgccctcacagaagggacaggacccgtggtgacagtggttccctgagtggggggaggggagagaaccggctctaccagtgttactctgcacacatttggttgagtctttcacagggggtacaagtgtatgtgttactggtgcaggtttctaaatcctcgaaggatctcctcacctgaagaagatgtggggctgccctggtctcaggtagtgccatgcggggacatcagtgacaccaggatggtgttaaagtggttgctttgctgtggagtcagctttaaaattacaagccctaggctcatgcctaggcatggtggctcatgcctgtaattctagcacttaaggaggtcaaggcaggaggatcatttaaggctaggagttcaagaccagcctgagcaacatcgtgaaaccctgtctctacaaaatatttttaaaagttagctggggccaggtgcggtggctcatgcctgtcatcccagcactttgggtggccgaggcgggtggatcacctgaagtcaggagtttgagaccagcctggccaacatggagaaaccccatctctactaaaaatataaaaattagctgggcatggtggtgtgcgcctgtaatctctgctacttgggaggctgaggcgggagaatcgcttgaacctgggaggtggaggttgcagtgagccgagattgtgctactgcactccagcctgggcaacaagagcaaaactctgcctcaaaaaaaagaaaaaataaaagttagctgagtgtggtggtgcatgcctgtagtcccaactactctggaggccgagataggagtgtcgcttgagcccaggagtgagaccctgcctctaaaaataaataaataaaaaacttgccagccctgcctgtgtgcttctgcagccctgtgcagggagcttccaccctcagcccgggcccagtcccccagccccccatctttgtgaataagcatccctggagtcagtgcagcctgggctcccgccccttcatttagtgctggccgtgcggaggcgagcagttaggtagagggagactgcgtggccccgtgcggcagtcgacagttgcccaccctccctcctgttgttttctgatggttctctcagagcggatgtggataagcccagtgatggtgttcaggtccccagttctgccccgcctgccacttgggtgatctttgatatgtttcagacccatcctgttctcccaactatccctgggtgctgccagcaggaatgaggcctggctcaggctcagtgggagacggagaacatgtcagcctgttcattttccagtttctaatcctcttgataaaagaacaaaatgccttaaagtcagattctgcttggaggctgcaggaaggcaggggtgagtgcctgggaaaccctggtccttggggctgccccatggcgtgcccaggggtgatggtcaggaggcgtctccatggggcaccaatgttcagggtaaggctgtggggctatgtctgcctgtgggcaggcgtgtgggtgctcagggctggcttgggtgtaagtgtttgactcgctaatggttttgcttagactagaagttgttcctgaaactacggtctcaagagatgctccccacataaaaggagttctagtatccattgggtttgagaaaccccaggctcttcctgtgttggggctgagtcggcaggggcagcagacacaacgcggaggtgtgcttctgagcatcacactcggccctcctctccaagtagcctctcgttgtccctgtcctttctgccctggctgtcccccgtgctggagctcccacagttgtccatgccatctcctcgccttggcaagccccactcctggatctgggttagtaaacacccctgccctaccctgcaggcactgccccatccccctgtcctgagtcataggcagagtccctccttcccctttggggttcctttaccaccaggatgtgagatcctggtcggtttcctttggttgtttccagtctataaaaggtgcttggtgcatggcagcttgggacatctgaatgagcgacgtggtgaaatatgattggaggagacagacagttcccgggcagcatctgtcagagtggctggtcagccccagatgaccctgcagagcgcatgggtcctggggtgggagtcatctcacaggcccctgtggactgtcatctagctcattgtccttgttgccagggcatgcctccctccagctgggcgcagactcagcctgagtttcacacgtttgttatttagcatccattcgggggctggcctcatgccagtcacactgtttaagggacttgggataagagggaacaaaacattgaaaaatctgggcactcaagtactagaaagtcaagttagatcctcctcttccgcagcagaactaccaaggtgtggatacagaggatggtctcaaaatgccggctgtcatccccagggaggctggccattctcctttttatccaccaagcagtggtcaggcacccactgtgtgctgctggagtgactcatgggtggggccctgaaggggcagagtccaggtgggaacagtgtcctcaggccaagcaggcagcacctcctgtggtctctctgccctggatgggaactggagtgatggacagggtggagaagcaagcggctttagctggtcttcaccatgaaactgaccctgaaagcccagtcgccaagagaccatatcgaggccccatggctggggtgaagtgtggtcggggatgagcagcggtgccttgctgggaaaggagagttcaggcagcccaggacagcggcttccctttgcctttcagctgctgtatgtttccaggaaacttctaggacagaggctattcaacaagctcatgaagatgaccttctatgggcattttgtagccggggaggaccaggagtccatccagcccctgcttcggcactacagggccttcggtgtcagcgccatcctggactatggagtggaggaggacctgagccccgaggaggcagagcacaaggagatggagtaaggcctgcccggtgtctgcgggctttctgatcatgaccctggagcacccagtgggagcaggtgggatgtatccagctgctgggcttcagcctcagctgggcagaggccaaggctaggagagcttggtcagcccaactaccgatgaccctcctgggctctgcctggagttcttgcatttttgtttcatgcggtggacagctctgggctttcatgggaggcctggtgtgcgtgaggcctgaggaagcagagtacagaatggcccttggccctatctagtccaccgcctggaggagcacaggcaccagcatatgaaccaagcactctgcaaagaatggttggtctcgcctggatctcacatgagccagggactgctccaggaagtggagggaaacgtggtcttgttgttctgtcctgatgccctgcccaggagggcgggtcagggtggtaccaactgccctctacactcactgcccagggaaggggccttgtatcagcttagtggcctccaggagctgactccaggccggcctgctacactgctcctggcttcaattcccttctccactgacaatggggcaggggccaggcctgggaggttccacaactgcagggcaggctgaggccaggcaagggtcgggcagtgggacctgcctgcgggtcaggaatccctgcaaaagagaggctgtagcagagcctcctccatcaggtcagcaagtttgtgtaaacagccaggtagcacagactctcagtcgggccacaccctccctgccacaacggcttcactctgcctcagtagggccatagtaattagaatttcatataattttcttgtgtcacaaaatattattcttgttttgatttctttcaaccagtttttttaaagtagggtcttgctctgttgcccaggctagagtgcagtggtgccattgttcactgcagccaaccttctgggctcaagtgatcctcccatctgagccccctaagtagctgggaccacaggcacgcaccaccatacctggctaagttttaatttttttttgtaaagatgggatctccctatgtcttcctatgtatttgggtcccctgcaccctgacagcagccgggcctgacccacataaggcttgggacagtccctctgtggacctggtcaggccttggtggttgttcctgcccctcccctggtggctggcctgggaaggggagggaaaggcagtcacatgaggcctccagccctgggaacggaatgtctgaggcttgcctcagcatgtcggctgccagctgcctggagaggattggccaggggagcccagcccctgccttgcgattggctgttttgaaggtggggtactacagccccagcaccccactgtgttcctagcaggccccgtgggccttgcagctgcctgagctcttggctgcagcctttgctgagctgcctgttgaataaccaatggcctgtgtgttctcagaaggagtctgggtggggacttggtttcacaatgggattttcctctcaggcgcctctggtatgaaaagactcctttcccagggtggtcctgcctggcttcctccctgccctgcaggctgagtgtctggaggtggactggcctgcactctgccagggggctgggcacctgtgtccttaggagcttgagtcctttgccctgcaagggattcacctgtcttgctgctggtggctgctgtctgcaggggtcctgctccagctctgggaagtgaacagggttccctcctgtcctcacaggggtgcatgctgaggacacctaccgagctcagctgctttgtgctttcagaggggcctgagccatgggggtagggctgggtctgcaagcactggtctgatgtccacactgcagcatggcctgcttggccaggagtgaccagtcacgcagaccctagtgcagggaactgcttagagatctgccttcctaacctaccctcctgtcacaagggccatgggctctactctggggagagacactgaggccaccgccccaaattaaggccatggcaagtggtgctggccgtgagaggcccagggaggatggaggcgtctgagtgcatggcaaagtgagtcccagcagtgctcccgagaaagaaagaggaggtgggagcctggaggtgcaggagggcaatgcccacccggggggggggtggaccatgcttcccagaggccagggccccacccaaccccaggagaggagtcccagggatccccgaagcaggctgagggcttggggatggggaaggggccaaggcatcttcctgatgattgggctgtgagggaacacctagggggtggatgggggcattggtctggctgtgcaggcccagggctggctggaggcaggatatgtgtgcagtgagtgtcctgagcgaggggctggggaggcagagggttggggagctggggaggggggtacaggtaggaagcggcttgccaggcttccctccaggagagagttggacaagggcggggtgtggacccccatgctctgcttgtttcaataggcatcacgtccccagggacagccacccagagctgaggtggaggctgagggggtggtcagggtcttcctgctgtctctgaagaccccctggggacacgtgcttgtcctcctctgccctatgtccccttgtcgctcttccctcctctgttgtcccaggtcgtgcccatgtgtgcgatcatgtgcccttcaacagactatgccctgggcatgatgaggggtgggactgggggagcacgaggcaggtcctggctttaaggaggcattgggatgtggtccccaccctgatcagggccccacatccactggttcacccttcctcctctaacaccccacagctgccagtgccatgtgcccccctcttccctgtggtgccttgagccaggacgtggcaacgtcccaggtggcgaaagccagatttcctgtgtggcacccgcagttctgaatcagctgctcccagggtgctttcttcctcttctccagtggaaataggacccctgacctgcctgggaaccaccatttgtgtctccttgtgacttatccatgatgcctgttggagagtgtggccctgtccttgctgcgtagccatccactctgagacctggctgcccctctggccactgcacgtgctgtgtggtcatcttggccactgcttggctgtgtcagcctggtctgtgctctggaagttcacggagaggagcagcggtagcctatggtgttctgcctctgagtgtgtcagagcaggagagggagcagccctggcttccccagcctctcctgccaggcccacctcagaggatgaacacagcagctgtgggaatgctgagcgggaactcatctgcctggggacctgtcagataatgatcctgtttcatgaaggtgagctgcctcacaggcagacacctgtgtggttaagtcccgtgttatccaaactgtgggctgtgtggtttcaggatgggaccttctcttcagggtcatggaggcccctgaggccctgtccccactgtctgctgttacttgccatgagggtttctgccctgggcagggccctggctgccaccccggccttaacatagacagtgagtcccccttggggatggcttttcctggctgtacctaagccttggcgtgaaggtcttagggctgatctcatgactggtcttgaggtgcccaagccaggggcccaggagctccctgtctcaggcaggggttcacgtgctgcctgcctgttccctagtcacatggtgacattccaccctcttctgtcacatctctgtcagcataaggtggccagagcatatctgcctgccagctcccatcactgggctgcagcctcaggggccctggcagcacatgtggagtccctggcccatgtggggctgcccaggagtgggtgggagggaaggcctcctggcgggggctcctggcccagggcttgctccttgagcagccaggtggaaagtgggcagctgaggccccttgacatggaggcctctgggatgcggctcactgaccactgctctgcctttccccttcccggcatctgagggggaccctctcctttcctgtgagtgtgggcagagctgcccctgagggtccgagcgcctctggggagcttcaggaaggctctgggtgctgttggtcatgcagctgagctctctccgtggtcactgacttgatcaggtttgaatataaagtcaggtgaccctcagagctgctccgggggccagggagaccatggtcgctttgtcacagcagacttaacggccgcagcaactcttgctagcctggatgacacagcactgaaaccaagtgccagaagcagattgtggctgtggggaggaggaggaagaagaggaggctctggcaggggtgcagggctggtgggggaggggagccaggtaccctagagaagggaggggccagggggaatgggggtgctggccaggcggggatggagaggcttctgcaggaaggacaggggcttggctgagcagagtgtggccagcctagcgggggacagcctgcatcctggcctcactggtcttgaggtgcccaagccaggggcccaggactttgggcattactaggaaatgatgggaaccctgggtggggtggcgtgaaacaagatgagatggtaagatctgctttcactttaaaggaacatttctggttgttgcttggaaaagaagtgtcggggcaagaatgctacaggagggccggcctggaggacagggcgggactgcagggctggctgtgcgggggcaggagcctgtgcttgcatcagagctgcctgggagaccctggctctggggtggaggcctgagtaagggggcctcgctggggatttggggacctctgtgtgctggtgccttcccgcctccgttcctctcagccctgactggctctgtcttggaaccaggtaactacctttatttgagaacctgctgcaagccctgggctgttctgagagctcaggaatatcgttctgatttctccacccacaaggagccccgggcttcctgagcccttgggacacagcagccccataaactgctgcccctcccaggcccaagtgttccaccccaggctaggggtggggctggggctgcaccttggaatctaccctccaccggggttgtggtggggccctccgtgcagcctcagtgggaacgtgcctgtcacctgaggctcaggtggcgtgaccctgacctttgctctccccctccttcccacaggtcctgcacctcagctgcggagagggatggcagtggtgagtgagaggctgccgcgcaggaacagactccctcccgactccgcacaccccttggtggctcaggagagtctaggctggggcacaagtgggccttggggtgacgtcggagcccgggctcctccctatgtccagggcacctgccctgtcgctctgggctctgacatactcgcaagtgtctggggagacgccctgctcctttttcatggcctcctggtggacctaggcctttgttaaggagactgccgtcctggcctcatgaggaggcttagccagggggatgcagcactccaggtggaagagccgcggtgtagacaggagggtgggcttggggatgggaaccatggggcagtgcagtgccagggccaggctggcaaggccactatgcttggagccctcctgagggcaggggccctgggctattggtgtgtgggtgctgggggtgggtgtttggagctgtgctcaggccgtgcattcgctattccaggcacgaataagcgggacaagcaataccaggcccactgggccttcggggaccgcaggaatggtgtcatcagtgcccgcacctacttctacgccaatgaggccaagtgcgacagccacatggagacattcttgcgctgcatcgaagcctcaggtggggccccctctttgctggctatacccctgccatgtcccagcctgagcggacccctgggctcatggaggtgccggtgggtgaacactaagctggggcaggagccagagggctgggttctgaccacacttgggtccctcactgttcagccccttcctgaggggccccactgcctcccagaaggcatctcctctcctgccccagctccctgttccctgatcccgcctcatgccccccacccttctccctggctcagggccaggatcgggagctgcaggaagttggtccatgtcagctgccgagccacacttagcccagggtggaggttccattcagggagctggtgccgcatcttctgtccttccctgacacagcctctgggggccagcggtgggggcagcaggtgtttccagggatagagaagccagaggtcagcaaggcccaatgtccttcagtgttagaaacatccgacctgcacagccccatgctggccccagcagccctccgtcaggggcagcgggtcccaggcctgtttatgtttttgtttgtttgcttcaaatgagactggatcttgctctgtcacccaggctggagtgctcacgcctctaatcccagcaatttgggaggccaaggcgggtggattgcctgagctcagttcaagaccagcctgggcaacatggtgaaactccgtctccactaaaatacaaaaaattagccgggcgtggcagcaggcgcttgtaatcccagctacttgggaggctgagacaggagaatcacttgaatccaggaggcggaggttgcagtgagccaagattgcgccactgcactccagcctgggcgacagagtgagactccatctcaaaaaaaaaaaaaaaaaatgaggtctcactatgttgccctggttggcctggaactcctgggctcaagtgatccctccaccttggcctcccaaagtgctgggattacaggcacacactaccacacccagctaattttcatattttttgtagagatggtgtttcaccatgttgcccaggctggtctcaaactcctggcctcaagcgaaccttacactttggcctcccaaagtgctgggattataggtgcatgccgctgcacctggcacttctgagcagtgcttggaagccgcctcctgatgggggctgagggtcagagtggccagctgaatgctgggccatcagggtgaggggcgtcttctcctcgtccattgcctgttctcccagggcaggtggaaggggaaggccctgcattggggtggcgtgaaacaagatgagatggtaagatctgctttcactttaaaggaacatttctggttgttgcttggaaagaagtgtcaggggcaagaatgctgcaggagggctggcctggaggacagggtgggactgcgggctggctgcacgggggcaggagcctgcgcttgcgtcagaggttcctgagagactcggtctctggggcagaggcctgagcaaggggacctcgctggggtgtctctgtcttagccacgctcggtgtttctgggtcctgtgacccacgtgtgagcagcctgtggtgctggtggcacagggaaggaaaccgaggcagggagcctgtgggggctgcttggcaggggacaggcagctcctgtgcccactgctgtcccacacctgcatggaaacagaaaccccgccacggagccccctcccatctccacagggcctctagagcgccatgtgcaaggacttcatgggcggggtggggtggggtcaggagcctgctgtgggctggccaggccctggccctccctgtcgcaccctgcgctgcctccatgcacctctcagggctgtcatggcttttcctgtggcttctgacaggtagagtcagcgatgacggcttcatagccattaagctcacagcactggggagaccccagtttctggtaagtgctagaaccttccacctgcagagtctggtgctgtgcgagatctcagggcagctgtgggcatccaccaaaaacacaggtgcccatgccttagaggcctgagctggccacaggggctgtgtgggggactggggtgggcaggggcgtgtgcagatggcattcaggcctgcgtttgcagctgcagttctcagaggtgctggccaagtggaggtgcttctttcaccaaatggctgtggagcaagggcaggcgggcctggctgccatggacaccaagctggaggtggcggtgctgcaggtggggcagccttccccttccccactcctgtggcttgtgagggggtgggcaccgtggggtcacacggggcatggtgggcagtggtcggaggtggttttgggaactcacccagggcatgtggctcactctgcagctgctggggttggcctggtggggaggaggaggtcagagggactctgaacagagaggggagatgctggcaggagggctggagacccagccctgcagggcgtgggcgtgcatcagcagcggggtgggaatagacctgtctatgcagtagaaacaaaccagacatggatcctgttcttactaacgatgtaataaagccagaaacagcaccagaggccaatgggtggggggaaggataaaatatgagtgaatggggctgatccaggccttctcacttctcaaggaaagtgtcgcaaagttgggcatcgcatccagggctgagattgaggactggttcacggcagagaccctgggagtgtctgggtgagagcagcccccaggctgagaggacacgagcatcagccatggttccagccaagccccagtgacgtctcccagtcctggctgccctgcctgagagggtgggccctgggatgacagtgctgaaggaactgcttttcacacagcaggacttgatggcttcaggagtccctgaggctggggctgggctgggcaggggagacacagggccagcacagaccccatagagggctctttatagaattatctgggtccagagcaaaggtggcactctcagccctccctggagtccacgccggcaggtgaaggatcagagccccatgccccatccttggagccaggggctgggacccagatcaccaggagcctccagttgaagtggggaggtgactggggtggtgcagtagtgagccatcccctcacacactgccagccttgcccactgtgtcctccctggccgcccggagctgtgtccgcctcctgcctggctgcctgtgctcggcccctccacaagcccaaaacagcctagggtactcagtgttttcagagccgcctagatgcaggactgtttgtgttttggttttaaatttatttaattaatttattttttatagagaccaggtctcaccatgttgcccaggctggtttcaaacccctgggctcaagtgacctgcccgccgcagcccccaaagtgctgggattataagtttgagcccccgcatgccactggttttaaatttttaaacagaaaacaatatttatatttcctctgtcttttaaaactgaacaccgaggtgggttttgtggtgggtggtgaacggacaggtttgggcctcgatcccccacccgaccctagcacccacaggtgggggtgccccctctgctgatgcgcctcctccctcagcaccatggacctgctggactggagcagcctcatcgacagcagg

SEQ ID NO: 13573 - DNA, 553 bp, Homo sapiens
cggtgcccgccgtggacttcggcaacgcgcaggaggcgtaccgcagccggcgaacctgggagctggcgcggagcctgctggtgctgcgcttgtgcgcctggcccgcgctgctggcgcgccacgagcaggtcctgcacctcagctgcggagagggatggcagtggcacgaataagcgggacaagcaataccaggcccactgggccttcggggaccgcaggaatggtgtcatcagtgcccgcacctacttctacgccaatgaggccaagtgcgacagccacatggagacattcttgcgctgcatcgaagcctcagctgcagttctcagaggtgctggccaagtggaggtgcttctttcaccaaatggctgtggagcaagggcaggcgggcctggctgccatggacaccaagctggaggtggcggtgctgcaggaaagtgtcgcaaagttgggcatcgcatccagggctgagattgaggactggttcacggcagagaccctgggagtgtctggcaccatggacctgctggactggagcagcctcatcgacagcagg

SEQ ID NO: 13574 - DNA, 1984 bp, Homo sapiens
accgaggtgggttttgtggtgggtggtgaacggacaggtttgggcctcgatcccccacccgaccctagcacccacaggtgggggtgccccctctgctgatgcgcctcctccctcagcaccatggacctgctggactggagcagcctcatcgacagcaggaccaagctgtccaagcacttggtagtccccaacgcacaggtaacacctccgctcctcagtgaggcccagctcagcagggcgctgcgctaagaagggaattcagcctgccacgtgtgtctcttgttgcctaccctgggaacttaacatgaccaaaatcactgcacactatggccccacagaccccctgtggtccagggggaagaagacaagcccactagtgtccacagagtgcttggcgggacagagacccacgcggagccttaagacaccacaaggagagggggtctgggggccttccccaagtcatctgtcttgtgcatcaggtcaccccaaacttcagaggcctgaaacggcagcagccactctgcttctgcctcatggttctggggttgacagggctcagctgggcagtcctcccctggggtctcctgggtagctgtactcacagagtggtggcgctgggacctgggggaggcacccattcacatgtctgggagttggtgctggctgtggcttgggctttttcccaacatggcagctgggctctaagggccagtgtcacctgagacgtgagagccaggcagaagctgggtgaccttttcctgcctcgcctcagaagtcacacggtgtcttttctggcaagttctgtttgttagaagcatgtcaccaggccagcctgtatacagcggggagaggaatgagactcatctgcctgtgggaggggggcccaggacctggcagactgcttgaaaccacagcttaaactgggattcaaagaaagaacagaagcaccttcagaaaacatcctgcagaggcagctttccatgacacatctagccccagtccactaagggcccagcctcaaacttagagcccccgacccagagcctcggggcgcagtgcgtacagtgtggctgtgcaccaaggccaccagctgttggagactttagcatggtgtagcaagggatagagtggtactgtttgtgcccagtgaggcaaggctgctggggccagcaaaggggtgagcgggaggccctgcgggatgggtccccacggcctctgagcaccagcaacttgaaggcctcatcctggtggttgccctggtccctggctacgtgtcagcacgtgctgcacaactgccctgtctgcctgtagccaggggtcttcctcctgggccctctgcctgctccgggtggagcccttctgtttgacgattgggtgatcagtgttcacttgttcaatgtcacatgggagttgcagggggctctcccacaacggtggggcctctgtgggaactggggagtacacacttcggagtgcaggcctggactgagcctggggcccactgacatgggcactgagctccctcgtggtacccctaggccccgcatagggcagtgcactggctgcgttggaggttcaggggcactgtgctgcttgtccaggtggccctccctcccagccctgcacagacgggtgagagggttcctgtgggctgggaatactgagagaggtttagcctgggcctcagggtggcactttcccgcccttgctgtggcctgaccgcgtgttgcacccccagacaggacagctggagcccctgctgtcccggttcactgaggaggaggagctacagatgaccaggatgctacagcggatggatgtcctggccaaggtgagctgtcccgctcgggcagagggtacctgggactcgtggagaagagggcacctgcctcacttgagcaacagttgctcccactctcccaccccctgcgcctctcagaaagccacagagatgggcgtgcggctgatggtggatgccgag

SEQ ID NO: 13575 - DNA, 441 bp, Homo sapiens
accgaggtgggttttgtggtgggtggtgaacggacaggtttgggcctcgatcccccacccgaccctagcacccacaggtgggggtgccccctctgctgatgcgcctcctccctcagcaccatggacctgctggactggagcagcctcatcgacagcaggaccaagctgtccaagcacttggtagtccccaacgcacagacaggacagctggagcccctgctgtcccggttcactgaggaggaggagctacagatgaccaggatgctacagcggatggatgtcctggccaaggtgagctgtcccgctcgggcagagggtacctgggactcgtggagaagagggcacctgcctcacttgagcaacagttgctcccactctcccaccccctgcgcctctcagaaagccacagagatgggcgtgcggctgatggtggatgccgag

SEQ ID NO: 13576 - DNA, 12457 bp, Homo sapiens
gggccagtcgtgcagaagccatgcccaccttgtggccgggatggagtggggactaggaaggcaccaggtcaggtttctgtaggcacagccctaagcatggctgggatggggagggggctaggaaggcaccaggtcaggtttctgtaggcacagccctaaggtttcttgtctagattcaagacaagttgttgcacagagaagccagcagagctgggtgtggggtttggtgcccagtctgctgcggggaatgccaggtgctgttccgtgactgtgggaggaaactgttggctccgctgtcccttgggtgccttcttgaggcaagtgccagggctcagggatggtgctgtgagtacctggaagaggcagggcatccagaggtgacctctcccaggctcccctagggtcccacctgtgccctgggaagtccctcagtggggtctgtactgttgtcttgctagtggtcccatgggtgtcggcagcctcagcactggaagaaggcagaggccaggtcctgggcttgtgagctgctcactagaacctggtcctgtgagcgggccagaggggagttccttccctcaccctctgggctgtggggagattccttctgctgagccagcacaggtctgtgaggcacccgggcagtgaggccacatctgccacaggcgtgtcaggttgtagtagctgatctttgagctgctgccttggatggggacagcagtggggcccgcccttgcctgaaagccagacttattgaggagggtttaggaaagtcccaggatttccatgacaacagcactgaggttgggtgtgcgccctcacagaagggacaggacccgtggtgacagtggttccctgagtggggggaggggagagaaccggctctaccagtgttactctgcacacatttggttgagtctttcacagggggtacaagtgtatgtgttactggtgcaggtttctaaatcctcgaaggatctcctcacctgaagaagatgtggggctgccctggtctcaggtagtgccatgcggggacatcagtgacaccaggatggtgttaaagtggttgctttgctgtggagtcagctttaaaattacaagccctaggctcatgcctaggcatggtggctcatgcctgtaattctagcacttaaggaggtcaaggcaggaggatcatttaaggctaggagttcaagaccagcctgagcaacatcgtgaaaccctgtctctacaaaatatttttaaaagttagctggggccaggtgcggtggctcatgcctgtcatcccagcactttgggtggccgaggcgggtggatcacctgaagtcaggagtttgagaccagcctggccaacatggagaaaccccatctctactaaaaatataaaaattagctgggcatggtggtgtgcgcctgtaatctctgctacttgggaggctgaggcgggagaatcgcttgaacctgggaggtggaggttgcagtgagccgagattgtgctactgcactccagcctgggcaacaagagcaaaactctgcctcaaaaaaaagaaaaaataaaagttagctgagtgtggtggtgcatgcctgtagtcccaactactctggaggccgagataggagtgtcgcttgagcccaggagtgagaccctgcctctaaaaataaataaataaaaaacttgccagccctgcctgtgtgcttctgcagccctgtgcagggagcttccaccctcagcccgggcccagtcccccagccccccatctttgtgaataagcatccctggagtcagtgcagcctgggctcccgccccttcatttagtgctggccgtgcggaggcgagcagttaggtagagggagactgcgtggccccgtgcggcagtcgacagttgcccaccctccctcctgttgttttctgatggttctctcagagcggatgtggataagcccagtgatggtgttcaggtccccagttctgccccgcctgccacttgggtgatctttgatatgtttcagacccatcctgttctcccaactatccctgggtgctgccagcaggaatgaggcctggctcaggctcagtgggagacggagaacatgtcagcctgttcattttccagtttctaatcctcttgataaaagaacaaaatgccttaaagtcagattctgcttggaggctgcaggaaggcaggggtgagtgcctgggaaaccctggtccttggggctgccccatggcgtgcccaggggtgatggtcaggaggcgtctccatggggcaccaatgttcagggtaaggctgtggggctatgtctgcctgtgggcaggcgtgtgggtgctcagggctggcttgggtgtaagtgtttgactcgctaatggttttgcttagactagaagttgttcctgaaactacggtctcaagagatgctccccacataaaaggagttctagtatccattgggtttgagaaaccccaggctcttcctgtgttggggctgagtcggcaggggcagcagacacaacgcggaggtgtgcttctgagcatcacactcggccctcctctccaagtagcctctcgttgtccctgtcctttctgccctggctgtcccccgtgctggagctcccacagttgtccatgccatctcctcgccttggcaagccccactcctggatctgggttagtaaacacccctgccctaccctgcaggcactgccccatccccctgtcctgagtcataggcagagtccctccttcccctttggggttcctttaccaccaggatgtgagatcctggtcggtttcctttggttgtttccagtctataaaaggtgcttggtgcatggcagcttgggacatctgaatgagcgacgtggtgaaatatgattggaggagacagacagttcccgggcagcatctgtcagagtggctggtcagccccagatgaccctgcagagcgcatgggtcctggggtgggagtcatctcacaggcccctgtggactgtcatctagctcattgtccttgttgccagggcatgcctccctccagctgggcgcagactcagcctgagtttcacacgtttgttatttagcatccattcgggggctggcctcatgccagtcacactgtttaagggacttgggataagagggaacaaaacattgaaaaatctgggcactcaagtactagaaagtcaagttagatcctcctcttccgcagcagaactaccaaggtgtggatacagaggatggtctcaaaatgccggctgtcatccccagggaggctggccattctcctttttatccaccaagcagtggtcaggcacccactgtgtgctgctggagtgactcatgggtggggccctgaaggggcagagtccaggtgggaacagtgtcctcaggccaagcaggcagcacctcctgtggtctctctgccctggatgggaactggagtgatggacagggtggagaagcaagcggctttagctggtcttcaccatgaaactgaccctgaaagcccagtcgccaagagaccatatcgaggccccatggctggggtgaagtgtggtcggggatgagcagcggtgccttgctgggaaaggagagttcaggcagcccaggacagcggcttccctttgcctttcagctgctgtatgtttccaggaaacttctaggacagaggctattcaacaagctcatgaagatgaccttctatgggcattttgtagccggggaggaccaggagtccatccagcccctgcttcggcactacagggccttcggtgtcagcgccatcctggactatggagtggaggaggacctgagccccgaggaggcagagcacaaggagatggagtaaggcctgcccggtgtctgcgggctttctgatcatgaccctggagcacccagtgggagcaggtgggatgtatccagctgctgggcttcagcctcagctgggcagaggccaaggctaggagagcttggtcagcccaactaccgatgaccctcctgggctctgcctggagttcttgcatttttgtttcatgcggtggacagctctgggctttcatgggaggcctggtgtgcgtgaggcctgaggaagcagagtacagaatggcccttggccctatctagtccaccgcctggaggagcacaggcaccagcatatgaaccaagcactctgcaaagaatggttggtctcgcctggatctcacatgagccagggactgctccaggaagtggagggaaacgtggtcttgttgttctgtcctgatgccctgcccaggagggcgggtcagggtggtaccaactgccctctacactcactgcccagggaaggggccttgtatcagcttagtggcctccaggagctgactccaggccggcctgctacactgctcctggcttcaattcccttctccactgacaatggggcaggggccaggcctgggaggttccacaactgcagggcaggctgaggccaggcaagggtcgggcagtgggacctgcctgcgggtcaggaatccctgcaaaagagaggctgtagcagagcctcctccatcaggtcagcaagtttgtgtaaacagccaggtagcacagactctcagtcgggccacaccctccctgccacaacggcttcactctgcctcagtagggccatagtaattagaatttcatataattttcttgtgtcacaaaatattattcttgttttgatttctttcaaccagtttttttaaagtagggtcttgctctgttgcccaggctagagtgcagtggtgccattgttcactgcagccaaccttctgggctcaagtgatcctcccatctgagccccctaagtagctgggaccacaggcacgcaccaccatacctggctaagttttaatttttttttgtaaagatgggatctccctatgtcttcctatgtatttgggtcccctgcaccctgacagcagccgggcctgacccacataaggcttgggacagtccctctgtggacctggtcaggccttggtggttgttcctgcccctcccctggtggctggcctgggaaggggagggaaaggcagtcacatgaggcctccagccctgggaacggaatgtctgaggcttgcctcagcatgtcggctgccagctgcctggagaggattggccaggggagcccagcccctgccttgcgattggctgttttgaaggtggggtactacagccccagcaccccactgtgttcctagcaggccccgtgggccttgcagctgcctgagctcttggctgcagcctttgctgagctgcctgttgaataaccaatggcctgtgtgttctcagaaggagtctgggtggggacttggtttcacaatgggattttcctctcaggcgcctctggtatgaaaagactcctttcccagggtggtcctgcctggcttcctccctgccctgcaggctgagtgtctggaggtggactggcctgcactctgccagggggctgggcacctgtgtccttaggagcttgagtcctttgccctgcaagggattcacctgtcttgctgctggtggctgctgtctgcaggggtcctgctccagctctgggaagtgaacagggttccctcctgtcctcacaggggtgcatgctgaggacacctaccgagctcagctgctttgtgctttcagaggggcctgagccatgggggtagggctgggtctgcaagcactggtctgatgtccacactgcagcatggcctgcttggccaggagtgaccagtcacgcagaccctagtgcagggaactgcttagagatctgccttcctaacctaccctcctgtcacaagggccatgggctctactctggggagagacactgaggccaccgccccaaattaaggccatggcaagtggtgctggccgtgagaggcccagggaggatggaggcgtctgagtgcatggcaaagtgagtcccagcagtgctcccgagaaagaaagaggaggtgggagcctggaggtgcaggagggcaatgcccacccggggggggggtggaccatgcttcccagaggccagggccccacccaaccccaggagaggagtcccagggatccccgaagcaggctgagggcttggggatggggaaggggccaaggcatcttcctgatgattgggctgtgagggaacacctagggggtggatgggggcattggtctggctgtgcaggcccagggctggctggaggcaggatatgtgtgcagtgagtgtcctgagcgaggggctggggaggcagagggttggggagctggggaggggggtacaggtaggaagcggcttgccaggcttccctccaggagagagttggacaagggcggggtgtggacccccatgctctgcttgtttcaataggcatcacgtccccagggacagccacccagagctgaggtggaggctgagggggtggtcagggtcttcctgctgtctctgaagaccccctggggacacgtgcttgtcctcctctgccctatgtccccttgtcgctcttccctcctctgttgtcccaggtcgtgcccatgtgtgcgatcatgtgcccttcaacagactatgccctgggcatgatgaggggtgggactgggggagcacgaggcaggtcctggctttaaggaggcattgggatgtggtccccaccctgatcagggccccacatccactggttcacccttcctcctctaacaccccacagctgccagtgccatgtgcccccctcttccctgtggtgccttgagccaggacgtggcaacgtcccaggtggcgaaagccagatttcctgtgtggcacccgcagttctgaatcagctgctcccagggtgctttcttcctcttctccagtggaaataggacccctgacctgcctgggaaccaccatttgtgtctccttgtgacttatccatgatgcctgttggagagtgtggccctgtccttgctgcgtagccatccactctgagacctggctgcccctctggccactgcacgtgctgtgtggtcatcttggccactgcttggctgtgtcagcctggtctgtgctctggaagttcacggagaggagcagcggtagcctatggtgttctgcctctgagtgtgtcagagcaggagagggagcagccctggcttccccagcctctcctgccaggcccacctcagaggatgaacacagcagctgtgggaatgctgagcgggaactcatctgcctggggacctgtcagataatgatcctgtttcatgaaggtgagctgcctcacaggcagacacctgtgtggttaagtcccgtgttatccaaactgtgggctgtgtggtttcaggatgggaccttctcttcagggtcatggaggcccctgaggccctgtccccactgtctgctgttacttgccatgagggtttctgccctgggcagggccctggctgccaccccggccttaacatagacagtgagtcccccttggggatggcttttcctggctgtacctaagccttggcgtgaaggtcttagggctgatctcatgactggtcttgaggtgcccaagccaggggcccaggagctccctgtctcaggcaggggttcacgtgctgcctgcctgttccctagtcacatggtgacattccaccctcttctgtcacatctctgtcagcataaggtggccagagcatatctgcctgccagctcccatcactgggctgcagcctcaggggccctggcagcacatgtggagtccctggcccatgtggggctgcccaggagtgggtgggagggaaggcctcctggcgggggctcctggcccagggcttgctccttgagcagccaggtggaaagtgggcagctgaggccccttgacatggaggcctctgggatgcggctcactgaccactgctctgcctttccccttcccggcatctgagggggaccctctcctttcctgtgagtgtgggcagagctgcccctgagggtccgagcgcctctggggagcttcaggaaggctctgggtgctgttggtcatgcagctgagctctctccgtggtcactgacttgatcaggtttgaatataaagtcaggtgaccctcagagctgctccgggggccagggagaccatggtcgctttgtcacagcagacttaacggccgcagcaactcttgctagcctggatgacacagcactgaaaccaagtgccagaagcagattgtggctgtggggaggaggaggaagaagaggaggctctggcaggggtgcagggctggtgggggaggggagccaggtaccctagagaagggaggggccagggggaatgggggtgctggccaggcggggatggagaggcttctgcaggaaggacaggggcttggctgagcagagtgtggccagcctagcgggggacagcctgcatcctggcctcactggtcttgaggtgcccaagccaggggcccaggactttgggcattactaggaaatgatgggaaccctgggtggggtggcgtgaaacaagatgagatggtaagatctgctttcactttaaaggaacatttctggttgttgcttggaaaagaagtgtcggggcaagaatgctacaggagggccggcctggaggacagggcgggactgcagggctggctgtgcgggggcaggagcctgtgcttgcatcagagctgcctgggagaccctggctctggggtggaggcctgagtaagggggcctcgctggggatttggggacctctgtgtgctggtgccttcccgcctccgttcctctcagccctgactggctctgtcttggaaccaggtaactacctttatttgagaacctgctgcaagccctgggctgttctgagagctcaggaatatcgttctgatttctccacccacaaggagccccgggcttcctgagcccttgggacacagcagccccataaactgctgcccctcccaggcccaagtgttccaccccaggctaggggtggggctggggctgcaccttggaatctaccctccaccggggttgtggtggggccctccgtgcagcctcagtgggaacgtgcctgtcacctgaggctcaggtggcgtgaccctgacctttgctctccccctccttcccacaggtcctgcacctcagctgcggagagggatggcagtggtgagtgagaggctgccgcgcaggaacagactccctcccgactccgcacaccccttggtggctcaggagagtctaggctggggcacaagtgggccttggggtgacgtcggagcccgggctcctccctatgtccagggcacctgccctgtcgctctgggctctgacatactcgcaagtgtctggggagacgccctgctcctttttcatggcctcctggtggacctaggcctttgttaaggagactgccgtcctggcctcatgaggaggcttagccagggggatgcagcactccaggtggaagagccgcggtgtagacaggagggtgggcttggggatgggaaccatggggcagtgcagtgccagggccaggctggcaaggccactatgcttggagccctcctgagggcaggggccctgggctattggtgtgtgggtgctgggggtgggtgtttggagctgtgctcaggccgtgcattcgctattccaggcacgaataagcgggacaagcaataccaggcccactgggccttcggggaccgcaggaatggtgtcatcagtgcccgcacctacttctacgccaatgaggccaagtgcgacagccacatggagacattcttgcgctgcatcgaagcctcaggtggggccccctctttgctggctatacccctgccatgtcccagcctgagcggacccctgggctcatggaggtgccggtgggtgaacactaagctggggcaggagccagagggctgggttctgaccacacttgggtccctcactgttcagccccttcctgaggggccccactgcctcccagaaggcatctcctctcctgccccagctccctgttccctgatcccgcctcatgccccccacccttctccctggctcagggccaggatcgggagctgcaggaagttggtccatgtcagctgccgagccacacttagcccagggtggaggttccattcagggagctggtgccgcatcttctgtccttccctgacacagcctctgggggccagcggtgggggcagcaggtgtttccagggatagagaagccagaggtcagcaaggcccaatgtccttcagtgttagaaacatccgacctgcacagccccatgctggccccagcagccctccgtcaggggcagcgggtcccaggcctgtttatgtttttgtttgtttgcttcaaatgagactggatcttgctctgtcacccaggctggagtgctcacgcctctaatcccagcaatttgggaggccaaggcgggtggattgcctgagctcagttcaagaccagcctgggcaacatggtgaaactccgtctccactaaaatacaaaaaattagccgggcgtggcagcaggcgcttgtaatcccagctacttgggaggctgagacaggagaatcacttgaatccaggaggcggaggttgcagtgagccaagattgcgccactgcactccagcctgggcgacagagtgagactccatctcaaaaaaaaaaaaaaaaaatgaggtctcactatgttgccctggttggcctggaactcctgggctcaagtgatccctccaccttggcctcccaaagtgctgggattacaggcacacactaccacacccagctaattttcatattttttgtagagatggtgtttcaccatgttgcccaggctggtctcaaactcctggcctcaagcgaaccttacactttggcctcccaaagtgctgggattataggtgcatgccgctgcacctggcacttctgagcagtgcttggaagccgcctcctgatgggggctgagggtcagagtggccagctgaatgctgggccatcagggtgaggggcgtcttctcctcgtccattgcctgttctcccagggcaggtggaaggggaaggccctgcattggggtggcgtgaaacaagatgagatggtaagatctgctttcactttaaaggaacatttctggttgttgcttggaaagaagtgtcaggggcaagaatgctgcaggagggctggcctggaggacagggtgggactgcgggctggctgcacgggggcaggagcctgcgcttgcgtcagaggttcctgagagactcggtctctggggcagaggcctgagcaaggggacctcgctggggtgtctctgtcttagccacgctcggtgtttctgggtcctgtgacccacgtgtgagcagcctgtggtgctggtggcacagggaaggaaaccgaggcagggagcctgtgggggctgcttggcaggggacaggcagctcctgtgcccactgctgtcccacacctgcatggaaacagaaaccccgccacggagccccctcccatctccacagggcctctagagcgccatgtgcaaggacttcatgggcggggtggggtggggtcaggagcctgctgtgggctggccaggccctggccctccctgtcgcaccctgcgctgcctccatgcacctctcagggctgtcatggcttttcctgtggcttctgacaggtagagtcagcgatgacggcttcatagccattaagctcacagcactggggagaccccagtttctggtaagtgctagaaccttccacctgcagagtctggtgctgtgcgagatctcagggcagctgtgggcatccaccaaaaacacaggtgcccatgccttagaggcctgagctggccacaggggctgtgtgggggactggggtgggcaggggcgtgtgcagatggcattcaggcctgcgtttgcagctgcagttctcagaggtgctggccaagtggaggtgcttctttcaccaaatggctgtggagcaagggcaggcgggcctggctgccatggacaccaagctggaggtggcggtgctgcaggtggggcagccttccccttccccactcctgtggcttgtgagggggtgggcaccgtggggtcacacggggcatggtgggcagtggtcggaggtggttttgggaactcacccagggcatgtggctcactctgcagctgctggggttggcctggtggggaggaggaggtcagagggactctgaacagagaggggagatgctggcaggagggctggagacccagccctgcagggcgtgggcgtgcatcagcagcggggtgggaatagacctgtctatgcagtagaaacaaaccagacatggatcctgttcttactaacgatgtaataaagccagaaacagcaccagaggccaatgggtggggggaaggataaaatatgagtgaatggggctgatccaggccttctcacttctcaaggaaagtgtcgcaaagttgggcatcgcatccagg

SEQ ID NO: 13577 - DNA, 594 bp, Homo sapiens
gggccagtcgtgcagaagccatgcccaccttgtggccgggatggagtggggactaggaaggcaccagccggggaggaccaggagtccatccagcccctgcttcggcactacagggccttcggtgtcagcgccatcctggactatggagtggaggaggacctgagccccgaggaggcagagcacaaggagatggagtcctgcacctcagctgcggagagggatggcagtggcacgaataagcgggacaagcaataccaggcccactgggccttcggggaccgcaggaatggtgtcatcagtgcccgcacctacttctacgccaatgaggccaagtgcgacagccacatggagacattcttgcgctgcatcgaagcctcaggtagagtcagcgatgacggcttcatagccattaagctcacagcactggggagaccccagtttctgctgcagttctcagaggtgctggccaagtggaggtgcttctttcaccaaatggctgtggagcaagggcaggcgggcctggctgccatggacaccaagctggaggtggcggtgctgcaggaaagtgtcgcaaagttgggcatcgcatccagg

SEQ ID NO: 13578 - DNA, 13387 bp, Homo sapiens
cccgcgctgcgcccctgcattccccgcttcgtcccgctgtccacggcgccggcctcccgcgagcagcccgcagcgggcccagcggccgtgccaggaggtgggtcggccacggcagtgcggccgccggtgcccgccgtggacttcggcaacgcgcaggaggcgtaccgcagccggcgaacctgggagctggcgcggagcctgctggtgctgcgcttgtgcgcctggcccgcgctgctggcgcgccacgagcaggtgcgcggggtgcaggcgggggcgcgggggcttctgccggtcccgggagcctttacggagcttcctggcctgaaacgggtgcctcccaagcatctcctggagcaagggaagccaggaagggaggcgtttcctgcagtccctctcggacctcgcaaattttcctatttgtcgatgtctaccaactaaaaacaatggtcgttttcatatttacgatatataccacttgtgggaatacagagttatcacttggaatttaaaatggagtattcttcatgttgagacaagagaatcctggtgtagggctcatagcctggaaccccggaattcaaaccccgggacccagcagcttcccagacacggccactctgagaacactgttggggaaaaatgggaagcccctcaaacgcccagctttgaactcacccatggtagctttaaaaagtgtcagggcttttggtggcggtggtggggggcaacaagcagaacactgttttagccgcatcagcctaggggtactagagatgacggttatctccaggtgaccctgggaagagtttgcaaggttccgctttttggcgccagggtatctggtggtgttgatttctcaggtgagactgtacagaggtcgggggctgcacccctggcctcaacaggaggcgggggaaggcgggggacggtgtcagatgagaagcaccgagccacagttgagcttaggtgaggcctcggcgggtgcgaggtgagggcagggatccacgaactcagagtcagatgctgttggcccgaatcccatggggagcgccaaggtcagcctaggacccgtggtggcgggagtgcggaggatggtggaggaagaaggagctgaactggacagatggagggctctgggagggcattgctgtgtgtgcacacaaggatgtcttaaggtcaagttttggtcatagagagccccggccaaggagacaggagggcgagaagggacatcccaggtagaggaactggcaaggtgagggacggcgatgtggaggctttggggagtgcccacatctaaggggcatcccaaaagaggagccagtgctggtggtgctgcaataggaggaggaggcagcagggcagaaatgccaggggagggagtggccagccacaggtccctgcccagggcaaggacgggcatgctaggtggcagctggggccagtcgtgcagaagccatgcccaccttgtggccgggatggagtggggactaggaaggcaccaggtcaggtttctgtaggcacagccctaagcatggctgggatggggagggggctaggaaggcaccaggtcaggtttctgtaggcacagccctaaggtttcttgtctagattcaagacaagttgttgcacagagaagccagcagagctgggtgtggggtttggtgcccagtctgctgcggggaatgccaggtgctgttccgtgactgtgggaggaaactgttggctccgctgtcccttgggtgccttcttgaggcaagtgccagggctcagggatggtgctgtgagtacctggaagaggcagggcatccagaggtgacctctcccaggctcccctagggtcccacctgtgccctgggaagtccctcagtggggtctgtactgttgtcttgctagtggtcccatgggtgtcggcagcctcagcactggaagaaggcagaggccaggtcctgggcttgtgagctgctcactagaacctggtcctgtgagcgggccagaggggagttccttccctcaccctctgggctgtggggagattccttctgctgagccagcacaggtctgtgaggcacccgggcagtgaggccacatctgccacaggcgtgtcaggttgtagtagctgatctttgagctgctgccttggatggggacagcagtggggcccgcccttgcctgaaagccagacttattgaggagggtttaggaaagtcccaggatttccatgacaacagcactgaggttgggtgtgcgccctcacagaagggacaggacccgtggtgacagtggttccctgagtggggggaggggagagaaccggctctaccagtgttactctgcacacatttggttgagtctttcacagggggtacaagtgtatgtgttactggtgcaggtttctaaatcctcgaaggatctcctcacctgaagaagatgtggggctgccctggtctcaggtagtgccatgcggggacatcagtgacaccaggatggtgttaaagtggttgctttgctgtggagtcagctttaaaattacaagccctaggctcatgcctaggcatggtggctcatgcctgtaattctagcacttaaggaggtcaaggcaggaggatcatttaaggctaggagttcaagaccagcctgagcaacatcgtgaaaccctgtctctacaaaatatttttaaaagttagctggggccaggtgcggtggctcatgcctgtcatcccagcactttgggtggccgaggcgggtggatcacctgaagtcaggagtttgagaccagcctggccaacatggagaaaccccatctctactaaaaatataaaaattagctgggcatggtggtgtgcgcctgtaatctctgctacttgggaggctgaggcgggagaatcgcttgaacctgggaggtggaggttgcagtgagccgagattgtgctactgcactccagcctgggcaacaagagcaaaactctgcctcaaaaaaaagaaaaaataaaagttagctgagtgtggtggtgcatgcctgtagtcccaactactctggaggccgagataggagtgtcgcttgagcccaggagtgagaccctgcctctaaaaataaataaataaaaaacttgccagccctgcctgtgtgcttctgcagccctgtgcagggagcttccaccctcagcccgggcccagtcccccagccccccatctttgtgaataagcatccctggagtcagtgcagcctgggctcccgccccttcatttagtgctggccgtgcggaggcgagcagttaggtagagggagactgcgtggccccgtgcggcagtcgacagttgcccaccctccctcctgttgttttctgatggttctctcagagcggatgtggataagcccagtgatggtgttcaggtccccagttctgccccgcctgccacttgggtgatctttgatatgtttcagacccatcctgttctcccaactatccctgggtgctgccagcaggaatgaggcctggctcaggctcagtgggagacggagaacatgtcagcctgttcattttccagtttctaatcctcttgataaaagaacaaaatgccttaaagtcagattctgcttggaggctgcaggaaggcaggggtgagtgcctgggaaaccctggtccttggggctgccccatggcgtgcccaggggtgatggtcaggaggcgtctccatggggcaccaatgttcagggtaaggctgtggggctatgtctgcctgtgggcaggcgtgtgggtgctcagggctggcttgggtgtaagtgtttgactcgctaatggttttgcttagactagaagttgttcctgaaactacggtctcaagagatgctccccacataaaaggagttctagtatccattgggtttgagaaaccccaggctcttcctgtgttggggctgagtcggcaggggcagcagacacaacgcggaggtgtgcttctgagcatcacactcggccctcctctccaagtagcctctcgttgtccctgtcctttctgccctggctgtcccccgtgctggagctcccacagttgtccatgccatctcctcgccttggcaagccccactcctggatctgggttagtaaacacccctgccctaccctgcaggcactgccccatccccctgtcctgagtcataggcagagtccctccttcccctttggggttcctttaccaccaggatgtgagatcctggtcggtttcctttggttgtttccagtctataaaaggtgcttggtgcatggcagcttgggacatctgaatgagcgacgtggtgaaatatgattggaggagacagacagttcccgggcagcatctgtcagagtggctggtcagccccagatgaccctgcagagcgcatgggtcctggggtgggagtcatctcacaggcccctgtggactgtcatctagctcattgtccttgttgccagggcatgcctccctccagctgggcgcagactcagcctgagtttcacacgtttgttatttagcatccattcgggggctggcctcatgccagtcacactgtttaagggacttgggataagagggaacaaaacattgaaaaatctgggcactcaagtactagaaagtcaagttagatcctcctcttccgcagcagaactaccaaggtgtggatacagaggatggtctcaaaatgccggctgtcatccccagggaggctggccattctcctttttatccaccaagcagtggtcaggcacccactgtgtgctgctggagtgactcatgggtggggccctgaaggggcagagtccaggtgggaacagtgtcctcaggccaagcaggcagcacctcctgtggtctctctgccctggatgggaactggagtgatggacagggtggagaagcaagcggctttagctggtcttcaccatgaaactgaccctgaaagcccagtcgccaagagaccatatcgaggccccatggctggggtgaagtgtggtcggggatgagcagcggtgccttgctgggaaaggagagttcaggcagcccaggacagcggcttccctttgcctttcagctgctgtatgtttccaggaaacttctaggacagaggctattcaacaagctcatgaagatgaccttctatgggcattttgtagccggggaggaccaggagtccatccagcccctgcttcggcactacagggccttcggtgtcagcgccatcctggactatggagtggaggaggacctgagccccgaggaggcagagcacaaggagatggagtaaggcctgcccggtgtctgcgggctttctgatcatgaccctggagcacccagtgggagcaggtgggatgtatccagctgctgggcttcagcctcagctgggcagaggccaaggctaggagagcttggtcagcccaactaccgatgaccctcctgggctctgcctggagttcttgcatttttgtttcatgcggtggacagctctgggctttcatgggaggcctggtgtgcgtgaggcctgaggaagcagagtacagaatggcccttggccctatctagtccaccgcctggaggagcacaggcaccagcatatgaaccaagcactctgcaaagaatggttggtctcgcctggatctcacatgagccagggactgctccaggaagtggagggaaacgtggtcttgttgttctgtcctgatgccctgcccaggagggcgggtcagggtggtaccaactgccctctacactcactgcccagggaaggggccttgtatcagcttagtggcctccaggagctgactccaggccggcctgctacactgctcctggcttcaattcccttctccactgacaatggggcaggggccaggcctgggaggttccacaactgcagggcaggctgaggccaggcaagggtcgggcagtgggacctgcctgcgggtcaggaatccctgcaaaagagaggctgtagcagagcctcctccatcaggtcagcaagtttgtgtaaacagccaggtagcacagactctcagtcgggccacaccctccctgccacaacggcttcactctgcctcagtagggccatagtaattagaatttcatataattttcttgtgtcacaaaatattattcttgttttgatttctttcaaccagtttttttaaagtagggtcttgctctgttgcccaggctagagtgcagtggtgccattgttcactgcagccaaccttctgggctcaagtgatcctcccatctgagccccctaagtagctgggaccacaggcacgcaccaccatacctggctaagttttaatttttttttgtaaagatgggatctccctatgtcttcctatgtatttgggtcccctgcaccctgacagcagccgggcctgacccacataaggcttgggacagtccctctgtggacctggtcaggccttggtggttgttcctgcccctcccctggtggctggcctgggaaggggagggaaaggcagtcacatgaggcctccagccctgggaacggaatgtctgaggcttgcctcagcatgtcggctgccagctgcctggagaggattggccaggggagcccagcccctgccttgcgattggctgttttgaaggtggggtactacagccccagcaccccactgtgttcctagcaggccccgtgggccttgcagctgcctgagctcttggctgcagcctttgctgagctgcctgttgaataaccaatggcctgtgtgttctcagaaggagtctgggtggggacttggtttcacaatgggattttcctctcaggcgcctctggtatgaaaagactcctttcccagggtggtcctgcctggcttcctccctgccctgcaggctgagtgtctggaggtggactggcctgcactctgccagggggctgggcacctgtgtccttaggagcttgagtcctttgccctgcaagggattcacctgtcttgctgctggtggctgctgtctgcaggggtcctgctccagctctgggaagtgaacagggttccctcctgtcctcacaggggtgcatgctgaggacacctaccgagctcagctgctttgtgctttcagaggggcctgagccatgggggtagggctgggtctgcaagcactggtctgatgtccacactgcagcatggcctgcttggccaggagtgaccagtcacgcagaccctagtgcagggaactgcttagagatctgccttcctaacctaccctcctgtcacaagggccatgggctctactctggggagagacactgaggccaccgccccaaattaaggccatggcaagtggtgctggccgtgagaggcccagggaggatggaggcgtctgagtgcatggcaaagtgagtcccagcagtgctcccgagaaagaaagaggaggtgggagcctggaggtgcaggagggcaatgcccacccggggggggggtggaccatgcttcccagaggccagggccccacccaaccccaggagaggagtcccagggatccccgaagcaggctgagggcttggggatggggaaggggccaaggcatcttcctgatgattgggctgtgagggaacacctagggggtggatgggggcattggtctggctgtgcaggcccagggctggctggaggcaggatatgtgtgcagtgagtgtcctgagcgaggggctggggaggcagagggttggggagctggggaggggggtacaggtaggaagcggcttgccaggcttccctccaggagagagttggacaagggcggggtgtggacccccatgctctgcttgtttcaataggcatcacgtccccagggacagccacccagagctgaggtggaggctgagggggtggtcagggtcttcctgctgtctctgaagaccccctggggacacgtgcttgtcctcctctgccctatgtccccttgtcgctcttccctcctctgttgtcccaggtcgtgcccatgtgtgcgatcatgtgcccttcaacagactatgccctgggcatgatgaggggtgggactgggggagcacgaggcaggtcctggctttaaggaggcattgggatgtggtccccaccctgatcagggccccacatccactggttcacccttcctcctctaacaccccacagctgccagtgccatgtgcccccctcttccctgtggtgccttgagccaggacgtggcaacgtcccaggtggcgaaagccagatttcctgtgtggcacccgcagttctgaatcagctgctcccagggtgctttcttcctcttctccagtggaaataggacccctgacctgcctgggaaccaccatttgtgtctccttgtgacttatccatgatgcctgttggagagtgtggccctgtccttgctgcgtagccatccactctgagacctggctgcccctctggccactgcacgtgctgtgtggtcatcttggccactgcttggctgtgtcagcctggtctgtgctctggaagttcacggagaggagcagcggtagcctatggtgttctgcctctgagtgtgtcagagcaggagagggagcagccctggcttccccagcctctcctgccaggcccacctcagaggatgaacacagcagctgtgggaatgctgagcgggaactcatctgcctggggacctgtcagataatgatcctgtttcatgaaggtgagctgcctcacaggcagacacctgtgtggttaagtcccgtgttatccaaactgtgggctgtgtggtttcaggatgggaccttctcttcagggtcatggaggcccctgaggccctgtccccactgtctgctgttacttgccatgagggtttctgccctgggcagggccctggctgccaccccggccttaacatagacagtgagtcccccttggggatggcttttcctggctgtacctaagccttggcgtgaaggtcttagggctgatctcatgactggtcttgaggtgcccaagccaggggcccaggagctccctgtctcaggcaggggttcacgtgctgcctgcctgttccctagtcacatggtgacattccaccctcttctgtcacatctctgtcagcataaggtggccagagcatatctgcctgccagctcccatcactgggctgcagcctcaggggccctggcagcacatgtggagtccctggcccatgtggggctgcccaggagtgggtgggagggaaggcctcctggcgggggctcctggcccagggcttgctccttgagcagccaggtggaaagtgggcagctgaggccccttgacatggaggcctctgggatgcggctcactgaccactgctctgcctttccccttcccggcatctgagggggaccctctcctttcctgtgagtgtgggcagagctgcccctgagggtccgagcgcctctggggagcttcaggaaggctctgggtgctgttggtcatgcagctgagctctctccgtggtcactgacttgatcaggtttgaatataaagtcaggtgaccctcagagctgctccgggggccagggagaccatggtcgctttgtcacagcagacttaacggccgcagcaactcttgctagcctggatgacacagcactgaaaccaagtgccagaagcagattgtggctgtggggaggaggaggaagaagaggaggctctggcaggggtgcagggctggtgggggaggggagccaggtaccctagagaagggaggggccagggggaatgggggtgctggccaggcggggatggagaggcttctgcaggaaggacaggggcttggctgagcagagtgtggccagcctagcgggggacagcctgcatcctggcctcactggtcttgaggtgcccaagccaggggcccaggactttgggcattactaggaaatgatgggaaccctgggtggggtggcgtgaaacaagatgagatggtaagatctgctttcactttaaaggaacatttctggttgttgcttggaaaagaagtgtcggggcaagaatgctacaggagggccggcctggaggacagggcgggactgcagggctggctgtgcgggggcaggagcctgtgcttgcatcagagctgcctgggagaccctggctctggggtggaggcctgagtaagggggcctcgctggggatttggggacctctgtgtgctggtgccttcccgcctccgttcctctcagccctgactggctctgtcttggaaccaggtaactacctttatttgagaacctgctgcaagccctgggctgttctgagagctcaggaatatcgttctgatttctccacccacaaggagccccgggcttcctgagcccttgggacacagcagccccataaactgctgcccctcccaggcccaagtgttccaccccaggctaggggtggggctggggctgcaccttggaatctaccctccaccggggttgtggtggggccctccgtgcagcctcagtgggaacgtgcctgtcacctgaggctcaggtggcgtgaccctgacctttgctctccccctccttcccacaggtcctgcacctcagctgcggagagggatggcagtggtgagtgagaggctgccgcgcaggaacagactccctcccgactccgcacaccccttggtggctcaggagagtctaggctggggcacaagtgggccttggggtgacgtcggagcccgggctcctccctatgtccagggcacctgccctgtcgctctgggctctgacatactcgcaagtgtctggggagacgccctgctcctttttcatggcctcctggtggacctaggcctttgttaaggagactgccgtcctggcctcatgaggaggcttagccagggggatgcagcactccaggtggaagagccgcggtgtagacaggagggtgggcttggggatgggaaccatggggcagtgcagtgccagggccaggctggcaaggccactatgcttggagccctcctgagggcaggggccctgggctattggtgtgtgggtgctgggggtgggtgtttggagctgtgctcaggccgtgcattcgctattccaggcacgaataagcgggacaagcaataccaggcccactgggccttcggggaccgcaggaatggtgtcatcagtgcccgcacctacttctacgccaatgaggccaagtgcgacagccacatggagacattcttgcgctgcatcgaagcctcaggtggggccccctctttgctggctatacccctgccatgtcccagcctgagcggacccctgggctcatggaggtgccggtgggtgaacactaagctggggcaggagccagagggctgggttctgaccacacttgggtccctcactgttcagccccttcctgaggggccccactgcctcccagaaggcatctcctctcctgccccagctccctgttccctgatcccgcctcatgccccccacccttctccctggctcagggccaggatcgggagctgcaggaagttggtccatgtcagctgccgagccacacttagcccagggtggaggttccattcagggagctggtgccgcatcttctgtccttccctgacacagcctctgggggccagcggtgggggcagcaggtgtttccagggatagagaagccagaggtcagcaaggcccaatgtccttcagtgttagaaacatccgacctgcacagccccatgctggccccagcagccctccgtcaggggcagcgggtcccaggcctgtttatgtttttgtttgtttgcttcaaatgagactggatcttgctctgtcacccaggctggagtgctcacgcctctaatcccagcaatttgggaggccaaggcgggtggattgcctgagctcagttcaagaccagcctgggcaacatggtgaaactccgtctccactaaaatacaaaaaattagccgggcgtggcagcaggcgcttgtaatcccagctacttgggaggctgagacaggagaatcacttgaatccaggaggcggaggttgcagtgagccaagattgcgccactgcactccagcctgggcgacagagtgagactccatctcaaaaaaaaaaaaaaaaaatgaggtctcactatgttgccctggttggcctggaactcctgggctcaagtgatccctccaccttggcctcccaaagtgctgggattacaggcacacactaccacacccagctaattttcatattttttgtagagatggtgtttcaccatgttgcccaggctggtctcaaactcctggcctcaagcgaaccttacactttggcctcccaaagtgctgggattataggtgcatgccgctgcacctggcacttctgagcagtgcttggaagccgcctcctgatgggggctgagggtcagagtggccagctgaatgctgggccatcagggtgaggggcgtcttctcctcgtccattgcctgttctcccagggcaggtggaaggggaaggccctgcattggggtggcgtgaaacaagatgagatggtaagatctgctttcactttaaaggaacatttctggttgttgcttggaaagaagtgtcaggggcaagaatgctgcaggagggctggcctggaggacagggtgggactgcgggctggctgcacgggggcaggagcctgcgcttgcgtcagaggttcctgagagactcggtctctggggcagaggcctgagcaaggggacctcgctggggtgtctctgtcttagccacgctcggtgtttctgggtcctgtgacccacgtgtgagcagcctgtggtgctggtggcacagggaaggaaaccgaggcagggagcctgtgggggctgcttggcaggggacaggcagctcctgtgcccactgctgtcccacacctgcatggaaacagaaaccccgccacggagccccctcccatctccacagggcctctagagcgccatgtgcaaggacttcatgggcggggtggggtggggtcaggagcctgctgtgggctggccaggccctggccctccctgtcgcaccctgcgctgcctccatgcacctctcagggctgtcatggcttttcctgtggcttctgacaggtagagtcagcgatgacggcttcatagccattaagctcacagcactggggagaccccagtttctggtaagtgctagaaccttccacctgcagagtctggtgctgtgcgagatctcagggcagctgtgggcatccaccaaaaacacaggtgcccatgccttagaggcctgagctggccacaggggctgtgtgggggactggggtgggcaggggcgtgtgcagatggcattcaggcctgcgtttgcagctgcagttctcagaggtgctggccaagtggaggtgcttctttcaccaaatggct

SEQ ID NO: 13579 - DNA, 491 bp, Homo sapiens
cccgcgctgcgcccctgcattccccgcttcgtcccgctgtccacggcgccggcctcccgcgagcagcccgcagcgggcccagcggccgtgccaggaggtgggtcggccacggcagtgcggccgccggtgcccgccgtggacttcggcaacgcgcaggaggcgtaccgcagccggcgaacctgggagctggcgcggagcctgctggtgctgcgcttgtgcgcctggcccgcgctgctggcgcgccacgagcaggtcctgcacctcagctgcggagagggatggcagtggcacgaataagcgggacaagcaataccaggcccactgggccttcggggaccgcaggaatggtgtcatcagtgcccgcacctacttctacgccaatgaggccaagtgcgacagccacatggagacattcttgcgctgcatcgaagcctcagctgcagttctcagaggtgctggccaagtggaggtgcttctttcaccaaatggct
